United States Patent Application Publication US 2020/0163878 A1 - sequence listing, part 53

SEQ ID NO: 200170 - RNA, 1701 nt, Artificial Sequence; identical to SEQ ID NO: 194506
  derived and/or modified CDS sequence (opt5) from hemagglutinin__InfluenzaA__AEX36124

SEQ ID NO: 200171 - RNA, 1701 nt, Artificial Sequence
  derived and/or modified CDS sequence (opt5) from hemagglutinin__InfluenzaA__AEX36146
augaagaccaucauugcccugagcuacauccucugccuggugcuugcucagaaacugcccggcgacgauaacuccacagccacgcucugucuggggcaccaugcggucccuaauggaaccauuguuaagacaaucaccaacgaccaaauugaggugacaaaugcuaccgaacuugugcagucuagcuccacaggcgagaucugcgauucuccgcaccagauccuggacggggaaaacuguacccucauugaugcccugcugggagacccccagugcgauggcuuccaaaauaaaaagugggaccucuuugucgagagaagcaaagccuauuccaacuguuacccuuaugaugugcccgacuacgcuucucugcggagccuuguugccuccagcgggacgcuggaguucaauaacgaaucuuuuaauuggaccggagugacacagaacggcaccuccagcgcuugcauccgcagaucuaauaacuccuucuuuagccggcucaauuggcugacacaucuuaaguucaaguauccugcccugaacgucaccaugcccaauaacgagcaguuugauaaacucuacauuuggggcgugcaccauccugggacggacaacgaucagaucuuccuguaugcgcaagccucuggacgcauuacaguuuccaccaagagaagccagcagacagugaucccgaauauuggcucccggccccgcgucagaaacaucccuucucggaucagcauuuacuggaccaucgugaaacccggggacauucugcucaucaauuccaccggaaaccugauugcuccucgcggcuacuuuaagaucagaagcgggaaaucuuccaucaugcggagcgacgcccccauuggaaaguguaauucugaaugcaucacaccgaacggcagcauuccuaaugauaagcccuuccagaacgugaaucgcaucacguauggcgcuuguccuagauacgucaaacaaaacacccuuaagcuggccacagggaugcggaauguucccgagaaacagacccgcggaauuuuuggcgcgaucgccggguucaucgaaaacggaugggagggcaugguggacgggugguauggauuuagacaccaaaauuccgagggccggggccaggcugccgaucucaagucuacacaggcugccauugaccagaucaacgggaaacugaauagacuuauuggaaagaccaacgaaaaauuccaccagaucgagaaggaguucagcgaaguggaaggccgcauucaagaucuggagaaguacgucgaggacacgaaaaucgaucucugguccuauaacgccgaacugcugguggcucucgagaaucagcauacaauugaccugaccgauagcgaaaugaacaaacuuuuugagaagaccaagaaacagcugcgggaaaaugcggaggacauggggaacggaugcuucaagaucuaccacaagugugauaaugccugcaucggcucuauuagaaacgggacauaugaccaugacguuuaccgcgaugaggcucucaauaaccgguuucagaucaaaggcguggaacugaaguccggauacaaagacuggauucuuuggaucagcuucgccauuucuugcuuucugcucugugucgcccugcugggcuucaucaugugggcuugccaaaaggggaauaucagauguaacauuugcaucuga

SEQ ID NO: 200172 - RNA, 1701 nt, Artificial Sequence
  derived and/or modified CDS sequence (opt5) from hemagglutinin__InfluenzaA__AEX36168
augaagaccaucauugcccugagcuacauccucugccugguguucgcucagaaacuucccggcauugacaacuccacagccacgcugugucucgggcaccaugcggucccuaauggaaccaucguuaagacaauuaccaacgaucaaaucgaggugacaaaugcuaccgaacuggugcagucuagcuccacaggcgggaucugcgacucuccgcaccagauucuugauggagagaacuguacccugaucgacgcccuccugggcgauccccagugcgacggguuucaaaauaaaaagugggaucuguucgucgaaagaagcaaagccuauuccaacuguuacccuuaugacgugcccgauuacgcuucucuccggagccugguugccuccagcggaacgcuugaguuuaauaacgaaucuuucaauugggcuggcgugacccagaacggcacauccagcgccugcaagcgcgggucugacaauuccuuuuucagcagacugaacuggcucacccaucugaaguuuaaauauccugcgcuuaaugucacaaugcccaacaaugaggaguucgauaagcuguacauuuggggagugcaccauccuggcaccgacaacgaucagaucuuucucuaugcccaggcuucugggcggauuacgguuuccacaaaacgcagccaacagaccgugaucccgaacauuggauccagaccccggguccgcaauaucccuucuagaaucagcauuuacuggacaaucgugaagcccggcgacauucugcugaucaacuccaccgggaaucucauugccccucggggauacuucaaaauccgcagcggcaagucuuccaucaugagaagcgacgcucccauuggcaaguguaacucugaaugcaucaccccgaaugggagcauuccuaacgauaaacccuuucagaaugugaaccggaucacauauggagccuguccucgcuacgucaagcagaauacgcugaaacuugcgaccggcaugagaaacguucccgagaagcaaacacgggggauuuucggagccaucgcuggcuuuaucgaaaaugggugggagggaaugguggacggcugguauggcuuccgccaccagaacuccgaggggauuggacaggccgcugaucugaaaucuacccaagccgccaucgaccagauuaauggcaagcucaacaaacugaucgggaagacaaaugaaaaguuccaccagauugagaaagaauuuagcgagguggaaggaagaauccaggaucuugagaaguacgucgaggacaccaaaauugaucugugguccuauaacgcugaacuccugguggcgcuggagaaccaacauacgaucgaccucacagauagcgaaaugaauaagcuguucgagaaaaccaagaagcagcuucgggaaaacgccgaggacaugggcaaugggugcuuuaaaaucuaccacaagugugauaacgcuugcauuggcucuaucagaaauggaaccuaugaccaugacguuuaccgcgaugaggcccugaacaaucgguucaaaauuaagggcguggaacucaaauccggguacaaggacuggauccuguggauuagcuuugccaucucuugcuuccuucugugugucgcucuccugggauuuaucaugugggccugccagaagggcaacauuaaauguaauaucugcauuuga

SEQ ID NO: 200173 - RNA, 1701 nt, Artificial Sequence; identical to SEQ ID NO: 194506
  derived and/or modified CDS sequence (opt5) from hemagglutinin__InfluenzaA__AEX36179

SEQ ID NO: 200174 - RNA, 1701 nt, Artificial Sequence; identical to SEQ ID NO: 200055
  derived and/or modified CDS sequence (opt5) from hemagglutinin__InfluenzaA__AEX36190

SEQ ID NO: 200175 - RNA, 1701 nt, Artificial Sequence; identical to SEQ ID NO: 200050
  derived and/or modified CDS sequence (opt5) from hemagglutinin__InfluenzaA__AEX36201

SEQ ID NO: 200176 - RNA, 1701 nt, Artificial Sequence
  derived and/or modified CDS sequence (opt5) from hemagglutinin__InfluenzaA__AEX36212
augaagaccaucauugcccugagcuacauccucugccugguguucgcucagaaacuucccggcauugacaacuccacagccacgcugugucucgggcaccaugcggucccuaauggaaccaucguuaagacaauuaccaacgaucaaaucgaggugacaaaugcuaccgaacuggugcagaacucuagcacaggcgggaucugcgacuccccgcaccagauucuugauggagagaauuguacccugaucgacgcccuccugggcgauccccagugcgacggguuucaaaacaaaaagugggaucuguucgucgaaagaucuaaagccuauagcaauuguuacccuuaugacgugcccgauuacgcuucccuccggucucugguugccagcuccggaacgcuugaguuuaacaaugaaucuuucaacuggaccggcgugacacagaauggcaccucuuccgcuugcaagcgcgggagcaacaauagcuuuuucuccagacugaacuggcucacacauagcaaguuuaaauauccugcccugaaugucaccaugcccaacaacgaggaguucgacaaacuuuacauuuggggagugcaccauccuggcacggauaaugaccagaucuuucuguaugcgcaggccucugggcggauuacaguuuccaccaagaucagccaacagacagugauuccgaacaucggaucccgccccagaguccggaauaucccuucucgcauuagcaucuacuggaccauugugaagcccggcgauauccuccugauuaacuccaccgggaaucugaucgcuccuagaggauacuucaaaauccggagcggcaagucuuccauuaugcgcagcgacgcccccaucggcaaguguaacucugaaugcauuacaccgaaugggagcaucccuaacgacaaacccuuucagaaugugaacagaauuacguauggagcuuguccucgguacgucaagcagaauacccucaaacuggccacaggcaugcgcaacguucccgagaagcaaaccagagggaucuucggagcgaucgccggcuuuauugaaaaugggugggagggaaugguggauggcugguauggcuuccggcaccagaacuccgaggggaucggacaggcugccgaccuuaaaucuacacaagcugccauugaucagaucaauggcaagcugaaccgccucauugggaaaaccaacgaaaaguuccaccagaucgagaaggaauuuagcgagguggaaggacggauucaggaccuggagaaauacgucgaggauacgaagaucgaccuuugguccuauaaugccgaacugcucguggcucuggagaaccaacauacaaucgaucugaccgacagcgaaaugaauaaacucuucgagaagaccaaaaagcagcugagagaaaacgcggaggauaugggcaaugggugcuuuaagauuuaccacaaaugugacaacgccugcaucggcucuauuagaaauggaacauaugaucaugacguuuaccgcgacgaggcucuuaacaaucgguuccagaucaagggcguggaacugaaauccggguacaaggauuggauucucuggaucagcuuugccaucucuugcuuccugcuuugugucgcccugcucggauuuauuaugugggcuugccagaaaggcaacaucagauguaauauuugcaucuga

SEQ ID NO: 200177 - RNA, 1701 nt, Artificial Sequence; identical to SEQ ID NO: 200050
  derived and/or modified CDS sequence (opt5) from hemagglutinin__InfluenzaA__AEX36223

SEQ ID NO: 200178 - RNA, 1701 nt, Artificial Sequence
  derived and/or modified CDS sequence (opt5) from hemagglutinin__InfluenzaA__AEX36234
augaagaccaucauugcccugagcuacauccucugccugguguucgcucagaaacuucccggcaacgacaauuccacagccacgcugugucucgggcaccaugcggucccuaacggaaccauuguuaagacaaucaccaaugaucaaauugaggugacaaacgcuaccgaacuggugcagucuagcuccacaggcgggaucugcgacucuccgcaccagauccuugauggagagaauuguacccugauugacgcccuccugggcgauccccagugcgacggguuucaaaacaaaaagugggaucuguucgucgaaagaagcaaagccuauuccaauuguuacccuuaugacgugcccgauuacgcuucucuccggagccugguugccuccagcggaacgcuugaguuuaacaaugaaucuuucaacuggaccggcgugacacagaauggcaccuccagcgcuugcaagcgcgggucugacaacuccuuuuucagcaagcugaauuggcucacacaucugaaauuuaaguauccugcccuuaacgucaccaugcccaauaacgagaaauucgauaagcuguacaucuggggagugcaccauccuggcacggacaacgaucagauuuuucucuaugcgcaggccucugggagaaucacaguuuccaccaaacggagccaacagacagugauuccgaauaucggaucccgccccagaguccggaacauuccuucucgcaucagcaucuacuggaccauugugaagcccggcgacauccugcugauuaauuccaccgggaaccucaucgcuccuagaggauacuucaagauucggagcggcaaaucuuccaucaugcgcagcgacgcccccaucggcaaguguaauucugagugcauuacaccgaacgggagcaucccuaaugauaaacccuuucagaacgugaauagaauuacguauggagcuuguccucgguacgucaagcagaacacccugaaacuugccacaggcaugcgcaauguucccgaaaagcaaaccagagggaucuucggagcgauugccggcuuuaucgagaacgggugggaaggaaugguggacggcugguauggcuuccggcaccaaaauuccgaggggaucggacaggcugccgaucugaaaucuacacaggcugccauuaaccagaucaauggcaagcucaaccgccugauugggaagaccaacgagaaauuccaccagaucgaaaaggaguuuagcgaaguggagggacggauucaggaccuugaaaaauacgucgaggauacgaagaucgaccugugguccuauaaugccgagcuccugguggcucuggaaaaccaacauacaauugaucucaccgacagcgagaugaauaaacuguucgaaagaaccaagaagcagcuuagagagaacgcggaagauaugggcaaugggugccugaaaaucuaccacaagugugacaacgccugcaucggcucuauucgcaauggaacauaugaucaugacguuuaccgggacgaggcucucaacaauagauuucagaucaaaggcguggagcugaaguccggguacaaagauuggauucuuuggaucagcuucgccauuucuugcuuucugcucugugucgcccugcugggauucaucaugugggcuugccagaagggcaacauccgcuguaauauuugcaucuga

SEQ ID NO: 200179 - RNA, 1701 nt, Artificial Sequence
  derived and/or modified CDS sequence (opt5) from hemagglutinin__InfluenzaA__AEX36245
augaagaccaucauugcccugagcuacauccucugccugguguucgcucagaaacuucccggcauugacaacuccacagccacgcugugucucgggcaccaugcggucccuaauggaaccaucguuaagacaauuaccaacgaucaaaucgaggugacaaaugcuaccgaacuggugcagaacucuagcacaggcgggaucugcgacuccccgcaccagauucuugauggagagaauuguacccugaucgacgcccuccugggcgauccccagugcgacggguuucaaaacaaaaagugggaucuguucgucgaaagaucuaaaacguauagcaauuguuacccuuaugacgugcccgauuacgccucccuccggucucugguugcuagcuccggaacccuugaguuuaacaaugaaucuuucaacuggacaggcgugacccagaauggcacaucuuccgccugcaagcgcgggagcaacaauagcuuuuucuccagacugaacuggcucacccauagcaaguuuaaauauccugcucugaaugucacgaugcccaacaacgaggaguucgacaaacuuuacauuuggggagugcaccauccuggcacagauaaugaccagaucuuucuguaugcccaggcgucugggcggauuaccguuuccacaaaacgcagccaacagaccgugaucccgaacauuggauccagaccccggguccgcaauaucccuucuagaaucagcauuuacuggaccaucgugaagcccggcgauauucuccugaucaacuccacagggaaucugauugccccucggggauacuucaaaauccgcagcggcaagucuuccaucaugagaagcgacgcucccauuggcaaguguaacucugaaugcaucacgccgaaugggagcauuccuaacgacaaacccuuucagaaugugaaccggaucaccuauggagccuguccucgcuacgucaagcagaauacacucaaacuggcuaccggcaugagaaacguucccgagaagcaaacacgggggauuuucggagccaucgcgggcuuuaucgaaaaugggugggagggaaugguggauggcugguauggcuuccgccaccagaacuccgaggggauuggacaggccgcugaccuuaaaucuacccaagccgcuaucgaucagauuaauggcaagcugaacagacucaucgggaaaacgaacgaaaaguuccaccagauugagaaggaauuuagcgagguggaaggacggauccaggaccuggagaaauacgucgaggauacaaagauugaccuuugguccuauaaugccgaacugcucguggcccuggagaaccaacauaccaucgaucugaccgacagcgaaaugaauaaacucuucgagaagacaaagaagcagcugagagaaaacgcugaggauaugggcaaugggugcuuuaagaucuaccacaaaugugacaacgcgugcauuggcucuauccgcaauggaaccuaugaucaugacguuuaccgggacgaggcccuuaacaauagauuccagauuaagggcguggaacugaaauccggguacaaggauuggauccucuggauuagcuuugcuaucucuugcuuccugcuuugugucgcccugcucggauuuaucaugugggccugccagaaaggcaacauucgcuguaauaucugcauuuga

SEQ ID NO: 200180 - RNA, 1701 nt, Artificial Sequence
  derived and/or modified CDS sequence (opt5) from hemagglutinin__InfluenzaA__AEX36256
augaagaccaucauugcccugagcuacauccucugccugguguucacacagaaacuucccggcaacgacaauuccacggcuacccugugucucgggcaccaugccgucccuaacggaacaauuguuaagaccaucacaaaugaucaaauugaggugaccaacgcgacagaacuggugcagucuagcuccaccggcgagaucugcgacucuccgcaccagauccuugauggggaaaauuguacgcugauugacgcucuccugggagauccccagugcgacggcuuucaaaacaaaaagugggaucuguucgucgagagaagcaaagccuauuccaauuguuacccuuaugacgugcccgauuacgccucucuccggagccugguugcuuccagcgggacccuugaauuuaacaaugagucuuucaacuggacaggagugacccagaauggcacauccagcgccugcauccgcaagucuaacaauuccuuuuucagcagacugaacuggcucacccaucugaaguuuaaauauccugcucuuaaugucacgaugcccaacaacgagcaguucgacaagcuguacauuuggggcgugcaccauccugggacagauaaugaccagaucuuucucuaugcccaagcgucuggacggauuaccguuuccacaaaacgcagccagcagaccgugaucccgaacauuggcuccagaccccggguccgcaauaucccuucuagaaucagcauuuacuggaccaucgugaagcccggggauauucugcugaucaacuccacaggaaaucucauugccccucggggcuacuucaaaauccgcagcgggaagucuuccaucaugagaagcgacgcucccauuggaaaguguaacucugaaugcaucacgccgaauggcagcauuccuaacgacaaacccuuucagaaugugaaccggaucaccuauggcgccuguccucgcuacgucaagcaaaauacacugaaacuugcuaccgggaugagaaacguucccgagaagcagacacggggaauuuucggcgccaucgcgggguuuaucgaaaauggaugggagggcaugguggaugggugguauggauuccgccaccagaacuccgagggcagaggccaagccgcugaccugaaaucuacccaggccgcuauugaucagaucaaugggaagcucaaccggcugauuggaaaaacgaacgaaaaguuccaccagaucgagaaggaauuuagcgagguggaaggccgcauucaagaccuugagaaauacgucgaggauacaaagaucgaccugugguccuauaaugccgaacuccugguggcccuggagaaccagcauaccauugaucucaccgacagcgaaaugaauaaacuguucgagaagaccaaaaagcagcuuagagaaaacgcugaggauauggggaauggaugcuuuaagaucuaccacaaaugugacaacgcgugcaucggcucuauucggaaugggacauaugaucaugacguuuacagagacgaggcccugaacaaucgcuuccagaucaagggcguggaacucaaauccggauacaaggauuggauucuguggaucagcuuugcuauuucuugcuuccuucugugugucgcccuccugggcuuuaucaugugggccugccaaaaagggaacauccgguguaauauuugcaucuga

SEQ ID NO: 200181 - RNA, 1701 nt, Artificial Sequence; identical to SEQ ID NO: 200050
  derived and/or modified CDS sequence (opt5) from hemagglutinin__InfluenzaA__AEX36267

SEQ ID NO: 200182 - RNA, 1701 nt, Artificial Sequence
  derived and/or modified CDS sequence (opt5) from hemagglutinin__InfluenzaA__AEX36289
augaagaccaucauugcccugagcuacauccucugccugguguucgcucagaaacuucccggcauugacaacuccacagccacgcugugucucgggcaccaugcggucccuaauggaaccaucguuaagacaauuaccaacgaucaaaucgaggugacaaaugcuaccgaacuggugcagaacucuagcacaggcgggaucugcgacuccccgcaccagauucuugauggagagaauuguacccugaucgacgcccuccugggcgauccccagugcgacggguuucaaaacaaaaagugggaucuguucgucgaaagaucuaaagccuauagcaauuguuacccuuaugacgugcccgauuacgcuucccuccggucucugguugccagcuccggaacgcuugaguuuaacaaugaaucuuucaacuggaccggcgugacacagaauggcaccucuuccgcuugcaagcgcgggagcaacaauagcuuuuucuccagacugaacuggcucacacauagcaaguuuaaauauccugcccugaaugucaccaugcccaacaacgaggaguucgacaaacuuuacauuuggggagugcaccauccuggcacggauaaugaccagaucuuucuguaugcgcaggccucugggcggauuacaguuuccaccaagaucagccaacagacagugauuccgaacaucggaucccgccccagaguccggaauaucccuucucgcauuagcaucuacuggaccauugugaagcccggcgauauccuccugauuaacuccaccgggaaucugaucgcuccuagaggauacuucaaaauccggagcggcaagucuuccauuaugcgcagcgacgcccccaucggcaaguguaacucugaaugcauuacaccgaaugggagcaucccuaacgacaaacccuuucagaaugugaacagaauuacguauggagcuuguccucgguacgucaagcagaauacccucaaacuggccacaggcaugcgcaacguucccgagaagcaaaccagagggaucuucggagcgaucgccggcuuuauugaaaaugggugggagggaaugguggauggcugguauggcuaccggcaccagaacuccgaggggaucggacaggcugccgaccuuaaaucuacacaagcugccauugaucagaucaauggcaagcugaaccgccucauugggaaaaccaacgaaaaguuccaccagaucgagaaggaguucagcgaaguggaaggacggauucaggaccuggagaaauaugucgaggauacgaagaucgaccuuugguccuacaaugccgaacugcucguggcucuggagaaccaacauacaaucgaucugaccgacagcgaaaugaauaaacucuuugagaagaccaaaaagcagcugagagaaaacgcggaggauaugggcaaugggugcuucaagauuuaucacaaaugugacaacgccugcaucggcucuauuagaaauggaacauacgaucaugacguuuaccgcgacgaggcucuuaacaaucgguuucagaucaagggcguggaacugaaacucggguauaaggauuggauucuguggaucuccuucgccaucagcugcuuucuucugugugucgcccuccugggauucauuaugugggcuugccagaaaggcaacaucagauguaauauuugcaucuga

SEQ ID NO: 200183 - RNA, 1701 nt, Artificial Sequence
  derived and/or modified CDS sequence (opt5) from hemagglutinin__InfluenzaA__AEX36300
augaagaccaucauugcccugagcuacauccucugccugguguucgcucagaaacuucccggcauugacaacuccacagccacgcugugucucgggcaccaugcggucccuaauggaaccaucguuaagacaauuaccaacgaucaaaucgaggugacaaaugcuaccgaacuggugcagaacucuagcacaggcgggaucugcgacuccccgcaccagauucuugauggagagaauuguacccugaucgacgcccuccugggcgauccccagugcgacggguuucaaaacaaaaagugggaucuguucgucgaaagaucuaaagccuauagcaauuguuacccuuaugacgugcccgauuacgcuucccuccggucucugguugccagcuccggaacgcuugaguuuagcaacgaaucuuucaauuggaccggcgugacacagaacggcaccuccagcgcuugcaagcgcgggucuaauaacuccuuuuucagcaagcugaauuggcucacacauucuaaauuuaaguauccugcccugaacgucaccaugcccaauaacgaggaguucgacaaacuuuacauuuggggagugcaccauccuggcacggauaacgaccagaucuuucuguaugcgcaggccuccgggagaauuacaguuagcaccaagcggucccaacagacagugaucccgaauauuggaucucgccccagaguccggaacaucccuagccgcaucuccauuuacuggaccaucgugaaacccggcgauauucuccugaucaauagcaccgggaaccugauugcuccuagaggauacuucaagauccggucuggcaaguccagcaucaugcgcucugacgcccccauuggcaaauguaauagcgaaugcaucacaccgaacggguccauuccuaaugacaagcccuuucagaacgugaauagaaucacguauggagcuuguccucgguacgucaaacagaacacccucaagcuggccacaggcaugcgcaauguucccgagaaacaaaccagagggauuuucggagcgaucgccggcuuuaucgaaaacgggugggagggaaugguggauggcugguauggcuuccggcaccaaaauucugaggggauuggacaggcugccgaccuuaagagcacacaggcugccaucgaucagauuaacggcaaacugaaucgccucaucgggaagaccaacgaaaaguuccaccagauugagaaagaauuuuccgagguggaaggaagaauccaggaccuggagaaguacgucgaggauacgaaaauugaccuuuggagcuauaacgccgaacugcucguggcucuggagaaucaacauacaaucgaucugaccgacucugaaaugaacaagcuguucgagaaaaccaagaagcagcugcgggaaaaugcggaggauaugggcaacgggugcuuuaaaaucuaccacaagugugacaaugccugcauuggcuccaucagaaacggaacauaugaucaugacguuuaccgcgacgaggcucuuaauaaccgguuccagauuaaaggcguggaacucaagagcggguacaaagauuggauccucuggauuucuuuugccaucuccugcuuccugcuuugugucgcccugcucggauuuaucaugugggcuugccagaagggcaauauuagauguaacaucugcauuuga

SEQ ID NO: 200184 - RNA, 1701 nt, Artificial Sequence
  derived and/or modified CDS sequence (opt5) from hemagglutinin__InfluenzaA__AEX36311
augaagaccaucauugcccugagcuacauccucugccugguguucgcucagaaacuucccggcauugacaacuccacagccacgcugugucucgggcaccaugcggucccuaauggaaccaucguuaagacaauuaccaacgaucaaaucgaggugacaaaugcuaccgaacuggugcagucuagcuccacaggcgggaucugcgacucuccgcaccagauucuugauggagagaacuguacccugaucgacgcccuccugggcgauccccagugcgacggguuucaaaauaaaaagugggaucuguucgucgaaagaagcaaagccuauuccaacuguuacccuuaugacgugcccgauuacgcuucucuccggagccugguugccuccagcggaacgcuugaguuuaauaacgaaucuuucaauugggcuggcgugacccagaacggcacauccagcgccugcaagcgcgggucuaauaacuccuuuuucagcagacugaauuggcucacccaucugaaguuuaaauauccugcgcuuaacgucacaaugcccaauaacgaggaguucgacaagcuguacauuuggggagugcaccauccuggcaccgauaacgaccagaucuuucucuaugcccaggcuucugggcggauuacgguuuccacaaaacgcagccaacagaccgugaucccgaauauuggauccagaccccggguccgcaacaucccuucuagaaucagcauuuacuggacaaucgugaagcccggcgauauucugcugaucaauuccaccgggaaccucauugccccucggggauacuucaaaauccgcagcggcaagucuuccaucaugagaagcgacgcucccauuggcaaguguaauucugaaugcaucaccccgaacgggagcauuccuaaugacaaacccuuucagaacgugaaucggaucacauauggagccuguccucgcuacgucaagcagaacacgcugaaacuugcgaccggcaugagaaauguucccgagaagcaaacacgggggauuuucggagccaucgcuggcuuuaucgaaaacgggugggagggaaugguggauggcugguauggcuuccgccaccaaaauuccgaggggauuggacaggccgcugaccugaaaucuacccaggccgccaucgaucagauuaacggcaagcucaauagacugaucgggaaaacaaacgaaaaguuccaccagauugagaaggaauuuagcgagguggaaggacggauccaggaccuugagaaauacgucgaggauaccaagauugaccugugguccuauaacgcugaacuccugguggcgcuggagaaucaacauacgaucgaucucacagacagcgaaaugaacaaacuguucgagaagaccaaaaagcagcuuagagaaaaugccgaggauaugggcaacgggugcuuuaagaucuaccacaaaugugacaaugcuugcauuggcucuauccgcaacggaaccuaugaucaugacguuuaccgggacgaggcccugaauaacagauuccagauuaagggcguggaacucaaauccggguacaaggauuggauccuguggauuagcuuugccaucucuugcuuccuucugugugucgcucuccugggauuuaucaugugggccugccagaaaggcaauauucgcuguaacaucugcauuuga

SEQ ID NO: 200185 - RNA, 1701 nt, Artificial Sequence
  derived and/or modified CDS sequence (opt5) from hemagglutinin__InfluenzaA__AEX36322
augaagaccaucauugcccugagcuacauccucugccugguguucgcucagaaacuucccggcauugacaacuccacagccacgcugugucucgggcaccaugcggucccuaauggaaccaucguuaagacaauuaccaacgaucaaaucgaggugacaaaugcuaccgaacuggugcagaacucuagcacaggcgggaucugcgacuccccgcaccagauucuugauggagagaauuguacccugaucgacgcccuccugggcgauccccagugcgacggguuucaaaacaaaaagugggaucuguucgucgaaagaucuaaagccuauagcaauuguuacccuuaugacgugcccgauuacgcuucccuccggucucugguugccagcuccggaacgcuugaguuuaacaaugaaucuuucaacuggaccggcgugacacagaauggcaccucuuccgcuugcaagcgcgggagcaacaauagcuuuuucuccagacugaacuggcucacacauagcaaguuuaaauauccugcccugaaugucaccaugcccaacaacgaggaguucgacaaacuuuacauuuggggagugcaccauccuggcacggauaaugaccagaucuuuccguaugcgcaggccucugggcggauuacaguuuccaccaagaucagccaacagacagugauucccaacaucggaucccgcccuagaguccggaauauccccucucgcauuagcaucuacuggaccauugugaagccuggcgauauccugcucauuaacuccaccgggaaucugaucgcucccagaggauacuucaaaauccggagcggcaagucuuccauuaugcgcagcgacgccccgaucggcaaguguaacucugaaugcauuacaccuaaugggagcauccccaacgacaaaccuuuucagaaugugaacagaauuacguauggagcuuguccccgguacgucaagcagaauacccugaaacucgccacaggcaugcgcaacguucccgagaagcaaaccagagggaucuucggagcgaucgccggcuuuauugaaaaugggugggagggaaugguggauggcugguauggcuuccggcaccagaacuccgaggggaucggacaggcugccgaccugaaaucuacacaagcugccauugaucagaucaauggcaaacuuaaccgccugauugggaagaccaacgaaaaguuccaccagaucgagaaggaauuuagcgagguggaaggacggauucaggaccucgagaaauacgucgaggauacgaagaucgaccugugguccuauaaugccgaacuucugguggcucucgagaaccaacauacaaucgaucugaccgacagcgaaaugaauaaacuguucgagaagaccaaaaagcagcucagagaaaacgcggaggauaugggcaaugggugcuuuaagauuuaccacaaaugugacaacgccugcaucggcucuauuagaaauggaacauaugaucaugacguuuaccgcgacgaggcucugaacaaucgguuccagaucaagggcguggaacuuaaauccggguacaaggauuggauucuguggaucagcuuugccaucucuugcuuccuccuguguauugcccuucugggauuuaucaugugggcuugccagaaaggcaacauuagauguaauaucugcauuuga

SEQ ID NO: 200186 - RNA, 1701 nt, Artificial Sequence
  derived and/or modified CDS sequence (opt5) from hemagglutinin__InfluenzaA__AEX36333
augaagaccaucauugcccugagcuacauccucugccugguguucgcucagaaacuucccggcauugacaacuccacagccacgcugugucucgggcaccaugcggucccuaauggaaccaucguuaagacaauuaccaacgaucaaaucgaggugacaaaugcuaccgaacuggugcagaacucuagcacaggcgggaucugcgacuccccgcaccagauucuugauggagagaauuguacccugaucgacgcccuccugggcgauccccagugcgacggguuucaaaacaaaaagugggaucuguucgucgaaagaucuaaagccuauagcaauuguuacccuuaugacgugcccgauuacgcuucccuccggucucugguugccagcuccggaacgcuugaguuuaacaaugaaucuuucaacuggaccggcgugacacagaauggcaccucuuccgcuugcaagcgcgggagcaacaauagcuuuuucuccagacugaacuggcucacacauagcaaguuuaaauauccugcccugaaugucaccaugcccaacaacgaggaguucgacaaacuuuacauuuggggagugcaccauccuggcacggauaaugaccagaucuuucuguaugcgcaggccucugggcggauuacaguuuccaccaagcgcagccaacagacagugaucccgaacauuggauccagaccccggguccgcaauaucccuucuagaaucagcauuuacuggaccaucgugaagcccggcgauauucuccugaucaacuccaccgggaaucugauugcuccucggggauacuucaaaauccgcagcggcaagucuuccaucaugagaagcgacgcccccauuggcaaguguaacucugaaugcaucacaccgaaugggagcauuccuaacgacaaacccuuucagaaugugaaccggaucacguauggagcuuguccucgcuacgucaagcagaauacccucaaacuggccacaggcaugagaaacguucccgagaagcaaacccgggggauuuucggagcgaucgccggcuuuaucgaaaaugggugggagggaaugguggauggcugguauggcuuccgccaccagaacuccgaggggauuggacaggcugccgaccuuaaaucuacacaagcugccaucgaucagauuaauggcaagcugaacagacucaucgggaaaaccaacgaaaaguuccaccagauugagaaggaauuuagcgagguggaaggacggauccaggaccuggagaaauacgucgaggauacgaagauugaccuuugguccuauaaugccgaacugcucguggcucuggagaaccaacauacaaucgaucugaccgacagcgaaaugaauaaacucuucgagaagaccaaaaagcagcugagagaaaacgcggaggauaugggcaaugggugcuuuaagaucuaccacaaaugugacaacgccugcauuggcucuauccgcaauggaacauaugaucaugacgcuuaccgggacgaggcccuuaacaauagauuccagauuaagggcguugaacugaaauccggguacaaggauuggauccucuggauuagcuuugccaucucuugcuuccugcuuuguguggcucugcucggauuuaucaugugggccugccagaaaggcaacauucgcuguaauaucugcauuuga

SEQ ID NO: 200187 - RNA, 1701 nt, Artificial Sequence
  derived and/or modified CDS sequence (opt5) from hemagglutinin__InfluenzaA__AEX36344
augaagaccaucauugcccugagcuacauccucugccugguguucgcucagaaacuucccggcauugacaacuccacagccacgcugugucucgggcaccaugcggucccuaauggaaccaucguuaagacaauuaccaacgaucaaaucgaggugacaaaugcuaccgaacuggugcagucuagcuccacaggcgggaucugcgacucuccgcaccagauucuugauggagagaacuguacccugaucgacgcccuccugggcgauccccagugcgacggguuucaaaauaaaaagugggaucuguucgucgaaagaagcaacgccuauuccaauuguuacccuuaugacgugcccgauuacgcuucucuccggagccugguugccuccagcggaacgcuugaguuuaacaaugaaucuuucaacugggcuggcgugacccagaauggcacauccagcgccugcaaacgcgggucuaacaauuccuuuuucagcagacugaacuggcucacccaucugaaguuuaaguauccugcgcuuaaugucacaaugcccaacaacgaggaguucgacaaacuguacauuuggggagugcaccauccuggcaccgauaaugaccagaucuuucucuaugcccaggcuucugggcggauuacgguuuccacaaagcgcagccaacagaccgugaucccgaacauuggauccagaccccggguccgcaauaucccuucuagaaucagcauuuacuggacaaucgugaaacccggcgauauucugcugaucaacuccaccgggaaucucauugccccucggggauacuucaagauccgcagcggcaaaucuuccaucaugagaagcgacgcucccauuggcaaguguaacucugaaugcaucaccccgaaugggagcauuccuaacgacaagcccuuucagaaugugaaccggaucacauauggagccuguccucgcuacgucaaacagaauacgcugaaacuugcgaccggcaugagaaacguucccgagaagcaaacacgggggauuuucggagccaucgcuggcuuuaucgaaaaugggugggagggaaugguggauggcugguauggcuuccgccaccagaacuccgaggggauuggacaggccgcugaccugaagucuacccaagccgccaucgaucagauuaauggcaaacucaacagacugaucgggaagacaaacgaaaaauuccaccagauugagaaggaauuuagcgagguggaaggacggauccaggaccuugagaaguacgucgaggauaccaaaauugaccugugguccuauaaugcugaacuccugguggcgcuggagaaccaacauacgaucgaucucacagacagcgaaaugaauaagcuguucgagaaaaccaagaaacagcuuagagaaaacgccgaggauaugggcaaugggugcuuuaagaucuaccacaagugugacaacgcuugcauugagucuauccgcaauggcaccuaugaucaugacguuuaccgggacgaagcccugaacaauagauuccagauuaaaggaguggagcucaaguccggcuacaaagauuggauccuguggauuagcuuugccaucucuugcuuccuucugugugucgcucuccugggguuuaucaugugggccugccagaagggaaacauucgcuguaauaucugcauuuga

SEQ ID NO: 200188 - RNA, 1701 nt, Artificial Sequence
  derived and/or modified CDS sequence (opt5) from hemagglutinin__InfluenzaA__AEX36366
augaagaccaucauugcccugagcuacauccucugccugguguucgcucagaaacuuuccggcaacgacaauucuacagccacgcugugucucgggcaccaugcgguccccaacggaaccauuguuaagacaaucaccaaugaucaaauugaggugacaaacgcuaccgaacuggugcagagcuccucuacaggcgagaucugcgacagcccucaccagauccuugauggggaaaauuguacccugauugacgcccuccugggagauccgcagugcgacggcuuucaaaacaaaaagugggaucuguucgucgagagauccaaagccuauucuaauuguuaccccuaugacgugccugauuacgcuagccuccggucccugguugccagcucugggacgcuugaauuuaacaaugaguccuucaacuggaccggagugacacagaauggcaccagcucugcuugcauccgcagauccaacaauagcuuuuucucucggcugaacuggcucacacaucugaaguuuaaguaucccgcccuuaaugucaccaugccuaacaacgagaaauucgacaagcuguacauuuggggcgugcaccaucccgggacggauaaugaccagaucuuucucuaugcgcaggccuccggacgcauuacaguuagcaccaaaagaucccaacagacagugaucccuaacauuggcucucggccgcgcgucagaaauauccccagccggaucuccauuuacuggaccaucgugaagccuggggauauucugcugaucaacagcaccggaaaucucauugcuccccgcggcuacuucaaaaucagaucugggaaguccagcaucaugcggucugacgccccuauuggaaaguguaacagcgaaugcaucacacccaauggcuccauuccgaacgacaaaccuuuucagaaugugaaccgcaucacguauggcgcuugucccagauacgucaagcagaauacccugaaacuugccacagggaugcggaacguuccugagaagcaaacccgcggaauuuucggcgcgaucgccggguuuaucgaaaauggaugggagggcaugguggaugggugguauggauucagacaccagaacucugagggcauuggccaggcugccgaccugaaaagcacacaagcugccaucgaucagauuaaugggaagcucaaccggcugaucggaaaaaccaacgaaaaguuccaccagauugagaaggaauuuuccgagguggaaggcagaauccaggaccuugagaaauacgucgaggauacgaagauugaccuguggagcuauaaugccgaacuccugguggcucuggagaaccaacauacaaucgaucucaccgacucugaaaugaauaaacuguucgagaagaccaaaaagcagcuucgcgaaaacgcggaggauauggggaauggaugcuuuaagaucuaccacaaaugugacaacgccugcauuggcuccauccggaaugggacauaugaucaugacguuuacagagacgaggcucugaacaaucgcuuccagauuaagggcguggaacucaaaagcggauacaaggauuggauccuguggauuucuuuugccaucuccugcuuccuucugugugucgcccuccugggcuuuaucaugugggcuugccagaaagggaacauucgguguaauaucugcauuuga

SEQ ID NO: 200189 - RNA, 1701 nt, Artificial Sequence; identical to SEQ ID NO: 194000
  derived and/or modified CDS sequence (opt5) from hemagglutinin__InfluenzaA__AEX36377

SEQ ID NO: 200190 - RNA, 1701 nt, Artificial Sequence
  derived and/or modified CDS sequence (opt5) from hemagglutinin__InfluenzaA__AEX36388
augaagaccaucauugcccugagcuacauccucugccugguguucgcucagaaacuucccggcaacgacaauuccacagccacgcugugucucgggcaccaugcggucccuaacggaaccauuguuaagacaaucaccaaugaucaaauugaggugacaaacgcuaccgaacuggugcagucuagcuccacaggcgagaucugcgacucuccgcaccagauccuugauggggaaaauuguacccugauugacgcccuccugggagauccccagugcgacggcuuucaaaacaaaaagugggaucuguucgucgagagaagcaaagccuauuccaauuguuacccuuaugacgugcccgauuacgcuucucuccggagccugguugccuccagcgggacgcuugaauuuaacaaugagucuuucaacuggaccggagugacacagaauggcaccuccagcgcuugcauccgcagaucuaacaauuccuuuuucagccggcugaacuggcucacacaucugaaguuuaaguauccugcccuuaaugucaccaugcccaacaacgagaaauucgacaagcuguacauuuggggcgugcaccauccugggacggauaaugaccagaucuuucucuaugcgcaggccucuggacgcauuacaguuuccaccaaaagaagccaacagacagugaucccgaacauuggcucccggccccgcgucagaaauaucccuucucggaucagcauuuacuggaccaucgugaagcccggggauauucugcugaucaacuccaccggaaaucucauugcuccucgcggcuacuucaaaaucagaagcgggaagucuuccaucaugcggagcgacgcccccauuggaaaguguaacucugaaugcaucacaccgaauggcagcauuccuaacgacaaacccuuucagaaugugaaccgcaucacguauggcgcuuguccuagauacgucaagcagaauacccugaaacuugccacagggaugcggaacguucccgagaagcaaacccgcggaauuuucggcgcgaucgccggguuuaucgaaaauggaugggagggcaugauggaugggugguauggauucagacaccagaacuccgagggcauuggccaggcugccgaccugaaaucuacacaagcugccaucgaucagauuaaugggaagcucaaccggcugaucggaaaaaccaacgaaaaguuccaccagauugagaaggaauuuagcgagguggaaggcagaauccaggaccuugagaaauacguggaggauacgaagauugaccugugguccuauaaugccgaacuccuggucgcucuggagaaccaacauacaaucgaucucaccgacagcgaaaugaauaaacuguucgagaagaccaaaaagcagcuucgcgaaaacgcggaggauauggggaauggaugcuuuaagaucuaccacaaaugugacaacgccugcauuggcucuauccggaaugggacauaugaucaugacguguacagagacgaggcucugaacaaucgcuuccagauuaagggcguugaacucaaauccggauacaaggauuggauccuguggauuagcuuugccaucucuugcuuccuucuguguguggcccuccugggcuuuaucaugugggcuugccagaaagggaacauucgguguaauaucugcauuuga

SEQ ID NO: 200191 - RNA, 1701 nt, Artificial Sequence
  derived and/or modified CDS sequence (opt5) from hemagglutinin__InfluenzaA__AEX36399
augaagaccaucauugcccugagcuacauccucugccugguguucgcucagaaacuucccggcaacgacaauuccacagccacgcugugucucgggcaccaugcggucccuaacggaaccauuguuaagacaaucaccaaugaucaaacagaggugaccaacgcuacagaacuggugcagucuagcuccaccggcgagauuugcgacucuccgcaccagauccuugauggggaaaauuguacgcugaucgacgcccuccugggagauccccagugcgacggcuuucaaaacaaaaagugggaucuguucgucgagagaagcaaagccuauuccaauuguuacccuuaugacgugcccgauuacgcuucucuccggagccugguugccuccagcgggacccuugaauuuaacaaugagucuuucaacuggacaggagugacccagaauggcacauccagcgcuugcauucgcagaucuaacaauuccuuuuucagccggcugaacuggcucacccaucugaaguuuaaguauccugcccuuaaugucacgaugcccaacaacgagaaauucgacaagcuguacaucuggggcgugcaccauccugggacagauaaugaccagauuuuucucuaugcgcaggccucuggacgcaucaccguuuccacaaaaagaagccaacagaccgugauuccgaacaucggcucccggccccgcgucagaaauauuccuucucggaucagcaucuacuggaccauugugaagcccggggauauccugcugauuaacuccacaggaaaucucaucgcuccucgcggcuacuucaaaauuagaagcgggaagucuuccaucaugcggagcgacgcccccaucggaaaguguaacucugaaugcauuacgccgaauggcagcaucccuaacgacaaacccuuucagaaugugaaccgcauuaccuauggcgcuuguccuagauacgucaagcagaauacacugaaacuugccaccgggaugcggaacguucccgagaagcaaacacgcggaaucuucggcgcgauugccggguuuaucgaaaauggaugggagggcaugguggaugggugguauggauucagacaccagaacuccgagggcaucggccaggcugccgaccugaaaucuacccaagcugccauugaucagaucaaugggaagcucaaccggcugauuggaaaaacgaacgaaaaguuccaccagaucgagaaggaauuuagcgagguggaaggccgcauucaggaccuugagaaauacgucgaggauacaaagaucgaccugugguccuauaaugccgaacuccugguggcucuggagaaccaacauaccauugaucucaccgacagcgaaaugaauaaacuguucgagaagaccaaaaagcagcuuagagaaaacgcggaggauauggggaauggaugcuuuaagaucuaccacaaaugugacaacgccugcaucggcucuauucggaaugggacauaugaucaugacguuuacagagacgaggcucugaacaaucgcuuccagaucaagggcguggaacucaaauccggauacaaggauuggauucuguggaucagcuuugccauuucuugcuuccuucugugugucgcccuccugggcuuuaucaugugggcuugccagaaagggaacauccgguguaauauuugcaucuga

SEQ ID NO: 200192 - RNA, 1701 nt, Artificial Sequence
  derived and/or modified CDS sequence (opt5) from hemagglutinin__InfluenzaA__AEX36410
augaagaccaucauugcccugagcuacauccucugccugguguucgcucagaaacuucccggcaacgacaauuccacagccacgcugugucucgggcaccaugcggucccuaacggaaccauuguuaagacaaucaccaaugaucaaauugaggugacaaacgcuaccgaacuggugcaaaauucuagcacaggcgagaucugcgacuccccgcaccagauccuugauggggaaaacuguacccugauugacgcccuccugggagauccccagugcgacggcuuucagaauaaaaagugggaucuguucgucgagagaucuaaagccuauagcaacuguuacccuuaugacgugcccgauuacgcuucccuccggucucugguugccagcuccgggacgcuugaauuuaauaacgagagcuucaauuggaccggagugacacagaacggcaccucuuccgcuugcauccgcagaagcaauaacagcuuuuucucccggcugaauuggcucacacaucugaaguuuaaguauccugcccuuaacgucaccaugcccaacaaugagaaauucgacaagcuguacauuuggggcgugcaccauccugggacggauaacgaccagaucuuucucuaugcgcaggccagcggacgcauuacaguuucuaccaaaagaucccaacagacagugaucccgaauauuggcagccggccccgcgucagaaacaucccuucccggaucucuauuuacuggaccaucgugaagcccggggauauucugcugaucaauagcaccggaaaccucauugcuccucgcggcuacuucaaaaucagauccgggaagucuucuaucaugcgguccgacgcccccauuggaaaguguaauagcgaaugcaucacaccgaacggcucuauuccuaaugacaaacccuuucagaacgugaaucgcaucacguauggcgcuuguccuagauacgucaagcagaacacccugaaacuugccacagggaugcggaauguucccgagaagcaaacccgcggaauuuucggcgcgaucgccggguuuaucgaaaacggaugggagggcaugguggaugggugguauggauucagacaccagaauagcgagggcauuggccaggcugccgaccugaaauccacacaagcugccaucgaucagauuaacgggaagcucaaccggcugaucggaaaaaccaaugaaaaguuccaccagauugagaaggaauuuucugagguggaaggcagaauccaggaccuugagaaauacgucgaggauacgaagauugaccuguggagcuauaacgccgaacuccugguggcucuggagaaucaacauacaaucgaucucaccgacuccgaaaugaacaaacuguucgagaagaccaaaaagcagcuucgcgaaaaugcggaggauauggggaacggaugcuuuaagaucuaccacaaaugugacaaugccugcauuggcagcauccggaacgggacauaugaucaugacguuuacagagacgaggcucugaauaaccgcuuccagauuaagggcguggaacucaaaucuggauacaaggauuggauccuguggauuuccuuugccaucagcugcuuccuucugugugucgcccuccugggcuuuaucaugugggcuugccagaaagggaauauucgguguaacaucugcauuuga

SEQ ID NO: 200193 - RNA, 1701 nt, Artificial Sequence; identical to SEQ ID NO: 194506
  derived and/or modified CDS sequence (opt5) from hemagglutinin__InfluenzaA__AEX36421

SEQ ID NO: 200194 - RNA, 1701 nt, Artificial Sequence
  derived and/or modified CDS sequence (opt5) from hemagglutinin__InfluenzaA__AEX36432
augaagaccaucauugcccugagcuacauccucugccugguguucgcucagaaacuucccggcaacgacaauuccacagccacgcugugucucgggcaccaugcggucccuaacggaaccauuguuaagacaaucaccaaugaucaaauugaggugacaaacgcuaccgaacuggugcagucuagcuccacaggcgagaucugcgacucuccgcaccagguccuugauggggaaaauuguacccugaucgacgcccuccugggagauccccagugcgacggcuuucaaaacaaaaagugggaucuguucguggagagaagcaaagccuauuccaauuguuacccuuaugacguucccgauuacgcuucucuccggagccugguggccuccagcgggacgcuugaauuuaacaaugagucuuucaacuggaccggagucacacagaauggcaccuccagcgcuugcauucgcagaucuaacaauuccuuuuucagccggcugaacuggcucacacaucugaaguuuaaguauccugcccuuaaugugaccaugcccaacaacgagcaguucgacaaacuguacaucuggggcguucaccauccugggacggauaaugaccagauuuuucucuaugcgcaagccucuggacgcaucacaguguccaccaagagaagccagcagacagucauuccgaacaucggcucccggccccgcgugagaaauauuccuucucggaucagcaucuacuggaccauugugaaacccggggauauccugcugauuaacuccaccggaaaucucaucgcuccucgcggcuacuucaagauuagaagcgggaaaucuuccaucaugcggagcgacgcccccaucggaaaguguaacucugaaugcauuacaccgaauggcagcaucccuaacgacaagcccuuucagaaugucaaccgcauuacguauggcgcuuguccuagauacguuaaacaaaauacccugaaacuugccacagggaugcggaacgugcccgagaagcagacccgcggaaucuucggcgcgauugccggguuuaucgaaaauggaugggagggcaugguggaugggugguauggauucagacaccagaacuccgagggccggggccaagcugccgaccugaagucuacacaggcugccaucgaucagauuaaugggaaacucaacagacugaucggaaagaccaacgaaaaauuccaccagauugagaaggaauuuagcgaggucgaaggccgcauccaagaccuugagaaguacguggaggauacgaaaauugaccugugguccuauaaugccgaacuccugguugcucuggagaaccagcauacaaucgaucucaccgacagcgaaaugaauaagcuguucgagaaaaccaagaaacagcuucgggaaaacgcggaggauauggggaauggaugcuuuaagauuuaccacaagugugacaacgccugcaucggcucuaucagaaaugggacauaugaucaugacguguaccgcgacgaggcucugaacaaucgguuccagauuaaaggcgucgaacucaaguccggauacaaagauuggauccuguggauuagcuuugccaucucuugcuuccuucuguguguggcccuccugggcuuuauuaugugggcuugccaaaaggggaacaucagauguaauaucugcauuuga

SEQ ID NO: 200195 - RNA, 1701 nt, Artificial Sequence
  derived and/or modified CDS sequence (opt5) from hemagglutinin__InfluenzaA__AEX36443
augaagaccaucauugcccugagcuacauccucugccugguguucgcucagaaacuucccggcaacgacaauuccacagccacgcugugucucgggcaccaugcggucccuaacggaaccauuguuaagacaaucaccaaugaucaaauugaggugacaaacgcuaccgaacuggugcagucuagcuccacaggcgagaucugcaauucuccgcaccagauccuugacggggaaaacuguacccugauugaugcccuccugggagacccccagugcgauggcuuucaaaauaaaaagugggaccuguucgucgagagaagcaaagccuauuccaacuguuacccuuaugaugugcccgacuacgcuucucuccggagccugguugccuccagcgggacgcuugaauuuaauaacgagucuuucaauuggaccggagugacacagaacggcaccuccagcgcuugcauccgcagaucuaauaacuccuuuuucagccggcugaauuggcucacacaucugaaguuuaaguauccugcccuuaacgucaccaugcccaacaaugaggaguucgauaaacuguacauuuggggcgugcaccauccugggacggacaacgaucagaucuuucucuaugcgcaggccucuggacgcauuacaguuuccaccaagagaagccaacagacagugaucccgaauauuggcucccggccccgcgucagaaacaucccuucucggaucagcauuuacuggaccaucgugaaacccggggacauucugcugaucaauuccaccggaaaccucauugcuccucgcggcuacuucaagaucagaagcgggaaaucuuccaucaugcggagcgaugcccccauuggaaaguguaauucugaaugcaucacaccgaacggcagcauuccuaaugacaagcccuuucagaacgugaaucgcaucacguauggcgcuuguccuagauacgucaaacagaacacccugaaacuugccacagggaugcggaauguucccgaaaaacaaacccgcggaauuuucggcgcgaucgccggguuuaucgagaacggaugggagggcaugguggacgggugguauggauucagacaccaaaauuccgaaggcauuggccaggcugccgaucugaagucuacacaggcugccaucgaccagauuaacgggaaacucaaccggcugaucggaaagaccaaugagaaauuccaccagauugaaaaggaguuuagcgaaguggagggcagaauccaggaucuugagaaguacgucgaagacacgaaaauugaucugugguccuauaacgccgagcuccugguggcucuggaaaaucaacauacaaucgaccucaccgauagcgagaugaacaagcuguucgaaaagaccaagaaacagcuucgcgagaaugcggaggacauggggaacggaugcuuuaagaucuaccacaagugugauaaugccugcauuggcucuauccggaacgggacauaugaccaugauguuuacagagacgaagcucugaauaaccgcuuccagauuaaaggcguggagcucaaguccggauacaaagacuggauccuguggauuagcuuugccaucucuugcuuccuucugugugucgcccuccugggcuuuaucaugugggcuugccagaaggggaauauucgguguaacaucugcauuuga

SEQ ID NO: 200196 - RNA, 1701 nt, Artificial Sequence
  derived and/or modified CDS sequence (opt5) from hemagglutinin__InfluenzaA__AEX36454
augaagaccaucauugcccugagcuacauccucugccugguguucgcucagaaacuucccggcaacgacaauuccacagccacgcugugucucgggcaccaugcggucccuaacggaaccauuguuaagacaaucaccaaugaucaaauugaggugacaaacgcuaccgaacuggugcagucuagcuccacaggcgagaucugcaauucuccgcaccagauccuugacggggaaaacuguacccugauugaugcccuccugggagacccccagugcgauggcuuucaaaauaaaaagugggaccuguucgucgagagaagcaaagccuauuccaacuguuacccuuaugaugugcccgacuacgcuucucuccggagccugguugccuccagcgggacgcuugaauuuaauaacgagucuuucaauuggaccggagugacacagaacggcaccuccagcgcuugcauccgcagaucuaauaacuccuuuuucagccggcugaauuggcucacacaucugaaguuuaaguauccugcccuuaacgucaccaugcccaacaaugaggaguucgauaaacuguacauuuggggcgugcaccauccugggacggacaacgaucagaucuuucucuaugcgcaggccucuggacgcauuacaguuuccaccaagagaagccaacagacagugaucccgaauauuggcucccggccccgcgucagaaacaucccuucucggaucagcauuuacuggaccaucgugaaacccggggacauucugcugaucaauuccaccggaaaccucauugcuccucgcggcuacuucaagaucagaagcgggaaaucuuccaucaugcggagcgaugcccccauuggaaaguguaauucugaaugcaucacaccgaacggcagcauuccuaaugacaagcccuuucagaacgugaaucgcaucacguauggcgcuuguccuagauacgucaaacagaacacccugaaacuugccacagggaugcggaauguucccgaaaaacaaacccgcggaauuuucggcgcgaucgccggguuuaucgagaacggaugggagggcaugguggacgggugguauggauucagacaccaaaauuccgaaggcauuggccaggcugccgaucugaagucuacacaggcugccaucgaccagauuaacgggaaacucaaccggcugaucggaaagaccaaugagaaauuccaccagauugaaaaggaguuuagcgaaguggagggcagaauccaggaucuugagaaguacgucgaagacacgaaaauugaucugugguccuauaacgccgagcuccugguggcucuggaaaaucaacauacaaucgaccucaccgauagcgagaugaacaagcuguucgaaaagaccaagaaacagcuucgcgagaaugcggaggacauggggaacggaugcuuuaagaucuaccacaagugugauaaugccugcauuggcucuauccggaacgggacauaugaccaugauguuuacagagacgaagcucugaauaaccgcuuccagauuaaaggcguggagcucaaguccggauacaaagacuggauccuguggauuagcuuugccaucucuugcuuccuucugugugucgugcuccugggcuuuaucaugugggccugccagaaggggaauauucgguguaacaucugcauuuga

SEQ ID NO: 200197 - RNA, 1701 nt, Artificial Sequence; identical to SEQ ID NO: 193801
  derived and/or modified CDS sequence (opt5) from hemagglutinin__InfluenzaA__AEX36465

SEQ ID NO: 200198 - RNA, 1701 nt, Artificial Sequence
  derived and/or modified CDS sequence (opt5) from hemagglutinin__InfluenzaA__AEX36476
augaagaccaucauugcccugagcuacauccucugccugguguucgcucagaaacuucccggcauugacaacuccacagccacgcugugucucgggcaccaugcggucccuaauggaaccaucguuaagacaauuaccaacgaucaaaucgaggugacaaaugcuaccgaacuggugcagucuagcuccacaggcgggaucugcgacucuccgcaccagauucuugauggagagaacuguacccugaucgacgcccuccugggcgauccccagugcgacggguuucaaaauaaaaagugggaucuguucgucgaaagaagcaaagccuauuccaacuguuacccuuaugacgugcccgauuacgcuucucuccggagccugguugccuccagcggaacgcuugaguuuaauaacgaaucuuucaauuggaccggcgugacacagaacggcaccuccagcgcuugcaagcgcgggucuaauaacuccuuuuucagcagacugaauuggcucacacauucuaaguuuaaauauccugcccugaacgucaccaugcccaauaacgaggaguucgacaaacuuuacauuuggggagugcaccauccuggcacggauaacgaccagaucuuuccguaugcgcaggccuccgggcggauuacaguuagcaccaagcgcucccaacagacagugauccccaauauuggaucuagaccucggauccgcaacauccccagcagaauuuccaucuacuggaccauugucaagccuggcgauauccugcucauuaauagcaccgggaaccugaucgcuccccggggauacuucaaaauccgcucuggcaaguccagcauuaugagaucugacgccccgaucggcaagugugacagcgaaugcauuacaccuaauggguccauccccaacgauaaaccuuuucagaaugugaaccggauuacguauggagcuuguccccgcuacgugaagcagaauacccugaaacucgccacaggcaugagaaacguccccgagaagcaaacccgggggaucuucggagcgaucgccggcuuuauugaaaaugggugggagggaaugguugacggcugguauggcuuccgccaccagaacucugaggggaucggacaggcugccgaucugaaaagcacacaagcugccauugaccagaucaauggcaaacuuaacagacugauugggaagaccaaugaaaaguuccaccagaucgagaaggaauuuuccgagguggaaggacggauucaggaucucgagaaauacguggaggacacgaagaucgaucuguggagcuauaacgccgaacuucuggucgcucucgagaaccaacauacaaucgaccugaccgauucugaaaugaauaaacuguucgagaagaccaaaaagcagcucagagaaaacgcggaggacaugggcaaugggugcuuuaagauuuaccacaaaugugauaacgccugcaucggcuccauucgcaauggaacauaugaccaugacguguaccgggaugaggcucugaacaauagauuccagaucaagggcguugaacuuaaaagcggguacaaggacuggauucuguggaucucuuuugccaucuccugcuuccuccuguguguggcccuucugggauuuauuaugugggcuugccagaaaggcaacauccgcuguaauauuugcaucuga

SEQ ID NO: 200199 - RNA, 1701 nt, Artificial Sequence
  derived and/or modified CDS sequence (opt5) from hemagglutinin__InfluenzaA__AEX36487
augaagaccaucauugcccugagcuacauccucugccugguguucgcucagaaacuucccggcauugacaacuccacagccacgcugugucucgggcaccaugcggucccuaauggaaccaucguuaagacaauuaccaacgaucaaaucgaggugacaaaugcuaccgaacuggugcagucuagcuccacaggcgggaucugcgacucuccgcaccagauucuugauggagagaacuguacccugaucgacgcccuccugggcgauccccagugcgacggguuucaaaauaaaaagugggaucuguucgucgaaagaagcaaagccuauuccaacuguuacccuuaugacgugcccgauuacgcuucucuccggagccugguugccuccagcggaacgcuugaguuuaauaacgaaucuuucaauuggaccggcgugacacagaacggcaccuccagcgcuugcaagcgcgggucuaauaacuccuuuuucagcagacugaauuggcucacacauucuaaguuuaaauauccugcccugaacgucaccaugcccaauaacgaggaguucgacaaacuuuacauuuggggagugcugcacccuggcacggauaacgaccagaucuuucucuaugcgcaggccuccgggcggauuacaguuagcaccaagcgcucccaacagacagugaucccgaauauuggaucuagaccccggguccgcaacaucccuagcagaaucuccauuuacuggaccaucgugaagcccggcgauauucugcugaucaauagcaccgggaaccucauugcuccucggggauacuucaaaauccgcucuggcaaguccagcaucaugagaucugacgcccccauuggcaaguguaauagcgaaugcaucacaccgaacggguccauuccuaaugacaaacccuuucagaacgugaaucggaucacguauggagcuuguccucgcuacgucaagcagaacacccugaaacuugccacaggcaugagaaauguucccgagaagcaaacccgggggauuuucggagcgaucgccggcuuuaucgaaaacgggugggagggaaugguggauggcugguauggcuuccgccaucaaaauucugaggggauuggacaggcugccgaccugaaaagcacacaggcugccaucgaucagauuaacggcaagcucaauagacugaucgggaaaaccaacgaaaaguuccaccagauugagaaggaauuuuccgagguggaaggacggauccaggaccuugagaaauacgucgaggauacgaagauugaccuguggagcuauaacgccgaacuccugguggcucuggagaaucaacacacaaucgaucucaccgacucugaaaugaacaaacuguucgagaagaccaaaaagcagcuuagagaaaaugcggaggauaugggcaacgggugcuuuaagaucuaccauaaaugugacaaugccugcauuggcuccauccgcaacggaacauaugaucacgacguuuaccgggacgaggcucugaauaacagauuccagauuaagggcguggaacucaaaagcggguacaaggauuggauccuguggauuucuuuugccaucuccugcuuccuucugugugucgcccuccugggauuuaucaugugggcuugccagaaaggcaauauucgcuguaacaucugcauuuga

SEQ ID NO: 200200 - RNA, 1701 nt, Artificial Sequence; identical to SEQ ID NO: 200050
  derived and/or modified CDS sequence (opt5) from hemagglutinin__InfluenzaA__AEX36498

SEQ ID NO: 200201 - RNA, 1701 nt, Artificial Sequence
  derived and/or modified CDS sequence (opt5) from hemagglutinin__InfluenzaA__AEX36509
augaagaccaucauugcccugagcuacauccucugccugguguucgcucagaaacuucccggcauugacaacuccacagccacgcugugucucgggcaccaugcggucccuaauggaaccaucguuaagacaauuaccaacgaucaaaucgaggugacaaaugcuaccgaacuggugcagaacucuagcacaggcgggaucugcgacuccccgcaccagauucuugauggagagaauuguacccugaucgacgcccuccugggcgauccccagugcgacggguuucaaaacaaaaagugggaucuguucgucgaaagaucuaaagccuauagcaauuguuacccuuaugacgugcccgauuacgcuucccuccggucucugguugccagcuccggaacgcuugaguuuaacaaugaaucuuucaacuggaccggcgugacacagaauggcaccucuuccgcuugcaagcgcgggagcaacaauagcuuuuucuccagacugaacuggcucacacauagcaaguuuaaauauccugcccugaaugucaccaugcccaacaacgaggaguucgacaaacuuuacauuuggggagugcaccauccuggcacggauaaugaccagaucuuuccguaugcgcaggccucugggcggauuacaguuuccaccaagcgcagccaacagacagugauccccaacauuggauccagaccucggguccgcaauauccccucuagaaucagcauuuacuggaccaucgugaagccuggcgauauucugcucaucaacuccaccgggaaucugauugcuccccggggauacuucaaaauccgcagcggcaagucuuccaucaugagaagcgacgccccgauuggcaaguguaacucugaaugcaucacaccuaaugggagcauucccaacgacaaaccuuuucagaaugugaaccggaucacguauggagcuuguccccgcuacgucaagcagaauacccugaaacucgccacaggcaugagaaacguucccgagaagcaaacccgggggauuuucggagcgaucgccggcuuuaucgaaaaugggugggagggaaugguggauggcugguauggcuuccgccaccagaacuccgaggggauuggacaggcugccgaccugaaaucuacacaagcugccaucgaucagauuaauggcaaacuuaacagacugaucgggaagaccaacgaaaaguuccaccagauugagaaggaauuuagcgagguggaaggacggauccaggaccucgagaaauacgucgaggauacgaagauugaccugugguccuauaaugccgaacuucugguggcucucgagaaccaacauacaaucgaucugaccgacagcgaaaugaauaaacuguucgagaagaccaaaaagcagcucagagaaaacgcggaggauaugggcaaugggugcuuuaagaucuaccacaaaugugacaacgccugcauuggcucuauccgcaauggaacauaugaucaugacguuuaccgggacgaggcucugaacaauagauuccagauuaagggcguggaacuuaaauccggguacaaggauuggauccuguggauuagcuuugccaucucuugcuuccuccugugugucgcccuucugggauuuaucaugugggcuugccagaaaggcaacauucgcuguaauaucugcauuuga

SEQ ID NO: 200202 - RNA, 1701 nt, Artificial Sequence
  derived and/or modified CDS sequence (opt5) from hemagglutinin__InfluenzaA__AEX36520
augaagaccaucauugcccugagcuacauccucugccugguguucgcucagaaacuucccggcaacgacaauuccacagccacgcugugucucgggcaccaugcggucccuaacggaaccauuguuaagacaaucaccaaugaucaaauugaggugacaaacgcuaccgaacuggugcagucuagcuccacaggcgagaucugcgacucuccgcaccagauccuugauggggaaaauuguacccugauugacgcccuccugggagauccccagugcgacggcuuucaaaacaaaaagugggaucuguucgucgagagaagcaaagccuauuccaauuguuacccuuaugacgugcccgauuacgcuucucuccggagccugguugccuccagcgggacgcuugaauuuaacaaugagucuuucaacuggaccggagugacacagaauggcaccuccagcgcuugcauccgcagaucuaacaauuccuuuuucagccggcugaacuggcucacacaucugaaguuuaaguauccugcccuuaaugucaccaugcccaacaacgagcaguucgacaaacuguacauuuggggcgugcaccauccugggacggauaaugaccagaucuuucucuaugcgcaagccucuggacgcauuacaguuuccaccaagagaagccagcagacagugaucccgaacauuggcucccggccccgcgucagaaauaucccuucucggaucagcauuuacuggaccaucgugaaacccggggauauucugcugaucaacuccaccggaaaucucauugcuccucgcggcuacuucaagaucagaagcgggaaaucuuccaucaugcggagcgacgcccccauuggaaaguguaacucugaaugcaucacaccgaauggcagcauuccuaacgacaagcccuuucagaaugugaaccgcaucacguauggcgcuuguccuagauacgucaaacaaaauacccugaaacuugccacagggaugcggaacguucccgagaagcagacccgcggaauuuucggcgcgaucgccggguuuaucgaaaauggaugggagggcaugguggaugggugguauggauucagacaccagaacuccgagggccggggccaagcugccgaccugaagucuacacaggcugccauugaucagaucaaugggaaacucaacagacugauuggaaagaccaacgaaaaauuccaccagaucgagaaggaauuuagcgagguggaaggccgcauucaagaccuugagaaguacgucgaggauacgaaaaucgaccugugguccuauaaugccgaacuccugguggcucuggagaaccagcauacaauugaucucaccgacagcgaaaugaauaagcuguucgagaaaaccaagaaacagcuucgggaaaacgcggaggauauggggaauggaugcuuuaagaucuaccacaagugugacaacgccugcaucggcucuauuagaaaugggacauaugaucauaacguuuaccgcgacgaggcucugaauaaccgguuccagaucaaaggcguggaacucaaguccggauacaaagacuggauucuguggaucagcuuugccauuucuugcuuccuucugugugucgcccuccugggcuuuaucaugugggcuugccaaaaggggaauaucagauguaacauuugcaucuga

SEQ ID NO: 200203 - RNA, 1701 nt, Artificial Sequence
  derived and/or modified CDS sequence (opt5) from hemagglutinin__InfluenzaA__AEX36531
augaagaccaucauugcccugagcuacauccucugccugguguucgcucagaaacuucccggcaacgacaauuccacagccacgcugugucucgggcaccaugcggucccuaacggaaccauuguuaagacaaucaccaaugaucaaauugaggugacaaacgcuaccgaacuggugcagucuagcuccacaggcgagaucugcgacucuccgcaccagauccuugauggggaaaauuguacccugauugacgcccuccugggagauccccagugcgacggcuuucaaaacaaaaagugggaucuguucgucgagagaagcaaagccuauuccaauuguuacccuuaugacgugcccgauuacgcuucucuccggagccugguugccuccagcgggacgcuugaauuuaacaaugagucuuucaacuggaccggagugacacagaauggcaccuccagcgcuugcauccgcagaucuaacaauuccuuuuucagccggcugaacuggcucacacaucugaaguuuaaguauccugcccuuaaugucaccaugcccaacaacgagcaguucgacaaacuguacauuuggggcgugcaccauccugggacggauaaugaccagaucuuucucuaugcgcaagccucuggacgcauuacaguuuccaccaagagaagccagcagacagugaucccgaacauuggcucccggccccgcgucagaaauaucccuucucggaucagcauuuacuggaccaucgugaaacccggggauauucugcugaucaacuccaccggaaaucucauugcuccucgcggcuacuucaagaucagaagcgggaaaucuuccaucaugcggagcgacgcccccauuggaaaguguaacucugaaugcaucacaccgaauggcagcauuccuaacgacaagcccuuucagaaugugaaccgcaucacguauggcgcuuguccuagauacgucaaacaaaauacccugaaacuugccacagggaugcggaacguucccgagaaacagacccgcggaauuuucggcgcgaucgccggguuuaucgaaaauggaugggagggcaugguggaugggugguauggauucagacaccagaacuccgagggccggggccaagcugccgaccugaagucuacacaggcugccauugaucagaucaaugggaaacucaacagacugauuggaaagaccaacgaaaaauuccaccagaucgagaaggaauuuagcgagguggaaggccgcauucaagaccuugauaaguacgucgaggacacgaaaaucgaucugugguccuauaaugccgagcuccugguggcucuggaaaaccagcauacaauugaccucaccgauagcgagaugaauaagcuguucgaaaagaccaagaaacagcuucgggagaacgcggaagacauggggaauggaugcuuuaagaucuaccacaagugugauaacgccugcaucggcucuauuagaaaugggacauaugaccaugacguuuaccgcgaugaggcucugaacaaucgguuccagaucaaaggcguggagcucaaguccggauacaaagacuggauucuguggaucagcuuugccauuucuugcuuccuucugugugucgcccuccugggcuuuaucaugugggcuugccaaaaggggaacaucagauguaauauuugcaucuga

SEQ ID NO: 200204 - RNA, 1701 nt, Artificial Sequence
  derived and/or modified CDS sequence (opt5) from hemagglutinin__InfluenzaA__AEX36542
augaagaccaucauugcccugagcuacauccucugccugguguucgcucagaaacuucccggcaacgacaauuccacagccacgcugugucucgggcaccaugcggucccuaacggaaccauuguuaagacaaucaccaaugaucaaauugaggugacaaacgcuaccgaacuggugcaaaauucuagcacaggcgagaucugcgacuccccgcaccagauccuugauggggaaaacuguacccugauugacgcccuccugggagauccccagugcgacggcuuucagaauaaaaagugggaucuguucgucgagagaucuaaagccuauagcaacuguuacccuuaugacgugcccgauuacgcuucccuccggucucugguugccagcuccgggacgcuugaauuuaauaacgagagcuucaauuggaccggagugacacagaacggcaccucuuccgcuugcauccgcagaagcaauaacuccuuuuucucucggcugaauuggcucacacaucugaaguuuaaguauccugcccuuaacgucaccaugcccaacaaugagcaguucgacaaacuguacauuuggggcgugcaccauccugggacggauaacgaccagaucuuucucuaugcgcaagccagcggacgcauuacaguuucuaccaagagaucccagcagacagugaucccgaauauuggcagccggccccgcgucagaaacaucccuucccggaucucuauuuacuggaccaucgugaaacccggggauauucugcugaucaauagcaccggaaaccucauugcuccucgcggcuacuucaagaucagauccgggaaaagcucuaucaugcgguccgacgcccccauuggaaaguguaauagcgaaugcaucacaccgaacggcucuauuccuaaugacaagcccuuucagaacgugaaucgcaucacguauggcgcuuguccuagauacgucaaacaaaacacccugaaacuugccacagggaugcggaauguucccgagaagcagacccgcggaauuuucggcgcgaucgccggguuuaucgaaaacggaugggagggcaugguggaugggugguauggauucagacaccagaauagcgagggccggggccaagcugccgaccugaaguccacacaggcugccauugaucagaucaacgggaaacucaacagacugauuggaaagaccaaugaaaaauuccaccagaucgagaaggaauuuucugagguggaaggccgcauucaagaccuugagaaguacgucgaggauacgaaaaucgaccuguggagcuauaacgccgaacuccugguggcucuggagaaucagcauacaauugaucucaccgacuccgaaaugaacaagcuguucgagaaaaccaagaaacagcuucgggaaaaugcggaggauauggggaacggaugcuuuaagaucuaccacaagugugacaaugccugcaucggcagcauuagaaacgggacauaugaucaugacguuuaccgcgacgaggcucugaauaaccgguuccagaucaaaggcguggaacucaagucuggauacaaagauuggauucuguggaucuccuuugccauuagcugcuuccuucugugugucgcccuccugggcuuuaucaugugggcuugccaaaaggggaauaucagauguaacauuugcaucuga

SEQ ID NO: 200205 - RNA, 1701 nt, Artificial Sequence; identical to SEQ ID NO: 200204
  derived and/or modified CDS sequence (opt5) from hemagglutinin__InfluenzaA__AEX36553

SEQ ID NO: 200206 - RNA, 1701 nt, Artificial Sequence; identical to SEQ ID NO: 200204
  derived and/or modified CDS sequence (opt5) from hemagglutinin__InfluenzaA__AEX36564

SEQ ID NO: 200207 - RNA, 1701 nt, Artificial Sequence
  derived and/or modified CDS sequence (opt5) from hemagglutinin__InfluenzaA__AEX36575
augaagaccaucauugcccugagcuacauccucugccugguguucgcucagaaacuucccggcaacggaaauuccacagccacgcugugucucgggcaccaugcggucccuaacggcaccauuguuaagacaaucaccaaugaccaaauugaggugacaaacgcuaccgaacuggugcagucuagcuccacaggggagaucugcgauucuccgcaccagauccuugacggagaaaauuguacccugauugaugcccuccugggcgacccccagugcgauggguuucaaaacaaaaagugggaccuguucgucgagagaagcaaagccuauuccaauuguuacccuuaugaugugcccgacuacgcuucucuccggagccugguugccuccagcggaacgcuugaauuuaacaaugagucuuucaacuggaccggcgugacacagaauggcaccuccagcgcuugcauccgcagaucuaacaauuccuuuuucagccggcugaacuggcucacacaucugaaguuuaaguauccugcccuuaaugucaccaugcccaacaacgagcaguucgauaaacuguacauuuggggagugcaccauccugggacggacaaugaucagaucuuucucuaugcgcaagccucuggccgcauuacaguuuccaccaagagaagccagcagacagugaucccgaacauugggucccggccccgcgucagaaauaucccuucucggaucagcauuuacuggaccaucgugaaacccggagacauucugcugaucaacuccaccggcaaucucauugcuccucgcggguacuucaagaucagaagcggaaaaucuuccaucaugcggagcgaugcccccauuggcaaguguaacucugaaugcaucacaccgaauggcagcauuccuaacgacaagcccuuucagaaugugaaccgcaucacguauggggcuuguccuagauacgucaaacaaaauacccugaaacuugccacaggaaugcggaacguucccgagaagcagacccgcggcauuuucggggcgaucgccggauuuaucgaaaauggcugggaggggaugguggacggaugguauggcuucagacaccagaacuccgagggccgggggcaagcugccgaucugaagucuacacaggcugccauugaccagaucaauggaaaacucaacagacugauuggcaagaccaacgaaaaauuccaccagaucgagaaggaauuuagcgagguggaagggcgcauucaagaucuugagaaguacgucgaggacacgaaaaucgauauuugguccuauaaugccgaacugcucguggcucuggagaaccagcauacaaucgaccugaccgauagcgaaaugaauaaacucuucgagaagaccaagaaacagcugcgggaaaacgcggaggacaugggaaauggcugcuuuaagaucuaccacaagugugauaacgccugcauugggucuaucagaaauggcacauaugaccaugauguuuaccgcgacgaggcucuuaacaaucgguuccagauuaaaggaguggaacugaaguccggcuacaaagacuggauccucuggauuagcuuugccaucucuugcuuccugcuuugugucgcccugcucggguuuaucaugugggcuugccaaaagggaaacauuagauguaauaucugcauuuga

SEQ ID NO: 200208 - RNA, 1701 nt, Artificial Sequence
  derived and/or modified CDS sequence (opt5) from hemagglutinin__InfluenzaA__AEX36586
augaagaccaucauugcccugagcuacauccucugccugguguucgcucagaaacuucccggcaacgacaauaacacagccacgcugugucucgggcaccaugcggucccuaauggaaccauuguuaagacaaucaccaacgaucaaauugaggugacaaaugcuaccgaacuggugcaguccucuagcacaggcgagaucugcgacuccccgcaccagauccuugauggggaaaacuguacccugauugacgcccuccugggagauccccagugcgacggcuuucaaaauaaaaagugggaucuguucgucgagagaucuaaagccuauagcaacuguuacccuuaugacgugcccgauuacgcuucccuccggucucugguugccagcuccgggacgcuugaauuuaauaacgagagcuucaauuggaccggagugacacagaacggcaccucuuccgcuugcauccgcagaagcaauaacuccuuuuucucucggcugaauuggcucacacaucugaaguuuaaguauccugcccuuaacgucaccaugcccaacaaugagcaguucgacaaacuguacauuuggggcgugcaccauccugggacggauaacgaccagaucuuucucuaugcgcaagccagcggacgcauuacaguuucuaccaagagaucccagcagacagugaucccgaauauuggcagccggccccgcgucagaaacaucccuucccggaucucuauuuacuggaccaucgugaaacccggggauauucugcugaucaauagcaccggaaaccucauugcuccucgcggcuacuucaagaucagauccgggaaaagcucuaucaugcgguccgacgcccccauuggaaaguguaauagcgaaugcaucacaccgaacggcucuauuccuaaugacaagcccuuucagaacgugaaucgcaucacguauggcgcuuguccuagauacgucaaacaaaacacccugaaacuugccacagggaugcggaauguucccgagaagcagacccgcggaauuuucggcgcgaucgccggguuuaucgaaaacggaugggagggcaugguggaugggugguauggauucagacaccagaauagcgagggccggggccaagcugccgaccugaaguccacacaggcugccauugaucagaucaacgggaaacucaacagacugauuggaaagaccaaugaaaaauuccaccagaucgagaaggaauuuucugagguggaaggccgcauucaagaccuugagaaguacgucgaggauacgaaaaucgaccuguggagcuauaacgccgaacuccugguggcucuggagaaucagcauacaauugaucucaccgacuccgaaaugaacaagcuguucgagaaaaccaagaaacagcuucgggaaaaugcggaggauauggggaacggaugcuuuaagaucuaccacaagugugacaaugccugcaucggcagcauuagaaacgggacauaugaucaugacguuuaccgcgacgaggcucugaauaaccgguuccagaucaaaggcguggaacucaagucuggauacaaagauuggauucuguggaucuccuuugccauuagcugcuuccuucugugugucgcccuccugggcuuuaucaugugggcuugccaaaaggggaauaucagauguaacauuugcaucuga

SEQ ID NO: 200209 - RNA, 1701 nt, Artificial Sequence
  derived and/or modified CDS sequence (opt5) from hemagglutinin__InfluenzaA__AEX36597
augaagaccaucauugcccugagcuacauccucugccugguguucgcucagaaacuucccggcaacgacaauuccauggccacacugugucucgggcaccaugcggucccuaacggaacgauuguuaagaccaucacaaaugaucaaauugaggugaccaacgcuacagaacuggugcagucuagcuccaccggcgagaucugcgacucuccgcaccagauccuugauggggaaaauuguacacugauugacgcccuccugggagauccccagugcgacggcuuucaaaacaaaaagugggaucuguucgucgagagaagcaaagccuauuccaauuguuacccuuaugacgugcccgauuacgcuucucuccggagccugguugccuccagcgggacccuugaauuuaacaaugagucuuucaacuggacgggagugacccagaauggcacauccagcgcuugcauccgcagaucuaacaauuccuuuuucagccggcugaacuggcucacccaucugaaguuuaaguauccugcccuuaaugucacaaugcccaacaacgagcaguucgacaaacuguacauuuggggcgugcaccauccugggaccgauaaugaccagaucuuucucuaugcgcaagccucuggacgcauuacgguuuccacaaagagaagccagcagaccgugaucccgaacauuggcucccggccccgcgucagaaauaucccuucucggaucagcauuuacuggacaaucgugaaacccggggauauucugcugaucaacuccaccggaaaucucauugcuccucgcggcuacuucaagaucagaagcgggaaaucuuccaucaugcggagcgacgcccccauuggaaaguguaacucugaaugcaucaccccgaauggcagcauuccuaacgacaagcccuuucagaaugugaaccgcaucacauauggcgcuuguccuagauacgucaaacaaaauacgcugaaacuugccaccgggaugcggaacguucccgagaagcagacacgcggaauuuucggcgcgaucgccggguuuaucgaaaauggaugggagggcaugguggaugggugguauggauucagacaccagaacuccgagggccggggccaagcugccgaccugaagucuacccaggcugccauugaucagaucaaugggaaacucaacagacugauuggaaagacaaacgaaaaauuccaccagaucgagaaggaauuuagcgagguggaaggccgcauucaagaccuugagaaguacgucgaggauaccaaaguggaccugugguccuauaaugccgaacuccugguugcucuggagaaccagcauacgaucgaucucacagacagcgaaaugaauaagcuguucgagaaaaccaagaaacagcuucgggaaaacgcggaggauauggggaauggaugcuuuaagauuuaccacaagugugacaacgccugcaucggcucuaucagaaaugggaccuaugaucaugacguguaccgcgacgaggcucugaacaaucgguuccagauuaaaggcgucgaacucaaguccggauacaaagauuggauccuguggauuagcuuugccaucucuugcuuccuucuguguguggcccuccugggcuuuauuaugugggcuugccaaaaggggaacaucagauguaauaucugcauuuga

SEQ ID NO: 200210 - RNA, 1701 nt, Artificial Sequence
  derived and/or modified CDS sequence (opt5) from hemagglutinin__InfluenzaA__AEX36608
augaagaccaucauugcccugagcuacauccucugccugguguucgcucagaaacuucccggcaacgacaauuccacagccacgcugugucucgggcaccaugcggucccuaacggaaccauuguuaagacaaucaccaaugaucaaauugaggugacaaacgcuaccgaacuggugcagucuagcuccacaggcgggaucugcgacucuccgcaccagauccuugauggagagaauuguacccugauugacgcccuccugggcgauccccagugcgacggguuucaaaacaaaaagugggaucuguucgucgaaagaagcaaagccuauuccaauuguuacccuuaugacgugcccgauuacgcuucucuccggagccugguugccuccagcggaacgcuugaguuuaacaaugaaaacuucaauuggaccggcgugacacagaacggcaccucuuccgcuugcaagcgcagaagcaauaacuccuuuuucucucggcugaauuggcucacacaucugaaguuuaaauauccugcccuuaacgucaccaugcccaacaaugagaaguucgacaaacuguacaucuggggagugcaccauccugggacggauaacgaccagauuuuucucuaugcgcaggccagcggccgcaucacaguuucuaccaagagaucccaacagacagugauuccgaauaucgggagccggccccgcgucagaaacauuccuucccggaucucuaucuacuggaccauugugaaacccggagauauccugcugauuaauagcaccggcaaccucaucgcuccucgcggguacuucaagauuagauccggaaagagcucuaucaugcgguccgacgcccccaucggcaaauguaauagcgagugcauuacaccgaacggcucuaucccuaaugacaagcccuuucagaacgugaaucgcauuacguauggggcuuguccuagauacgucaaacagaacacccugaaacuugccacaggaaugcggaauguucccgaaaagcaaacccgcggcaucuucggggcgauugccggauuuaucgagaacggcugggaagggaugguggauggaugguauggcuucagacaccagaauagcgagggcaucgggcaggcugccgaccugaaguccacacaagcugccauuaaccagaucaacggaaaacucaaucggcugauuggcaagaccaacgagaaguuccaccagaucgaaaaagaguuuucugaaguggaggggcgcauucaggaucuugaaaaguacgucgaggacacgaaaaucgaucuguggagcuauaaugccgagcuccugguggcucuggaaaaccaacauacaauugaccucaccgauuccgagaugaauaagcuguucgaaagaaccaaaaagcagcuucgggagaacgcggaagacaugggaaauggcugcuuuaagaucuaccacaaaugugauaacgccugcaucgggagcauuagaaauggcacauaugaccaugauguuuaccgcgacgaggcucugaacaagcgguuccagaucaaaggaguggagcucaagucuggcuacaaagacuggauucuguggaucuccuuugccauuagcugcuuccuucugugugucgcccuccugggguuuaucaugugggcuugccagaagggaaauaucagauguaacauuugcaucuga

SEQ ID NO: 200211 - RNA, 1701 nt, Artificial Sequence; identical to SEQ ID NO: 200033
  derived and/or modified CDS sequence (opt5) from hemagglutinin__InfluenzaA__AEX36619

SEQ ID NO: 200212 - RNA, 1701 nt, Artificial Sequence
  derived and/or modified CDS sequence (opt5) from hemagglutinin__InfluenzaA__AEX63617
auggaggccaagcuguucgugcucuuuugcgcuuucaccgcccugaaagcggacacaaucugugucggcuaccacgcuaacaauagcacggauaccguugacacaauucuugaaaagaacgugaccgugacacauuccgucaaucugcucgagaacucucacaaugggaaacugugcagccuuaacggaaagaucccccugcagcucggcaauuguaacguggccggguggauucugggaaauccuaaaugcgaucugcuccugaccgccaacuccuggucuuauaucauugaaacaagcaauuccaagaacggcgcuuguuacccgggggaguuugccgacuaugaagaacuuaaggagcaacugucuaccguuagcuccuucgaaagauuugagaucuuccccaaagcuacgagcuggccuaaucaugauaccacacggggaaccacaguggccugcucucacuccggcgcgaacagcuuuuaccgcaaucuccuguggaucgucaagaaaggcaacucuuaucccaaacuuuccaaaagcuacaccaacaauaaggggaaggaagugcugguuauuuggggagugcaucacccucccacggacucuguccagcagacacucuaucagaacaaucacaccuacguguccgugggcagcuccaaauacuauaagagauucacaccugagaucgucgcccggccgaaaguucgcgagcaagcugggagaaugaacuacuauuggacccugcuggaucagggagacaccauuacauuugaagccacgggcaaucucaucgcucccuggcaugccuucgcgcugaagaaagggucuagcuccggaauuaugcggagcgaugcccaggugcacaacuguaccacaaagugccagaccccucauggcgcucuuaaaggcaaucugcccuuucaaaacgugcacccugucacaaucggggagugucccaaguacgugaagucuacccagcuccgcauggccacgggacugagaaauauuccguccauccagagccggggccuuuucggggcuaucgccggauuuauugaaggcggguggacaggaaugguugacggcugguauggcuaccaccaucgcaacgagcaggggucuggauaugccgcugaucaaaagagcacccagaucgcgauugacggcaucuccaauaaggugaacucugucauugagaaaaugaauauccaguucaccagcguggggaaggaguucaacucccuggagaaaagaauggaaaaucucaacaagaagguugaugacggauuucuggacguguggacauacaacgccgagcugcucauccugcuugaaaaugagcggacccuggauuuccacgaccucaacgucaaaaaucuguacgaaaaggugaaaagccaacuucgcaacaaugcuaaggagauuggcaacgggugcuuugaguucuaucauaaaugugauaaugaaugcauggagucugucaagaacggcacauacaauuaucugaaguacuccgaagagagcaaacucaacagagaagagaucgacggagugaagcuggagucuaugggcauucaccagauccuggccauuuauuccacgguugccagcucccucgugcugcuugucucucugggggcuaucagcuuuuggaugugcuccaauggaucucuccagugucgggugugcaucuga

SEQ ID NO: 200213 - RNA, 1698 nt, Artificial Sequence; identical to SEQ ID NO: 195350
  derived and/or modified CDS sequence (opt5) from hemagglutinin__InfluenzaA__AEX92873

SEQ ID NO: 200214 - RNA, 1701 nt, Artificial Sequence; identical to SEQ ID NO: 195905
  derived and/or modified CDS sequence (opt5) from hemagglutinin__InfluenzaA__AEY69088

SEQ ID NO: 200215 - RNA, 1701 nt, Artificial Sequence; identical to SEQ ID NO: 195502
  derived and/or modified CDS sequence (opt5) from hemagglutinin__InfluenzaA__AEY69098

SEQ ID NO: 200216 - RNA, 1701 nt, Artificial Sequence; identical to SEQ ID NO: 195483
  derived and/or modified CDS sequence (opt5) from hemagglutinin__InfluenzaA__AEY69120

SEQ ID NO: 200217 - RNA, 1701 nt, Artificial Sequence; identical to SEQ ID NO: 195685
  derived and/or modified CDS sequence (opt5) from hemagglutinin__InfluenzaA__AEY69131

SEQ ID NO: 200218 - RNA, 1701 nt, Artificial Sequence; identical to SEQ ID NO: 199060
  derived and/or modified CDS sequence (opt5) from hemagglutinin__InfluenzaA__AEY69153

SEQ ID NO: 200219 - RNA, 1701 nt, Artificial Sequence; identical to SEQ ID NO: 195685
  derived and/or modified CDS sequence (opt5) from hemagglutinin__InfluenzaA__AEY69164

SEQ ID NO: 200220 - RNA, 1701 nt, Artificial Sequence; identical to SEQ ID NO: 195685
  derived and/or modified CDS sequence (opt5) from hemagglutinin__InfluenzaA__AEY69175

SEQ ID NO: 200221 - RNA, 1701 nt, Artificial Sequence; identical to SEQ ID NO: 195685
  derived and/or modified CDS sequence (opt5) from hemagglutinin__InfluenzaA__AEY69186

SEQ ID NO: 200222 - RNA, 1701 nt, Artificial Sequence; identical to SEQ ID NO: 195685
  derived and/or modified CDS sequence (opt5) from hemagglutinin__InfluenzaA__AEY69197

SEQ ID NO: 200223 - RNA, 1701 nt, Artificial Sequence; identical to SEQ ID NO: 195685
  derived and/or modified CDS sequence (opt5) from hemagglutinin__InfluenzaA__AEY69208

SEQ ID NO: 200224 - RNA, 1701 nt, Artificial Sequence; identical to SEQ ID NO: 195685
  derived and/or modified CDS sequence (opt5) from hemagglutinin__InfluenzaA__AEY69219

SEQ ID NO: 200225 - RNA, 1701 nt, Artificial Sequence; identical to SEQ ID NO: 195483
  derived and/or modified CDS sequence (opt5) from hemagglutinin__InfluenzaA__AEY69258

SEQ ID NO: 200226 - RNA, 1701 nt, Artificial Sequence; identical to SEQ ID NO: 195685
  derived and/or modified CDS sequence (opt5) from hemagglutinin__InfluenzaA__AEY69269

SEQ ID NO: 200227 - RNA, 1701 nt, Artificial Sequence; identical to SEQ ID NO: 195483
  derived and/or modified CDS sequence (opt5) from hemagglutinin__InfluenzaA__AEY69291

SEQ ID NO: 200228 - RNA, 1701 nt, Artificial Sequence; identical to SEQ ID NO: 195483
  derived and/or modified CDS sequence (opt5) from hemagglutinin__InfluenzaA__AEY69302

SEQ ID NO: 200229 - RNA, 1701 nt, Artificial Sequence; identical to SEQ ID NO: 195483
  derived and/or modified CDS sequence (opt5) from hemagglutinin__InfluenzaA__AEY69313

SEQ ID NO: 200230 - RNA, 1701 nt, Artificial Sequence; identical to SEQ ID NO: 195483
  derived and/or modified CDS sequence (opt5) from hemagglutinin__InfluenzaA__AEY69785

SEQ ID NO: 200231 - RNA, 1701 nt, Artificial Sequence
  derived and/or modified CDS sequence (opt5) from hemagglutinin__InfluenzaA__AEY69807
augaagaccaucauugcccugagcuacauccucugccugguguucgcucagaaacuucccggcaacgacaauuccacagccacgcugugucucgggcaccaugcggucccuaacggaaccauuguuaagacaaucaccaaugaucaaauugaggugacaaacgcuaccgaacuggugcagucuagcuccacaggcgagaucugcgacucuccgcaccagauccuugaugggaaaaauuguacccugauugacgcccuccugggagauccccagugcgacggccugcaaaacaagaaaugggaucucuuugucgaaagaagcaaggccuauuccaauuguuacccuuaugacgugcccgauuacgcuucucugcggagccuuguugccuccagcgggacgcuggaguucaacaaugaaucuuuuaacuggaccggagugacacagaauggcaccuccagcgcuugcauccgcagaucuaagaacuccuucuuuagccggcucaauuggcugacacaucuuaacuucaaauauccugcccugaaugucaccaugcccaacaacgagcaguuugacaagcucuacauuuggggcgugcaccauccugggacggauaaagaccagaucuuccuguaugcgcaagccucuggacgcauuacaguuuccaccaagagaagccagcagacagcuaucccgaauauuggcucccggccccgcgugagaaacaucccuucucggaucagcauuuacuggaccaucgucaaacccggggauauucugcucaucaauuccaccggaaaccugauugccccucgcggcuacuuuaaacuuagaagcgggaagucuuccaucaugcggagcgacgcucccaucggaaaauguaauucugagugcauuacaccgaacggcagcaucccuaaugacaagcccuuccagaacgugaaucgcauuacguauggcgccuguccuagauacgugaaacaaaacacccugaagcucgcgacagggaugcggaauguccccgaaaaacagacccgcggaaucuuuggcgccauugcuggguucaucgagaacggaugggaaggcaugguugaugggugguauggauuuagacaccaaaauuccgagggccggggccaggccgcugaccugaagucuacacaggccgccaucgaucagauuaacgggaaacuuaauagacugaucggaaagaccaacgagaaguuccaccagauugaaaaagaguucagcgaaguggagggccgcauccaagaccucgaaaaguacguggaggauacgaaaauugaccugugguccuauaacgcugagcugcucgucgcgcuggaaaaucagcauacaaucgaucuuaccgacagcgagaugaacaagcuguuugaaaagaccaagaagcagcuccgggagaaugccgaagauauggggaacggaugcuucaaaauuuaccacaagugugacaaugcuugcaucggcucuaucagaaacgggacauaugaucaugacguguaccgcgacgaggcccugaauaaccgguuucagauuaaaggcguugagcuuaaguccggauacaaagauuggauccuguggauuagcuucgccaucucuugcuuucuccuguguguggcucugcucggcuucauuaugugggccugccaaaaggggaauaucagauguaacaucugcauuuga

SEQ ID NO: 200232 - RNA, 1701 nt, Artificial Sequence; identical to SEQ ID NO: 195685
  derived and/or modified CDS sequence (opt5) from hemagglutinin__InfluenzaA__AEY69818

SEQ ID NO: 200233 - RNA, 1701 nt, Artificial Sequence; identical to SEQ ID NO: 195685
  derived and/or modified CDS sequence (opt5) from hemagglutinin__InfluenzaA__AEY69829

SEQ ID NO: 200234 - RNA, 1701 nt, Artificial Sequence; identical to SEQ ID NO: 195685
  derived and/or modified CDS sequence (opt5) from hemagglutinin__InfluenzaA__AEY69840

SEQ ID NO: 200235 - RNA, 1701 nt, Artificial Sequence; identical to SEQ ID NO: 195685
  derived and/or modified CDS sequence (opt5) from hemagglutinin__InfluenzaA__AEY69851

SEQ ID NO: 200236 - RNA, 1701 nt, Artificial Sequence; identical to SEQ ID NO: 195685
  derived and/or modified CDS sequence (opt5) from hemagglutinin__InfluenzaA__AEY69873

SEQ ID NO: 200237 - RNA, 1701 nt, Artificial Sequence; identical to SEQ ID NO: 195685
  derived and/or modified CDS sequence (opt5) from hemagglutinin__InfluenzaA__AEY69884

SEQ ID NO: 200238 - RNA, 1701 nt, Artificial Sequence; identical to SEQ ID NO: 195685
  derived and/or modified CDS sequence (opt5) from hemagglutinin__InfluenzaA__AEY69895

SEQ ID NO: 200239 - RNA, 1701 nt, Artificial Sequence; identical to SEQ ID NO: 199060
  derived and/or modified CDS sequence (opt5) from hemagglutinin__InfluenzaA__AEY69906

SEQ ID NO: 200240 - RNA, 1701 nt, Artificial Sequence; identical to SEQ ID NO: 195685
  derived and/or modified CDS sequence (opt5) from hemagglutinin__InfluenzaA__AEY69917

SEQ ID NO: 200241 - RNA, 1701 nt, Artificial Sequence
  derived and/or modified CDS sequence (opt5) from hemagglutinin__InfluenzaA__AEY69939
augaagaccaucauugcccugagcuacauccucugccugguguucgcucagaaaauucccggcaacgacaauuccacagccacgcuuugucuggggcaccaugcggucccuaacggaaccaucguuaagacaauuaccaaugaucaaaucgaggugacaaacgcuaccgaacucgugcagucuagcuccacaggcgagaucugcgacucuccgcaccagauucuggaugggaaaaauuguacccuuaucgacgcccugcucggagauccccagugcgacggcuuucaaaacaagaaaugggaucuguucgucgaaagaagcaaggccuauuccaauuguuacccuuaugacgugcccgauuacgcuucucugcggagccucguugccuccagcgggacgcuggaguuuaacaaugaaucuuucaacuggaccggagugacacagaauggcaccuccagcgcuugcauucgcagaucuaagaacuccuuuuucagccggcuuaauuggcugacacaucucaacuuuaaauauccugcccugaaugucaccaugcccaacaacgagcaguucgacaaacuuuacaucuggggcgugcaccauccugggacggauaaggaccagauuuuucuguaugcgcaagccucuggacgcaucacaguuuccaccaagagaagccagcagacagcuauuccgaauaucggcucccggccccgcgugagaaacaucccuucucggauuagcaucuacuggaccauugucaaacccggggauauccuccugauuaauuccaccggaaaccugaucgccccucgcggcuacuucaagaucagaagcgggaagucuuccauuaugcggagcgacgcucccaucggaaaauguaauucuggcugcauuacaccgaacggcagcaucccuaaugacaagcccuuucagaacgugaaucgcauuacguaugggguguguccuagauacgucaaacaaaacacccucaagcuggccacaggaaugcggaauguucccgagaaacagacccgcggcaucuucggggcgaucgccggauuuauugaaaacggcugggaggggaugguggauggaugguauggcuucagacaccaaaauuccgaaggccgggggcaggcugccgaccuuaagucuacacaggcugccaucgaucagauuaacggaaaacugaauagacucaucggcaagaccaacgagaaguuccaccagauugagaaagaauuuagcgagguggaagggcgcauccaagaccuggagaaguacgucgaagauacgaaaauugaccuuugguccuauaacgccgagcugcucguggcucuggagaaucagcauacaaucgaucugaccgacagcgaaaugaacaaacucuucgagaagaccaagaagcagcugcgggaaaaugcggaggauaugggaaacggcugcuuuaaaaucuaccacaagugugacaaugccugcauugggucuaucagaaacggcacauaugaucaugacguuuaccgcgacgaagcucuuaauaaccgguuccagauuaaaggaguggagcugaaguccggcuacaaagauugguuucucuggaucagcuucgccauuucuugcuuucugcuuugugucgcccugcucggguucaucaugugggcuugccaaaagggaaauaucagauguaacauuugcaucuga

SEQ ID NO: 200242 - RNA, 1701 nt, Artificial Sequence; identical to SEQ ID NO: 200241
  derived and/or modified CDS sequence (opt5) from hemagglutinin__InfluenzaA__AEY69950

SEQ ID NO: 200243 - RNA, 1701 nt, Artificial Sequence; identical to SEQ ID NO: 200241
  derived and/or modified CDS sequence (opt5) from hemagglutinin__InfluenzaA__AEY69961

SEQ ID NO: 200244 - RNA, 1701 nt, Artificial Sequence
  derived and/or modified CDS sequence (opt5) from hemagglutinin__InfluenzaA__AEY69994
augaagaccaucauugcccugagcuacauccucugccugguguucgcucagaaaauucccggcaacgacaauuccacagccacgcuuugucuggggcaccaugcggucccuaacggaaccaucguuaagacaauuaccaaugaucaaaucgaggugacaaacgcuaccgaacucgugcagucuagcuccacaggcgagaucugcgacucuccgcaccagauucuggaugggaaaaauuguacccuuaucgacgcccugcucggagauccccagugcgacggcuuucaaaacaagaaaugggaucuguucgucgaaagaagcaaggccuauuccaauuguuacccuuaugacgugcccgauuacgcuucucugcggagccucguugccuccagcgggacgcuggaguuuaacaaugaaucuuucaacuggaccggagugacacagaauggcaccuccagcgcuugcauucgcagaucuaagaacuccuuuuucagccggcuuaauuggcugacacaucucaacuuuaaauauccugcccugaaugucaccaugcccaacaacgagcaguucgacaaacuuuacaucuggggcgugcaccauccugggacggauaaggaccagauuuuucuguaugcgcaagccucuggacgcaucacaguuuccaccaagagaagccagcagacagcuauuccgaauaucggcucccggccccgcgugagaaacaucccuucucggauuagcaucuacuggaccauugucaaacccggggauauccuccugauuaauuccaccggaaaccugaucgccccucgcggcuacuucaagaucagaagcgggaagucuuccauuaugcggagcgacgcucccaucggaaaauguaauucuggcugcauuacaccgaacggcagcaucccuaaugacaagcccuuucagaacgugaaucgcauuacguauggggccuguccuagauacgugaaacaaaacacccucaagcuggcgacaggaaugcggaauguccccgagaaacagacccgcggcaucuucggggccaucgcuggauuuauugaaaacggcugggaggggaugguugauggaugguauggcuucagacaccaaaauuccgaaggccgggggcaggccgcugaccuuaagucuacacaggccgccaucgaucagauuaacggaaaacugaauagacucaucggcaagaccaacgagaaguuccaccagauugagaaagaauuuagcgagguggaagggcgcauccaagaccuggagaaguacguggaagauacgaaaauugaccuuugguccuauaacgcugagcugcucgucgcgcuggagaaucagcauacaaucgaucugaccgacagcgaaaugaacaaacucuucgagaagaccaagaagcagcugcgggaaaaugccgaggauaugggaaacggcugcuuuaaaaucuaccacaagugugacaaugcuugcauugggucuaucagaaacggcacauaugaucaugacguguaccgcgacgaagcccuuaauaaccgguuccagauuaaaggaguugagcugaaguccggcuacaaagauugguuucucuggaucagcuucgccauuucuugcuuucugcuuuguguggcucugcucggguucaucaugugggccugccaaaagggaaauaucagauguaacauuugcaucuga

SEQ ID NO: 200245 - RNA, 1701 nt, Artificial Sequence; identical to SEQ ID NO: 200244
  derived and/or modified CDS sequence (opt5) from hemagglutinin__InfluenzaA__AEY70005

SEQ ID NO: 200246 - RNA, 1701 nt, Artificial Sequence; identical to SEQ ID NO: 195685
  derived and/or modified CDS sequence (opt5) from hemagglutinin__InfluenzaA__AEY70016

SEQ ID NO: 200247 - RNA, 1701 nt, Artificial Sequence
  derived and/or modified CDS sequence (opt5) from hemagglutinin__InfluenzaA__AEY70256
augaagaccaucauugcccugagcuacauccucugccugguguucgcucagaaacuucccggcaacgacaauuccacagccacgcugugucucgggcaccaugcggucccuaacggaaccauuguuaagacaaucaccaaugaucaaauugaggugacaaacgcuaccgaacuggugcagucuagcuccacaggcgagaucugcgacucuccgcaccagauccuugaugggaaaaauuguacccugauugacgcccuccugggagauccccagugcgacggcuuucaaaacaagaaaugggaucuguucgucgaaagaagcaaggccuaugggaauuguuacccuuaugacgugcccgauuacgcuucccuccggucucugguugccagcuccggaacgcuugaguuuaacaaugaaucuuucaacuggaccggcgugacacagaauggcaccucuuccgcuugcauccgcagaagcaagaacagcuuuuucucccggcugaauuggcucacacaucugaacuuuaaauauccugcccuuaaugucaccaugcccaacaacgagcaguucgacaagcuguacauuuggggagugcaccauccugggacggauaaagaccagaucuuucucuaugcgcaagccagcggccgcauuacaguuucuaccaagagaucccagcagacagcuaucccgaauauugggagccggccccgcgugagaaacaucccuucccggaucucuauuuacuggaccaucgucaaacccggagauaugcugcugauuaauagcaccggcaaccucaucgccccucgcggguacuucaagauuagauccggaaagagcucuaucaugcgguccgacgcucccaucggcaaauguaauagcgagugcauuacaccgaacggcucuaucccuaaugacaagcccuuucagaacgugaaucgcauuacguauggggccuguccuagauacgugaaacaaaacacccugaaacuugcgacaggaaugcggaauguccccgaaaaacagacccgcggcaucuucggggccauugcuggauuuaucgagaacggcugggaagggaugguugauggaugguauggcuucagacaccagaauagcgagggccgggggcaagccgcugaccugaaguccacacaggccgccaucgaucagauuaacggaaaacucaauagacugaucggcaagaccaacgagaaguuccaccagauugaaaaagaguuuucugaaguggaggggcgcauccaagaccuugaaaaguacguggaggauacgaaaauugaccuguggagcuauaacgcugagcuccuggucgcgcuggaaaaucagcauacaaucgaucucaccgacuccgagaugaacaagcuguucgaaaagaccaagaagcagcuucgggagaaugccgaagauaugggaaacggcugcuuuaaaauuuaccacaagugugacaaugcuugcaucgggagcaucagaaacggcacauaugaucaugacguguaccgcgacgaggcccugaauaaccgguuccagauuaaaggaguugagcucaagucuggcuacaaagauuggauccuguggauuuccuuugccaucagcugcuuccuucuguguguggcucuccugggguuuauuaugugggccugccaaaagggaaauaucagauguaacaucugcauuuga

SEQ ID NO: 200248 - RNA, 1701 nt, Artificial Sequence; identical to SEQ ID NO: 195685
  derived and/or modified CDS sequence (opt5) from hemagglutinin__InfluenzaA__AEY70267

SEQ ID NO: 200249 - RNA, 1701 nt, Artificial Sequence; identical to SEQ ID NO: 195685
  derived and/or modified CDS sequence (opt5) from hemagglutinin__InfluenzaA__AEY70278

SEQ ID NO: 200250 - RNA, 1701 nt, Artificial Sequence; identical to SEQ ID NO: 195483
  derived and/or modified CDS sequence (opt5) from hemagglutinin__InfluenzaA__AEY70289

SEQ ID NO: 200251 - RNA, 1701 nt, Artificial Sequence; identical to SEQ ID NO: 195685
  derived and/or modified CDS sequence (opt5) from hemagglutinin__InfluenzaA__AEY70300

SEQ ID NO: 200252 - RNA, 1701 nt, Artificial Sequence; identical to SEQ ID NO: 195685
  derived and/or modified CDS sequence (opt5) from hemagglutinin__InfluenzaA__AEY70311

SEQ ID NO: 200253 - RNA, 1701 nt, Artificial Sequence; identical to SEQ ID NO: 195685
  derived and/or modified CDS sequence (opt5) from hemagglutinin__InfluenzaA__AEY70333

SEQ ID NO: 200254 - RNA, 1701 nt, Artificial Sequence; identical to SEQ ID NO: 200244
  derived and/or modified CDS sequence (opt5) from hemagglutinin__InfluenzaA__AEY70344

SEQ ID NO: 200255 - RNA, 1701 nt, Artificial Sequence; identical to SEQ ID NO: 197296
  derived and/or modified CDS sequence (opt5) from hemagglutinin__InfluenzaA__AEY70355

SEQ ID NO: 200256 - RNA, 1701 nt, Artificial Sequence; identical to SEQ ID NO: 195483
  derived and/or modified CDS sequence (opt5) from hemagglutinin__InfluenzaA__AEY70365

SEQ ID NO: 200257 - RNA, 1701 nt, Artificial Sequence; identical to SEQ ID NO: 195685
  derived and/or modified CDS sequence (opt5) from hemagglutinin__InfluenzaA__AEY70376

SEQ ID NO: 200258 - RNA, 1701 nt, Artificial Sequence
  derived and/or modified CDS sequence (opt5) from hemagglutinin__InfluenzaA__AFB18656
augaaggccauccuggugguccuccuguacaccuucgcuacagccaacgcggacacgcuuugcauuggcuaucacgcuaauaacagcaccgauacaguugacaccgugcuggagaaaaaugugacagucacccauuccgugaaccuccuggaagauaagcacaaugggaaacuuuguaagcugagaggaguugcuccccuccaucugggcaaaugcaacaucgccggguggauucugggaaauccugagugugaaacacucucuaccgccagcuccuggucuuacaucguggagacgagcuccucugacaacgggaccugcuauccgggcgauuuuauugacuacgaagaacugcgggagcagcuuagcuccgucagcucuuucgaacgcuuugagaucuuccccaagacauccagcuggccuaaucacgauucuaacaagggagugaccgccgcuuguccccaugccggcgcgaaaggcuuuuauaagaaucugaucuggcucguuaaaaaggggaacuccuacccuaaacugagcaagucuuauauuaaugacaagggaaaagaagugcuuguccuguggggcauccaccaccccuccacaaccgccgaucaacagagccucuaccagaacgcugacacguacguguucguggggacauccagauauucuaagaaauuuaagccugagauugccauccggccgaaaguccgcgaucaggagggaagaaugaauuacuauuggacccugguugaacccggcgacaagauuacauucgaggcuaccgggaaccugguggugccucgguacgccuuugcgauggaacgcgaugccggaagcggcaucauuaucuccgacacccccguccaugacugcaacacaacgugucaaaccccuaaaggcgcuaucaauacaagccuccccuuccagaacauucacccgaucaccauugggaagugcccuaaguaugugaaaucuacaaagcugagacuugccaccggacugcggaauguucccuccauccagagccgcggccucuuuggggcuauugccggauucaucgagggcggguggacgggaaugguggauggcugguacggcuaucaucaccagaacgaacaagggucuggauacgccgcugaccugaaaagcacacagaaugcgaucgauaagauuaccaacaaagucaauuccgugaucgagaagaugaacacccaguuuacagccguuggcaaggaguucaaucaccuugagaaaagaauugagaaccugaauaagaaaguggacgauggguuccucgacaucuggaccuacaacgcugaacugcugguccuccuggagaaugaacggacacuugauuaucaugacucuaacgugaagaaucuguacgagaaaguccgcaaccagcucaagaacaaugccaaggagauuggaaacggcuguuuugaguucuaucacaaaugcgauaauacguguauggaaagcgugaagaacgggaccuacgacuauccuaaauacuccgaagaggccaagcugaauagagaagagaucgauggcguuaaacuugagagcacacggaucuaucaaauucuggcuaucuacucuaccgccgcguccagccucgugcuggucgugucucugggagcuauuuccuuuuggaugugcagcaacggcucccuccagugccgcaucuguauuuga

SEQ ID NO: 200259 - RNA, 1701 nt, Artificial Sequence; identical to SEQ ID NO: 199122
  derived and/or modified CDS sequence (opt5) from hemagglutinin__InfluenzaA__AFB40597

SEQ ID NO: 200260 - RNA, 1701 nt, Artificial Sequence; identical to SEQ ID NO: 199122
  derived and/or modified CDS sequence (opt5) from hemagglutinin__InfluenzaA__AFB40598

SEQ ID NO: 200261 - RNA, 1701 nt, Artificial Sequence
  derived and/or modified CDS sequence (opt5) from hemagglutinin__InfluenzaA__AFB40599
augaaggccauccuggugguccuccuguacaccuucgcuacagccaacgcggacacgcuuugcauuggcuaucacgcuaauaacagcaccgauacaguugacaccgugcuggagaaaaaugugacagucacccauuccgugaaccuccuggaagauaagcacaaugggaaacuuuguaagcugagaggaguugcuccccuccaucugggcaaaugcaacaucgccggguggauucugggaaauccugagugugaaucucucagcacagccuccucuuggagcuacaucguggagaccuccucuagcgacaacggcacgugcuauccgggggauuuuauugacuacgaagaacugcgggagcagcuuuccagcgucucuuccuucgaacgcuuugagaucuuccccaagaccagcucuuggccuaaucacgaucugaacaagggagugacagccgcuuguccccaugccggcgcgaaauccuuuuauaagaaucucaucuggcugguuaaaaagggcaacagcuacccuaaacuuucuaaguccuauauuaaugacaaggggaaagaagugcugguccucuggggaauccaccaccccagcaccuccgccgaucaacagucucuguaccagaacgcugacgccuacguguucgugggcacaagcagauauuccaagaaauuuaagccugagauugcuauccggccgaaaguccgcgaucaggaggggagaaugaauuacuauuggacccugguugaacccggagacaagauuacguucgaggccacaggcaaccucguggugccucgguacgcguuugccauggaacgcaacgcugggagcggaaucauuaucucugauacccccguccaugacugcaauacaaccugucaaaccccuaaaggcgccaucaacacaucccugcccuuccagaauauucacccgaucacgauuggcaagugcccuaaguaugugaaaagcaccaaacuuagacuggcuacagggcuccggaacguucccucuauccagagccgcggacuguuuggcgccauugccggguucaucgagggaggcuggaccgggaugguggacggaugguacggcuaucaucaccagaaugaacaaggcuccggguacgcugcggaucuuaaaucuacacagaacgccaucgacaagauuaccaauaaagucaacagcgugaucgagaagaugaauacgcaguuuacagcuguuggaaaggaguucaaccaccuggaaaagagaauugagaaucucaacaagaaaguggaugacggcuuccuggauaucuggaccuacaaugccgaacugcucguccugcuugagaacgaacggacccuggacuaucaugauuccaaugugaagaaccucuacgagaaaguccgcagccagcugaagaacaaugccaaggagauugggaacggauguuuugaguucuaucacaaaugcgacaauacauguauggagucugugaagaacggcaccuacgauuauccuaaauacuccgaagaggcuaaacuuaauagagaagagaucgacgggguuaagcuggagagcacacggaucuaucaaauucucgccaucuacucuacgguggcguccagccugguccuggugguuucccucggcgcuauuucuuuuuggaugugcagcaacggaucccugcagugccgcaucuguauuuga

SEQ ID NO: 200262 - RNA, 1701 nt, Artificial Sequence; identical to SEQ ID NO: 195905
  derived and/or modified CDS sequence (opt5) from hemagglutinin__InfluenzaA__AFB40600

SEQ ID NO: 200263 - RNA, 1701 nt, Artificial Sequence
  derived and/or modified CDS sequence (opt5) from hemagglutinin__InfluenzaA__AFB40601
augaaggccauccuggugguccuccuguacaccuucgcuacagccaacgcggacacgcuuugcauuggcuaucacgcuaauaacagcaccgauacaguugacaccgugcuggagaaaaaugugacagucacccauuccgugaaccuccuggaagauaagcacaaugggaaacuuuguaagcugagaggaguugcgccccuccaucugggcaaaugcaacaucgccggguggauucugggaaauccugagugugaaucucucagcacagcuuccucuuggagcuacaucguggagaccuccucuagcgacaacggcacgugcuauccgggggauuuuauugacuacgaagaacugcgggagcagcuuuccagcgucucuuccuucgaacgcuuugagaucuuccccgaaaccagcucuuggccuaaucacgauuccaacaagggagugacagccgcuuguccccaugccggcgccaagagcuuuuauaaaaaucugaucuggcucguuaagaaaggcaacucuuacccuaagcuguccaaaagcuauauuaaugacaaggggaaggaggugcuuguccuguggggaauccaccaccccuccaccucugccgaucaacagagccucuaccagaacgcugacgccuacguguucgugggcacauccagauauagcaaaaaguuuaaaccugagauugcuauccggccgaagguccgcgggcaggaaggaagaaugaauuacuauuggacccugguugagcccggcgauaaaauuacguucgaagccacagggaaccugguggugccucgguacgcguuugccauggagcgcaacgcuggaucuggcaucauuaucuccgacacccccguccaugauugcaauacaaccugucaaaccccuaagggcgccaucaacacaagccuccccuuccagaauauucacccgaucacgauugggaaaugcccuaaguaugugaagucuaccaaacugagacuugcuacaggacugcggaacguucccagcauccagucccgcggccucuuuggggccauugccggauucaucgaaggcggguggaccggaaugguggacggcugguacggcuaucaucaccagaaugagcaagggucuggauacgcugcggaccuuaagagcacacagaacgccaucgaugagauuaccaauaaagucaacuccgugaucgaaaagaugaauacgcaguuuacagcuguuggcaaagaguucaaccaccuggaaaagagaauugagaaucugaacaagaaaguggacgauggguuccucgacaucuggaccuacaaugccgaacugcugguccuccuggagaacgagcggacccuugauuaucaugacagcaaugugaagaaccuguacgaaaaaguccgcucucagcucaagaacaaugccaaagagauuggaaacggcuguuuugaguucuaucacaagugcgauaauacauguauggaguccgugaagaacgggaccuacgacuauccuaaauacagcgaagaggcuaagcugaauagagaggaaaucgauggcguuaaacuugagucuacacggaucuaucaaauucuggccaucuacuccacgguggcgagcucccucguccuggugguuucucugggagcuauuagcuuuuggaugugcuccaacggcucucuccagugccgcaucuguauuuga

SEQ ID NO: 200264 - RNA, 1701 nt, Artificial Sequence; identical to SEQ ID NO: 194741
  derived and/or modified CDS sequence (opt5) from hemagglutinin__InfluenzaA__AFB40602

SEQ ID NO: 200265 - RNA, 1701 nt, Artificial Sequence; identical to SEQ ID NO: 195905
  derived and/or modified CDS sequence (opt5) from hemagglutinin__InfluenzaA__AFB40603

SEQ ID NO: 200266 - RNA, 1701 nt, Artificial Sequence
  derived and/or modified CDS sequence (opt5) from hemagglutinin__InfluenzaA__AFB40604
augaaggccauccuggugguccuccuguacaccuucgcuacagccaacgcggacacgcuuugcauuggcuaucacgcuaauaacagcaccgauacaguugacaccgugcuggagaagaaugugacagucacccauuccgugaaccuccuggaagauaagcacaaugggaaacuuuguaagcugagaggaguugcuccccuccaucugggcaaaugcaacaucgccggguggauucugggaaauccugagugugaaucucucagcacagccuccucuuggagcuacaucguggagaccuccucuagcgacaacggcacgugcuauccgggggauuuuauugacuacgaagaacugcgggagcagcuuuccagcgucucuuccuucgaacgcuuugagaucuuccccaagaccagcucuuggccuaaucacgauuccaacaagggagugacagccgcuuguccccaugccggcgcgaaaucuuuuuauaagaaucugaucuggcucguuaaagaaggcaacagcuacccuaagcuguccaaaagcuauauuaaugacaaggggaaggaggugcuuguccuguggggaauccaccaucccccuaccacagccgaucaacagucccucuaccagaacgcugacaccuacguguucgugggcacgucuagauauagcaaaaaguuuaaaccggagauugccauccggcccaagguccgcgaucaggaagggagaaugaauuacuauuggacacugguugagccuggagacaaaauuaccuucgaagcuacaggcaaccugguggugccccgguacgccuuugcgauggagcgcaacgccggguccggaaucauuaucagcgauaccccuguccacgacugcaauaccacaugucaaacgcccaagggcgcuaucaacaccucucucccguuccagaauauucacccuaucacaauuggcaaaugccccaaguaugugaaguccaccaaacugagacuugccacagggcugcggaacguuccuagcauccagucucgcggacucuuuggcgcuauugccggguucaucgaaggaggcuggaccgggaugguggacggaugguacggcuaucaucaccagaaugagcaaggcagcggguacgccgcugaucugaaguccacgcagaacgcgaucgacaaaauuacaaauaaggucaacucugugaucgagaaaaugaauacccaguuuaccgccguugauaaggaguucaaccaccuugagaagagaauuggaaaucugaacaaaaagguggacgauggcuuccucgacaucuggacauacaaugcugaacugcugguccuccuggagaacgaacggacccuugauuaucaugacagcaaugugaaaaaccuguacgagaagguccgcaaccagcucaaaaauaacgccaaggagauugggaauggauguuuugaguucuaucacaagugcgauaacacauguauggaauccgugaaaaauggcacguacgacuaucccaaguacagcgaagaggccaaacugaacagagaagagaucgaugggguuaaacuugagucuacccggaucuaucaaauucuggcuaucuacuccacaguggccagcucucucguccuggugguuucccugggcgcgauuagcuuuuggaugugcuccaauggaucucuccagugccgcaucuguauuuga

SEQ ID NO: 200267 - RNA, 1701 nt, Artificial Sequence; identical to SEQ ID NO: 194741
  derived and/or modified CDS sequence (opt5) from hemagglutinin__InfluenzaA__AFB70138

SEQ ID NO: 200268 - RNA, 1701 nt, Artificial Sequence
  derived and/or modified CDS sequence (opt5) from hemagglutinin__InfluenzaA__AFB70145
augaaggccauccuggugguccuccuguacaccuucgcuacagccaacgcggacacgcuuugcauuggcuaucacgcuaauaacagcaccgauacaguugacaccgugcuggagaagaaugugacagucacccauuccgugaaccuccuggaagauaagcacaaugggaaacuuuguaagcugagaggaguugcuccccuccaucugggcaaaugcaacaucgccggguggauucugggaaauccugagugugaaucucucagcacagccuccucuuggagcuacaucguggagaccuccucuagcgacaacggcacgugcuauccgggggauuuuauugacuacgaagaacugcgggagcagcuuuccagcgucucuuccuucgaacgcuuugagaucuuccccaagaccagcucuuggccuaaucacgauuccaacaagggaaucacagccgcuuguccccaugccggcgcgaaaucuuuuuauaagaaucugauuuggcucgugaaaaagggcaacagcuacccuaaacuguccaagagcuauaucaaugacaaggggaaagaaguucuugugcuguggggcauucaccaccccuccaccucugccgaucaacagagccucuaccagaacgcugacgccuacgucuucgugggaacauccagauauagcaagaaauuuaagccugagaucgcuauucggccgaaagugcgcgaucaggaggggagaaugaauuacuauuggacccuggucgaacccggagacaagaucacguucgaggccacaggcaaccugguugugccucgguacgcguuugccauggaacgcaacgcugggucuggaauuaucaucuccgauacccccgugcaugacugcaauacaaccugucaaaccccuaaaggcgccauuaacacaagccuccccuuccagaauauccacccgauuacgaucggcaagugcccuaaguaugucaaaucuaccaagcugagacuugcuacagggcugcggaacgugcccagcauucagucccgcggacucuuuggcgccaucgccggguucaucgagggaggcuggaccgggaugguugacggaugguacggcuaucaucaccagaaugaacaaggcucuggguacgcugcggaucugaaaagcacacagaacgccauugacgagaucaccaauaaggugaacuccgucauugagaaaaugaauacgcaguuuacagcugugggaaaggaguucaaccaccuugagaagagaaucgaaaaucugaacaaaaagguugaugacggcuuccucgauauuuggaccuacaaugccgagcugcuggugcuccuggaaaacgagcggacccuugacuaucaugauagcaaugucaaaaaccuguacgagaaggugcgcucucagcucaaaaacaaugccaaggaaaucgggaacggauguuuugaguucuaucacaagugcgacaauacauguauggaauccgucaaaaacggcaccuacgauuauccuaaguacagcgaggaagcuaaacugaauagagaggagaucgacggggugaaacuugaaucuacacggauuuaucaaauccuggccauuuacuccacgguugcgagcucccucgugcuggucgugucucugggcgcuaucagcuuuuggaugugcuccaacggaucucuccagugccgcauuuguaucuga

SEQ ID NO: 200269 - RNA, 1701 nt, Artificial Sequence
  derived and/or modified CDS sequence (opt5) from hemagglutinin__InfluenzaA__AFB70154
augaaggccauccuggugguccuccuguacaccuucgcuacagccaacgcggacacgcuuugcauuggcuaucacgcuaauaacagcaccgauacaguugacaccgugcuggagaaaaaugugacagucacccauuccgugaaccuccuggaagauaagcacaaugagaaacuuuguaagcugagagggguugcuccccuccaucugggaaaaugcaacaucgccggcuggauucuggggaauccugaaugugagucucucagcacagccuccucuuggagcuacaucguggaaaccuccucuagcgacaacggaacgugcuauccgggcgauuuuauugacuacgaggagcugcgggaacagcuuuccagcgucucuuccuucgagcgcuuugaaaucuuccccaagaccagcucuuggccuaaucacgauuccaacaagggggugacagccgcuuguccccaugccggagcgaaaucuuuuuauaagaaucugaucuggcucguuaaaaagggcaacagcuacccuaaacuguccaagagcuauauuaaugacaagggcaaagaggugcuuguccugugggggauccaccaccccuccaccucugccgaucaacagagccucuaccagaacgcugacgccuacguguucgugggaacauccagauauagcaagaaauuuaagccugagauugcuauccggccgaaaguccgcgaucaggaaggcagaaugaauuacuauuggacccugguugagcccggggacaagauuacguucgaagccacaggaaaccugguggugccucgguacgcguuugccauggagcgcaacgcuggcucugggaucauuaucuccgauacccccguccaugacugcaauacaaccugucaaaccccuaaaggagccaucaacacaagccuccccuuccagaauauucacccgaucacgauuggcaagugcccuaaguaugugaaaucuaccaagcugagacuugcuacaggccugcggaacguucccagcauccagucccgcgggcucuuuggagccauugccggcuucaucgaagggggauggaccggcaugguggacgggugguacggauaucaucaccagaaugagcaaggcucuggcuacgcugcggaucugaaaagcacacagaacgccaucgacgagauuaccaauaaggucaacuccgugaucgaaaagaugaauacgcaguuuacagcuguugggaaggaguucaaccaccuugaaaagagaauugagaaucugaacaaaaagguggaugacggauuccucgauaucuggaccuacaaugccgaacugcugguccuccuggagaacgagcggacccuugacuaucaugauagcaaugugaaaaaccuguacgaaaagguccgcucucagcucaaaaacaaugccaaggagauuggcaacggguguuuugaguucuaucacaagugcgacaauacauguauggaauccgugaaaaacggaaccuacgauuauccuaaguacagcgaagaggcuaaacugaauagagaggaaaucgacggcguuaaacuugagucuacacggaucuaucaaauucuggccaucuacuccacgguggcgagcucccucguccuggugguuucucugggggcuauuagcuuuuggaugugcuccaacggcucucuccagugccgcaucuguauuuga

SEQ ID NO: 200270 - RNA, 1701 nt, Artificial Sequence; identical to SEQ ID NO: 194741
  derived and/or modified CDS sequence (opt5) from hemagglutinin__InfluenzaA__AFB70156

SEQ ID NO: 200271 - RNA, 1701 nt, Artificial Sequence; identical to SEQ ID NO: 194741
  derived and/or modified CDS sequence (opt5) from hemagglutinin__InfluenzaA__AFB70158

SEQ ID NO: 200272 - RNA, 1701 nt, Artificial Sequence; identical to SEQ ID NO: 200268
  derived and/or modified CDS sequence (opt5) from hemagglutinin__InfluenzaA__AFB70160

SEQ ID NO: 200273 - RNA, 1701 nt, Artificial Sequence; identical to SEQ ID NO: 195935
  derived and/or modified CDS sequence (opt5) from hemagglutinin__InfluenzaA__AFB70162

SEQ ID NO: 200274 - RNA, 1701 nt, Artificial Sequence
  derived and/or modified CDS sequence (opt5) from hemagglutinin__InfluenzaA__AFB70167
augaaggccauccuggugguccuccuguacaccuucgcuacagccaacgcggacacgcuuugcauuggcuaucacgcuaauaacagcaccgauacaguugacaccgugcuggagaagaaugugacagucacccauuccgugaaccuccuggaagauaagcacaaugggaaacuuuguaagcugagaggaguugcuccccuccaucugggcaaaugcaacaucgccggguggauucugggaaauccugagugugaaucucucagcacagccuccucuuggagcuacaucguggagaccuccucuagcgacaacggcacgugcuauccgggggauuuuauugacuacgaagaacugcgggagcagcuuuccagcgucucuuccuucgaacgcuuugagaucuuccccaagaccagcucuuggccuaaucacgauuccaacaagggagugacagccgcuuguccccaugccggcgcgaaaucuuuuuauaagaaucugaucuggcucguuaaaaagggcaacagcuacccuaaacuguccaagagcuauauuaaugacaaggggaaagaagugcuuguccuguggggaauccaccaccccuccaccucugccgaucaacagagccucuaccagaacgcugacgccuacguguucgugggcacauccagauauagcaagaaauuuaagccugagauugcuaugcggccgaaaguccgcgaucaggaggggagaaugaauuacuauuggacccugguugaacccggagacaagaucacguucgaggccacaggcaaccugguggugccucgguacgcguuugccauggaacgcaacgcugggucuggaauuaucauuuccgauacccccguccaugacugcaauacaaccugucaaaccccuaaaggcgccaucaacacaagccuccccuuccagaauauccacccgauuacgaucggcaagugcccuaaguaugugaaaucuaccaagcugagacuugcuacagggcugcggaacguucccagcauucagucccgcggacucuuuggcgccaucgccggguucauugagggaggcuggaccgggaugguggacggaugguacggcuaucaucaccagaaugaacaaggcucuggguacgcugcggaucugaaaagcacacagaacgccaucgacgagaucaccaauaaggucaacuccgugauugagaaaaugaauacgcaguuuacagcuguuggaaaggaguucaaccaccuugagaagagaaucgaaaaucugaacaaaaagguggaugacggcuuccucgauauuuggaccuacaaugccgagcugcugguccuccuggaaaacgagcggacccuugacuaucaugauagcaaugugaaaaaccuguacgagaagguccgcucucagcucaaaaacaaugccaaggaaaucgggaacggauguuuugaguucuaucacaagugcgacaauacauguauggaauccgugaaaaacggcaccuacgauuauccuaaguacagcgaggaagcuaaacugaauagagaggagauugacgggguuaaacuugaaucuacacggaucuaucaaauccuggccauuuacuccacgguggcgagcucccucguccuggugguuucucugggcgcuaucagcuuuuggaugugcuccaacggaucucuccagugccgcauuuguaucuga

SEQ ID NO: 200275 - RNA, 1701 nt, Artificial Sequence; identical to SEQ ID NO: 194741
  derived and/or modified CDS sequence (opt5) from hemagglutinin__InfluenzaA__AFB70177

SEQ ID NO: 200276 - RNA, 1701 nt, Artificial Sequence; identical to SEQ ID NO: 195310
  derived and/or modified CDS sequence (opt5) from hemagglutinin__InfluenzaA__AFB70187

SEQ ID NO: 200277 - RNA, 1701 nt, Artificial Sequence; identical to SEQ ID NO: 195935
  derived and/or modified CDS sequence (opt5) from hemagglutinin__InfluenzaA__AFB70197

SEQ ID NO: 200278 - RNA, 1701 nt, Artificial Sequence; identical to SEQ ID NO: 194741
  derived and/or modified CDS sequence (opt5) from hemagglutinin__InfluenzaA__AFB70207

SEQ ID NO: 200279 - RNA, 1701 nt, Artificial Sequence; identical to SEQ ID NO: 194741
  derived and/or modified CDS sequence (opt5) from hemagglutinin__InfluenzaA__AFB70217

SEQ ID NO: 200280 - RNA, 1701 nt, Artificial Sequence; identical to SEQ ID NO: 194741
  derived and/or modified CDS sequence (opt5) from hemagglutinin__InfluenzaA__AFB70227

SEQ ID NO: 200281 - RNA, 1701 nt, Artificial Sequence
  derived and/or modified CDS sequence (opt5) from hemagglutinin__InfluenzaA__AFB70247
augaaggccauccuggugguccuccuguacaccuucgcuacagccaacgcggacacgcuuugcauuggcuaucacgcuaauaacagcaccgauacaguugacaccgugcuggagaaaaaugugacagucacccauuccgugaaccuccuggaagauaagcacaaugggaaacuuuguaagcugagaggaguugcuccccuccaucugggcaaaugcaacaucgccggguggauucugggaaauccugagugugaaucucucagcacagccuccucuuggagcuacaucguggagaccuccucuagcgacaacggcacgugcuauccgggggauuuuauugacuacgaagaacugcgggagcagcuuuccagcgucucuuccuucgaacgcuuugagaucuuccccaagaccagcucuuggccuaaucacgauuccaacaagggagugacagccgcuuguccccaugccggcgcgaaaucuuuuuauaagaaucugaucuggcucguuaaaaagggcaacagcuacccuaaacuguccaagagcuauauuaaugacaaggggaaagaagugcuuguccuguggggaauccaccaccccuccaccucugccgaucaacagagccucuaccagaacgcugacgccuacguguucgugggcacauccagauauagcaaggaguuuaaaccugagauugcuauccggccgaagguccgcgaucaggaagggagaaugaauuacuauuggacccugguugagcccggagacaaaauuacguucgaagccacaggcaaccugguggugccucgguacgcguuugccauggagcgcaacgcugggucuggaaucauuaucuccgauacccccguccaugacugcaauacaaccugucaaaccccuaagggcgccaucaacacaagccuccccuuccagaauauucacccgaucacgauuggcaaaugcccuaaguaugugaagucuaccaaacugagacuugcuacagggcugcggaacguucccagcauccagucccgcggacucuuuggcgccauugccggguucaucgaaggaggcuggaccgggaugguggacggaugguacggcuaucaucaccagaaugagcaaggcucuggguacgcugcggaucuuaagagcacacagaacgccaucgacgagauuaccaauaaagucaacuccgugaucgaaaagaugaauacgcaguuuacagcuguuggaaaagaguucaaccaccuggaaaagagaauugagaaucugaacaagaaaguggaugacggcuuccucgauaucuggaccuacaaugccgaacugcugguccuccuggagaacgagcggacccuugacuaucaugauagcaaugugaagaaccuguacgaaaaaguccgcucucagcucaagaacaaugccaaagagauugggaacggauguuuugaguucuaucacaagugcgacaauacauguauggaguccgugaagaacggcaccuacgauuauccuaaauacagcgaagaggcuaagcugaauagagaggaaaucgacgggguuaaacuugagucuacacggaucuaucaaauucuggccaucuacuccacgguggcgagcucccucguccuggugguuucucugggcgcuauuagcuuuuggaugugcuccaacggaucucuccagugccgcaucuguauuuga

SEQ ID NO: 200282 - RNA, 1701 nt, Artificial Sequence
  derived and/or modified CDS sequence (opt5) from hemagglutinin__InfluenzaA__AFB70257
augaaggccauccuggugguccuccuguacaccuucgcuacagccaacgcggacacgcuuugcauuggcuaucacgcuaauaacagcaccgauacaguugacaccgugcuggagaagaaugugacagucacccauuccgugaaccuccuggaagauaagcacaaugggaaacuuuguaagcugagaggaguugcuccccuccaucugggcaaaugcaacaucgccggguggauucugggaaauccugagugugaaucucucagcacagccuccucuuggagcuacaucguggagaccuccucuagcgacaacggcacgugcuauccgggggauuuugucgacuacgaagaacugcgggagcagcuuuccagcgugucuuccuucgaacgcuuugagauuuuccccaagaccagcucuuggccuaaucacgauuccaacaagggaguuacagccgcuuguccccaugccggcgcgaaaucuuuuuauaagaaucugaucuggcucgugaaaaagggcaacagcuacccuaaacuguccaagagcuauaucaaugacaaggggaaagaaguccuugugcuguggggcauucaccaccccuccaccucugccgaucaacagagccucuaccagaacgcugacgccuacguguucgucggaacauccagauauagcaagaaauuuaagccugagaucgcuauucggccgaaaguucgcgaucaggaggggagaaugaauuacuauuggacccugguggaacccggagacaagaucacguucgaggccacaggcaaccugguggucccucgguacgcguuugccauggaacgcaacgcugggucuggaauuaucauuuccgauacccccgugcaugacugcaauacaaccugucaaaccccuaaaggcgccaucaacacaagccuccccuuccagaauauccacccgauuacgaucggcaagugcccuaaguauguuaaaucuaccaagcugagacuugcuacagggcugcggaacgugcccagcauucagucccgcggacucuuuggcgccaucgccggguucauugagggaggcuggaccgggauggucgacggaugguacggcuaucaucaccagaaugaacaaggcucuggguacgcugcggaucugaaaagcacacagaacgccaucgacgagaucaccaauaaggugaacuccguuauugagaaaaugaauacgcaguuuacagcugugggaaaggaguucaaccaccuugagaagagaaucgaaaaucugaacaaaaaggucgaugacggcuuccucgauauuuggaccuacaaugccgagcugcuggugcuccuggaaaacgagcggacccuugacuaucaugauagcaaugucaaaaaccuguacgagaaggugcgcucucagcucaaaaacaaugccaaggaaaucgggaacggauguuuugaguucuaucacaagugcgacaauacauguauggaauccguuaaaaacggcaccuacgauuauccuaaguacagcgaggaagcuaaacugaauagagaggagauugacggggugaaacuugaaucuacacggaucuaucaaauccuggccauuuacuccacggucgcgagcucccucgugcugguugugucucugggcgcuaucagcuuuuggaugugcuccaacggaucucuccagugccgcauuuguaucuga

SEQ ID NO: 200283 - RNA, 1701 nt, Artificial Sequence; identical to SEQ ID NO: 199148
  derived and/or modified CDS sequence (opt5) from hemagglutinin__InfluenzaA__AFB70267

SEQ ID NO: 200284 - RNA, 1701 nt, Artificial Sequence; identical to SEQ ID NO: 195211
  derived and/or modified CDS sequence (opt5) from hemagglutinin__InfluenzaA__AFB70277

SEQ ID NO: 200285 - RNA, 1701 nt, Artificial Sequence; identical to SEQ ID NO: 194741
  derived and/or modified CDS sequence (opt5) from hemagglutinin__InfluenzaA__AFB70287

SEQ ID NO: 200286 - RNA, 1701 nt, Artificial Sequence; identical to SEQ ID NO: 194741
  derived and/or modified CDS sequence (opt5) from hemagglutinin__InfluenzaA__AFB70297

SEQ ID NO: 200287 - RNA, 1701 nt, Artificial Sequence; identical to SEQ ID NO: 194741
  derived and/or modified CDS sequence (opt5) from hemagglutinin__InfluenzaA__AFB70307

SEQ ID NO: 200288 - RNA, 1701 nt, Artificial Sequence; identical to SEQ ID NO: 200268
  derived and/or modified CDS sequence (opt5) from hemagglutinin__InfluenzaA__AFB70317

SEQ ID NO: 200289 - RNA, 1701 nt, Artificial Sequence
  derived and/or modified CDS sequence (opt5) from hemagglutinin__InfluenzaA__AFB70327
augaaggccauccuggugguccuccuguacaccuucgcuacagccaacgcggacacgcuuugcauuggcuaucacgcuaauaacagcaccgauacaguugacaccgugcuggagaagaaugugacagucacccauuccgugaaccuccuggaagauaagcacaaugggaaacuuuguaagcugagaggaguugcuccccuccaucugggcaaaugcaacaucgccggguggauucugggaaauccugagugugaaucucucagcacagccuccucuuggagcuacaucguggagaccuccucuagcgacaacggcacgugcuauccgggggauuuuauugacuacgaagaacugcgggagcagcuuuccagcgucucuuccuucgaacgcuuugagaucuuccccaagaccagcucuuggccuaaucacgauuccaacaagggagugacagccgcuuguccccaugccggcgcgaaaucuuuuuauaagaaucugaucuggcucguuaaaaagggcaacagcuacccuaaacuguccaagagcuauauuaaugacaaggggaaagaagugcuuguccuguggggaauccaccaccccuccaccucugccgaucaacagagccucuaccagaacgcugacgccuacguguucgugggcacauccagauauagcaagaaauuuaagccugagauugcuauccggccgaaaguccgcgaucaggaggggagaaugaauuacuauuggacccugguugaacccggagacaagauuacguucgaggccacaggcaaccugguggugccucgguacgcguuugccauggaacgcaacgcugggucuggaaucauuaucuccgauacccccguccaugacugcaauacaaccugucaaaccccuaaaggcgccaucaacacaagccuccccuuccagaauauucacccgaucacgauuggcaagugcccuaaguaugugaaaucuaccaagcugagacuugcuacagggcugcggaacguucccagcauccagucccgcggacucuuuggcgccauugccggguucaucgagggaggcuggaccgggaugguggacggaugguacggcuaucaucaccagaaugaacaaggcucuggguacgcugcggaucugaaaagcacacagaacgccaucgacgagauuaccaauaaggucaacuccgugaucgagaaaaugaauacgcaguuuacagcuguuggaaaggaguucaaccaccuuggcaagagaauugagaaucugaacaaaaagguggaugacggguuccucgauaucuggaccuacaaugccgaacugcugguccuccuggagaacgaacggacccuugacuaucaugauagcaaugugaaaaaccuguacgagaagguccgcucucagcucaaaaacaaugccaaggagauuggaaacggcuguuuugaguucuaucacaagugcgacaauacauguauggaauccgugaaaaacgggaccuacgauuauccuaaguacagcgaagaggcuaaacugaauagagaagagaucgacggcguuaaacuugagucuacacggaucuaucaaauucuggccaucuacuccacgguggcgagcucccucguccuggugguuucucugggagcuauuagcuuuuggaugugcuccaacggcucucuccagugccgcaucuguauuuga

SEQ ID NO: 200290 - RNA, 1701 nt, Artificial Sequence; identical to SEQ ID NO: 194741
  derived and/or modified CDS sequence (opt5) from hemagglutinin__InfluenzaA__AFB70337

SEQ ID NO: 200291 - RNA, 1701 nt, Artificial Sequence; identical to SEQ ID NO: 196711
  derived and/or modified CDS sequence (opt5) from hemagglutinin__InfluenzaA__AFB70347

SEQ ID NO: 200292 - RNA, 1701 nt, Artificial Sequence; identical to SEQ ID NO: 194741
  derived and/or modified CDS sequence (opt5) from hemagglutinin__InfluenzaA__AFB70367

SEQ ID NO: 200293 - RNA, 1701 nt, Artificial Sequence; identical to SEQ ID NO: 194741
  derived and/or modified CDS sequence (opt5) from hemagglutinin__InfluenzaA__AFB70377

SEQ ID NO: 200294 - RNA, 1701 nt, Artificial Sequence; identical to SEQ ID NO: 195310
  derived and/or modified CDS sequence (opt5) from hemagglutinin__InfluenzaA__AFB70387

SEQ ID NO: 200295 - RNA, 1701 nt, Artificial Sequence; identical to SEQ ID NO: 194741
  derived and/or modified CDS sequence (opt5) from hemagglutinin__InfluenzaA__AFB70397

SEQ ID NO: 200296 - RNA, 1701 nt, Artificial Sequence; identical to SEQ ID NO: 194741
  derived and/or modified CDS sequence (opt5) from hemagglutinin__InfluenzaA__AFB70407

SEQ ID NO: 200297 - RNA, 1701 nt, Artificial Sequence
  derived and/or modified CDS sequence (opt5) from hemagglutinin__InfluenzaA__AFB77618
augaaggccauccuggugguccuccuguacaccuucgcuacagccaacgcggacacgcuuugcauuggcuaucacgcuaauaacagcaccgauacaguugacaccgugcuggagaaaaaugugacagucacccauuccgugaaccuccuggaagauaagcacaaugggaaacuuuguaagcugagaggaaucgcuccccuccaucugggcaaaugcaacauugccggguggauccugggaaauccugagugugaaucucucagcacagccuccucuuggagcuacauuguugagaccuccucuagcgacaacggcacgugcuauccgggggauuuuaucaauuacgaagaacugcgggagcagcuuuccagcgugucuuccuucgaacgcuuugagaucuuccccaagaccagcucuuggccuaaccacgacuccaauaagggagucacagccgcuuguccccaugccggcgcgaaauccuuuuauaagaaccugauuuggcucgugaaaaagggcaauucuuacccuaaacuguccaagagcuauaucaacgauaaggggaaagaaguucuugugcuguggggcauucaccaccccaccacaaccggagaccaacagucccucuaccagaaugccgauggguacgucuucgugggaacgacaagauauucuaagaaauuuaagccugagaucggcauucggccgaaagugaaggaccaggaggggcgcaugaacuacuauuggacccuggucgaacccggagauaaaaucacauucgaggcuaccggcaaccugguugugccuagauacgccuuugcuauggaacggaaugccggcagcgggauuaucaucuccgacacccccgugcaugauugcaacacaacgugucaaaccccuaagggagcgauuaauacaagccuccccuuccagaacauccacccgauuaccaucggcaagugcccuaaauaugucaagucuacaaaacugcgccuugccaccgggcugagaaaugugcccuccauucagagccggggacucuuuggcgcuaucgccggguucaucgagggaggcuggacgggcaugguugacgggugguacggauaucaucaccagaacgaacaaggcucuggguacgcugccgaccuuaagagcacacagaaugccauugauaaaaucaccaacaaggugaauagcgucauugagaagaugaacacccaguuuacagcugugggaaaagaguucaaucaccuugaaaagcgcaucgagaaccugaauaaaaagguugacgauggcuuccucgacauuuggaccuacaacgcggaacugcuggugcuccuggagaaugaaagaacacuugauuaucaugacucuaacgucaaaaaccuguacgagaaggugcggaaucagcucaagaacaaugccaaagagaucgggaacggcuguuuugaguucuaucacaagugcgauaauacguguauggagagcgucaaaaacggaaccuacgacuauccuaaguacuccgaagaggcuaaacugaaucgcgaagagaucgauggcgugaagcuggagagcacaagaauuuaucaaauccuggccauuuacucuaccguugccuccagccucgugauggucgugucucugggggcuaucuccuuuuggaugugcagcaacggaucccugcagugccggauuuguaucuga

SEQ ID NO: 200298 - RNA, 1701 nt, Artificial Sequence; identical to SEQ ID NO: 198939
  derived and/or modified CDS sequence (opt5) from hemagglutinin__InfluenzaA__AFB77619

SEQ ID NO: 200299 - RNA, 1701 nt, Artificial Sequence; identical to SEQ ID NO: 198939
  derived and/or modified CDS sequence (opt5) from hemagglutinin__InfluenzaA__AFB77620

SEQ ID NO: 200300 - RNA, 1701 nt, Artificial Sequence
  derived and/or modified CDS sequence (opt5) from hemagglutinin__InfluenzaA__AFB77621
augaaggccauccuggugguccuccuguacaccuucgcuacagccaacgcggacacgcuuugcauuggcuaucacgcuaauaacagcaccgauacaguugacaccgugcuggagaaaaaugugacagucacccauuccgugaaccuccuggaagauaagcacaaugggaaacuuuguaagcugagaggaguuacaccccuccaucugggcaaaugcaacaucgccggguggauucugggaaauccugagugugaaucucucagcaccgccuccucuuggagcuacaucguggagacguccucuagcgacaacgggaccugcuauccgggcgauuuuauuaauuacgaagaacugcgggagcagcuuuccagcgucucuuccuucgaacgcuuugagaucuuccccaagacaagcucuuggccuaaccacgacuccaauaagggagugaccgcugccuguccccaugcuggcgccaagagcuuuuauaaaaaccugaucuggcucguuaaaaagggcaauucuuacccuaaacuguccaagagcuauauuaacgauaaggggaaagaagugcuuguccuguggggaauccaccaccccuccacaaccgcggaccaacagucucucuaccagaaugccgaugcuuacguguucgugggcacgagcagauauuccaagaaauuuaagccugagauugccauccggccgaaaguccgcgaccaggaggggagaaugaacuacuauuggacacugguugaacccggagauaagauuaccuucgaggcuacaggcaaccugguggugccucgguacgccuuugcgauggaacgcaaugccgggagcggaaucauuaucucugacacccccguccaugauugcaacaccacaugucaaacgccuaaaggcgcuaucaauaccucccuccccuuccagaacauucacccgaucacaauuggcaagugcccuaaguaugugaaaagcaccaagcugagacuugccacagggcugcggaauauccccucuauucagagccgcggacucuuuggcgcuaucgccggguucaucgagggaggcuggaccgggaugguugacggaugguacggcuaucaucaccagaacgaacaaggcuccggguacgccgcugaccugaaaucuacgcagaaugcgauugauaagaucacaaacaaagugaauagcgucauugagaagaugaacacccaguuuaccgccgugggaaaggaguucaaucaccuugagaaaagaaucgagaaccugaauaagaaaguugacgauggcuuccucgacauuuggacauacaacgcugaacugcuggugcuccuggagaaugaacggacccuugauuaucaugacuccaacgucaagaaccuguacgagaaagugcgcaaucagcucaagaacaaugccaaggagaucgggaacggauguuuugaguucuaucacaaaugcgauaauacauguauggaaagcgucaagaacggcacguacgacuauccuaaauacucugaagaggccaagcugaauagagaagagaucgauggggugaaacuugaguccacccggauuuaucaaauccuggcuauuuacagcacaguugccucuucccucgugcuggucgugagccugggcgcgaucuccuuuuggaugugcucuaacggaagccuccagugccgcauuuguaucuga

SEQ ID NO: 200301 - RNA, 1701 nt, Artificial Sequence
  derived and/or modified CDS sequence (opt5) from hemagglutinin__InfluenzaA__AFB77622
augaaggccauccuggugguccuccuguacaccuucgcuacagccaacgcggacacgcuuugcauuggcuaucacgcuaauaacagcaccgauacaguugacaccgugcuggagaaaaaugugacagucacccauuccgugaaccuccuggaagauaagcacaaugggaaacuuuguaagcugagaggaguugcuccccuccaucugggcaaaugcaacaucgccggguggauucugggaaauccugagugugaaucucucagcacagccuccucuuggagcuacaucguggagaccuccucuagcgacaacggcacgugcuauccgggggauuuuauuaauuacgaagaacugcgggagcagcuuuccagcgucucuuccuucgaacgcuuugagaucuuccccaagaccagcucuuggccuaaccacgaccccaauaagggagugacagccgcuuguccucaugccggcgcgaaauccuuuuauaagaaccugaucuggcucguuaaaaagggcaauagcuaccccaaacugucuaaguccuauauuaacgauaaggggaaagaagugcuuguccuguggggaauccaccacccuagcaccacagccgaccaacagucccucuaccagaaugcugaugccuacguguucgugggcaccucuagauauagcaagaaauuuaagccggagauugcuauccggcccaaaguccgcgaccaggaggggagaaugaacuacuauuggacgcugguugaaccuggagauaagauuacauucgaggccaccggcaaccugguggugccccgguacgcguuugccauggaacgcaaugcuggguccggaaucauuaucagcgacacaccuguccaugauugcaacaccaccugucaaacacccaaaggcgccaucaauacgucucucccguuccagaacauucacccuaucaccauuggcaagugccccaaguaugugaaauccacaaagcugagacuugcuaccgggcugcggaauguuccuagcauccagucucgcggacucuuuggcgccauugccggguucaucgagggaggcuggacagggaugguggacggaugguacggcuaucaucaccagaacgaacaaggcagcggguacgcugcggaccugaaauccacccagaaugccaucgauaagauuacgaacaaagucaauucugugaucgagaagaugaacacacaguuuaccgcuguuggaaaggaguucaaucaccuugagaaaagaauugagaaccugaauaagaaaguggacgauggcuuccucgacaucuggaccuacaacgccgaacugcugguccuccuggagaaugaacggacacuugauuaucaugacagcaacgugaagaaccuguacgagaaaguccgcaaucagcucaagaacaaugccaaggagauugggaacggauguuuugaguucuaucacaaaugcgauaauaccuguauggaauccgugaagaacggcacauacgacuaucccaaauacagcgaagaggcuaagcugaauagagaagagaucgaugggguuaaacuugagucuacgcggaucuaucaaauucuggccaucuacuccaccguggcgagcucucucguccuggugguuucccugggcgcuauuagcuuuuggaugugcuccaacggaucucuccagugccgcaucuguauuuga

SEQ ID NO: 200302 - RNA, 1701 nt, Artificial Sequence; identical to SEQ ID NO: 198939
  derived and/or modified CDS sequence (opt5) from hemagglutinin__InfluenzaA__AFB77623

SEQ ID NO: 200303 - RNA, 1701 nt, Artificial Sequence; identical to SEQ ID NO: 198939
  derived and/or modified CDS sequence (opt5) from hemagglutinin__InfluenzaA__AFB77624

SEQ ID NO: 200304 - RNA, 1701 nt, Artificial Sequence
  derived and/or modified CDS sequence (opt5) from hemagglutinin__InfluenzaA__AFB77625
augaaggccauccuggugguccuccuguacaccuucacaacggcuaacgccgacacccuuugcauuggcuaucacgcgaauaacagcacagauaccguugacacagugcuggagaaaaaugugaccgucacacauuccgugaaccuccuggaagauaagcacaaugggaaacuuuguaagcugagaggaguugcuccccuccaucugggcaaaugcaacaucgccggguggauucugggaaauccugagugugaaucucucagcaccgccuccucuuggagcuacaucguggagacguccucuagcgacaacgggaccugcuauccgggcgauuuuauuaauuacgaagaacugcgggagcagcuuuccagcgucucuuccuucgaacgcuuugagaucuuccccaagacaagcucuuggccuaaccacgacuccaauaagggagugaccgcugccuguccccaugcuggcgccaagagcuuuuauaaaaaccugaucuggcucguuaaaaagggcaauucuuacccuaaacuguccaagagcuauauuaacgauaaggggaaagaagugcuuguccuguggggaauccaccaccccuccacaaccgcggaccaacagucucucuaccagaaugccgaugcuuacguguucgugggcacgagcagauauuccaagaaauuuaagccugagauugccauccggccgaaaguccgcgaccaggaggggagaaugaacuacuauuggacacugguugaacccggagauaagauuaccuucgaggcuacaggcaaccugguggugccucgguacgccuuugcgauggaacgcaaugccgggagcggaaucauuaucucugacacccccguccaugauugcaacaccacaugucaaacgccuaaaggcgcuaucaauaccucccuccccuuccagaacauucacccgaucacaauuggcaagugcccuaaguaugugaaaagcaccaagcugagacuugccacagggcugcggaauguucccucuauccagagccgcggacucuuuggcgcuauugccggguucaucgagggaggcuggaccgggaugguggacggaugguacggcuaucaucaccagaacgaacaaggcuccggguacgccgcugaccugaaaucuacgcagaaugcgaucgauaagauuacaaacaaagucaauagcgugaucgagaagaugaacacccaguuuaccgccguuggaaaggaguucaaucaccuugagaaaagaauugagaaccugaauaagaaaguggacgauggcuuccucgacaucuggacauacaacgcugaacugcugguccuccuggagaaugaacggacccuugauuaucaugacuccaacgugaagaaccuguacgagaaaguccgcaaucagcucaagaacaaugccaaggagauugggaacggauguuuugaguucuaucacaaaugcgauaauacauguauggaaagcgugaagaacggcacguacgacuauccuaaauacucugaagaggccaagcugaauagagaagagaucgaugggguuaaacuugaguccacccggaucuaucaaauucuggcuaucuacagcacaguggccucuucccucguccuggugguuagccugggcgcgauuuccuuuuggaugugcucuaacggaagccuccagugccgcaucuguauuuga

SEQ ID NO: 200305 - RNA, 1701 nt, Artificial Sequence
  derived and/or modified CDS sequence (opt5) from hemagglutinin__InfluenzaA__AFB77627
augaaggccauccuggugguccuccuguacaccuucgcuacagccaacgcggacacgcuuugcauuggcuaucacgcuaauaacagcaccgauacaguugacaccgugcuggagaaaaaugugacagucacccauuccgugaaccuccuggaagauaagcacaaugggaaacuuuguaagcugagaggaguugcuccccuccaucugggcaaaugcaacaucgccggguggauucugggaaauccugagugugaaucucucagcacagccuccucuuggagcuacaucguggagaccuccucuagcgacaacggcacgugcuauccgggggauuuuauuaauuacgaagaacugcgggagcagcuuuccagcgucucuuccuucgaacgcuuugagaucuucagcaagaccucuuccuggcccaaccacgacagcaauaagggagugacagccgcuuguccucaugccggcgcgaaaucuuuuuauaagaaccugaucuggcucguuaaaaagggcaauuccuaccccaaacugagcaaguccuauauuaacgauaaggggaaagaagugcuuguccuguggggaauccaccacccuucuaccacagccgaccaacagagccucuaccagaaugcugaugccuacguguucgugggcaccuccagauauagcaagaaauuuaagcccgagauugcuauccggccuaaaguccgcgaccaggaggggagaaugaacuacuauuggacgcugguugaaccgggagauaagauuacauucgaggccaccggcaaccugguggugccccgguacgcguuugccauggaacgcaaugcugggucuggaaucauuaucuccgacacaccuguccaugauugcaacaccaccugucaaacacccaaaggcgccaucaauacgagccucccuuuccagaacauucaccccaucaccauuggcaagugcccgaaguaugugaaaucuacaaagcugagacuugcuaccgggcugcggaauguuccuagcauccagucccgcggacucuuuggcgccauugccggguucaucgagggaggcuggacagggaugguggacggaugguacggcuaucaucaccagaacgaacaaggcucuggguacgcugcggaccugaaaagcacccagaaugccaucgauaagauuacgaacaaagucaauuccgugaucgagaagaugaacacacaguuuaccgcuguuggaaaggaguucaaucaccuugagaaaagaauugagaaccugaauaagaaaguggacgauggcuuccucgacaucuggaccuacaacgccgaacugcugguccuccuggagaaugaacggacacuugauuaucaugacagcaacgugaagaaccuguacgagaaaguccgcaaucagcucaagaacaaugccaaggagauugggaacggauguuuugaguucuaucacaaaugcgauaauaccuguauggaaucugugaagaacggcacauacgacuaucccaaauacuccgaagaggcuaagcugaauagagaagagaucgaugggguuaaacuugagagcacgcggaucuaucaaauucuggccaucuacucuaccguggcguccagccucguccuggugguuucccugggcgcuauuucuuuuuggaugugcagcaacggaucccuccagugccgcaucuguauuuga

SEQ ID NO: 200306 - RNA, 1701 nt, Artificial Sequence; identical to SEQ ID NO: 198939
  derived and/or modified CDS sequence (opt5) from hemagglutinin__InfluenzaA__AFB77628

SEQ ID NO: 200307 - RNA, 1701 nt, Artificial Sequence
  derived and/or modified CDS sequence (opt5) from hemagglutinin__InfluenzaA__AFB77629
augaaggccauccuggugguccuccuguacaccuucacaacggcuaacgccgacacccuuugcauuggcuaucacgcgaauaacagcacagauaccguugacacagugcuggagaaaaaugugaccgucacacauuccgugaaccuccuggaagauaagcacaaugggaaacuuuguaagcugagaggaguugcuccccuccaucugggcaaaugcaacaucgccggguggauucugggaaauccugagugugaaucucucagcaccgccuccucuuggagcuacaucguggagacguccucuagcgacaacgggaccugcuauccgggcgauuuuauuaauuacgaagaacugcgggagcagcuuuccagcgucucuuccuucgaacgcuuugagaucuuccccaagacaagcucuuggccuaaccacgacuccaauaagggagugaccgcugccuguccccaugcuggcgccaagagcuuuuauaaaaaccugaucuggcucguuaaaaagggcaauucuuacccuaaacuguccaagagcuauauuaacgauaaggggaaagaagugcuuguccuguggggaauccaccaccccuccacaaccgcggaccaacagucucucuaccagaaugccgaugcuuacguguucgugggcacgagcagauauuccaagaaauuuaagccugagauugccauccggccgaaaguccgcgaccaggaggggagaaugaacuacuauuggacacugguugaacccggagauaagauuaccuucgaggcuacaggcaaccugguggugccucgguacgccuuugcgauggaacgcaaugccgggagcggaaucauuaucucugacacccccguccaugauugcaacaccacaugucaaacgccuaaaggcgcuaucaauaccucccuccccuuccagaacauucacccgaucacaauuggcaagugcccuaaguaugugaaaagcaccaagcugagacuugccacagggcugcggaauguucccucuauccagagccgcggacucuuuggcgcuauugccggguucaucgagggaggcuggaccgggaugguggacggaugguacggcuaucaucaccagaacgaacaaggcuccggguacgccgcugaccugaaaucuacgcagaaugcgaucgauaagauuacaaacaaagucaauagcgugaucgagaagaugaacacccaguuuaccgccguuggaaaggaguucaaucaccuugagaaaagaauugagaaccugaauaagaaaguggacgauggcuuccucgacaucuggacauacaacgaggaacugcugguccuccuggaaaaugagcggacccuugauuaucaugacuccaacgugaagaaccuguacgagaaaguccgcaaucagcucaagaacaaugcuaaggaaauugggaacggauguuuugaguucuaucacaaaugcgauaauacauguauggaaagcgugaagaacggcacguacgacuauccuaaauacucugaggaagccaagcugaauagagaggagaucgaugggguuaaacuugaauccacccggaucuaucaaauucuggccaucuacagcacaguggcuucuucccucguccuggugguuagccugggcgccauuuccuuuuggaugugcucuaacggaagccuccagugccgcaucuguauuuga

SEQ ID NO: 200308 - RNA, 1701 nt, Artificial Sequence
  derived and/or modified CDS sequence (opt5) from hemagglutinin__InfluenzaA__AFB77630
augaaggccauccuggugguccuccuguacaccuucgcuacagccaacgcggacacgcuuugcauuggcuaucacgcuaauaacagcaccgauacaguugacaccgugcuggagaaaaaugugacagucacccauuccgugaaccuccuggaagauaagcacaaugggaaacuuuguaagcugagaggaguugcuccccuccaucugggcaaaugcaacaucgccggguggauucugggaaauccugagugugaaucucucagcacagccuccucuuggagcuacaucguggagaccuccucuagcgacaacggcacgugcuauccgggggauuuuauuaauuacgaagaacugcgggagcagcuuuccagcgucucuuccuucgaacgcuuugagaucuuccccaagaccagcucuuggccuaaccacgaauccaauaagggagugacagccgcuuguccccaugccggcgcgaaaucuuuuuauaagaaccugaucuggcucguuaaaaagggcaauagcuacccuaaacuguccaagagcuauauuaacgacaaggggaaagaggugcuuguccuguggggaauccaccaccccuccaccacagccgaucaacagucucucuaccagaaugcugacgccuacguguucgugggcaccagcagauauuccaagaaauuuaagccugagauugcuauccggccgaaaguccgcgaucaggaagggagaaugaacuacuauuggacgcugguugagcccggagacaagauuacauucgaagccaccggcaaccugguggugccucgguacgcguuugccauggagcgcaaugcugggagcggaaucauuaucucugauacacccguccaugacugcaacaccaccugucaaacaccuaaaggcgccaucaauacgucccuccccuuccagaacauucacccgaucaccauuggcaagugcccuaaguaugugaaaagcacaaagcugagacuugcuaccgggcugcggaauguucccucuauccagagccgcggacucuuuggcgccauugccggguucaucgaaggaggcuggacagggaugguggauggaugguacggcuaucaucaccagaacgagcaaggcuccggguacgcugcggaccugaaaucuacccagaaugccaucgacaagauuacgaacaaagucaauagcgugaucgagaagaugaacacacaguuuaccgcuguuggaaaggaguucaaucaccuugagaaaagaauugaaaaccugaauaagaaaguggaugacggcuuccucgauaucuggaccuacaacgccgagcugcugguccuccuggaaaaugagcggacacuugacuaucaugauuccaacgugaagaaccuguacgagaaaguccgcaaucagcucaagaacaaugccaaggaaauugggaacggauguuuugaguucuaucacaaaugcgacaauaccuguauggaaagcgugaagaacggcacauacgauuauccuaaauacucugaggaagcuaagcugaauagagaggagaucgacgggguuaaacuugaauccacgcggaucuaucaaauucuggccaucuacagcaccguggcgucuucccucguccuggugguuagccugggcgcuauuuccuuuuggaugugcucuaacggaagccuccagugccgcaucuguauuuga

SEQ ID NO: 200309 - RNA, 1701 nt, Artificial Sequence
  derived and/or modified CDS sequence (opt5) from hemagglutinin__InfluenzaA__AFB77631
augaaggccauccuggugguccuccuguacaccuucacaacggcuaacgccgacacccuuugcauuggcuaucacgcgaauaacagcacagauaccguugacacagugcuggagaaaaaugugaccgucacacauuccgugaaccuccuggaagauaagcacaaugggaaacuuuguaagcugagaggaguugcuccccuccaucugggcaaaugcaacaucgccggguggauucugggaaauccugagugugaaucucucagcaccgccuccucuuggagcuacaucguggagacguccucuagcgacaacgggaccugcuauccgggcgauuuuauuaauuacgaagaacugcgggagcagcuuuccagcgucucuuccuucgaacgcuuugagaucuuccccaagacaagcucuuggccuaaccacgacuccaauaagggagugaccgcugccuguccccaugcuggcgccaagagcuuuuauaaaaaccugaucuggcucguuaaaaagggcaauucuuacccuaaacuguccaagagcuauauuaacgauaaggggaaagaagugcuuguccuguggggaauccaccaccccuccacaaccgcggaccaacagucucucuaccagaaugccgaugcuuacguguucgugggcacgagcagauauuccaagaaauuuaagccugagauugccauccggccgaaaguccgcgaccaggaggggagaaugaacuacuauuggacacugguugaacccggagauaagauuaccuucgaggcuacaggcaaccugguggugccucgguacgccuuugcgauggaacgcaaugccgggagcggaaucauuaucucugacacccccguccaugauugcaacaccacaugucaaacgccuaaaggcgcuaucaauaccucccuccccuuccagaacauucacccgaucacaauuggcaagugcccuaaguaugugaaaagcaccaagcugagacuugccacagggcugcggaauguucccucuauccagagccgcggacucuuuggcgcuauugccggguucaucgagggaggcuggaccgggaugguggacggaugguacggcuaucaucaccagaacgaacaaggcuccggguacgccgcugaccugaaaucuacgcagaaugcgaucgauaagauuacaaacaaagucaauagcgugaucgagaagaugaacacccaguuuaccgccguuggaaaggaguucaaucaccuugagaaaagaauugagaaccugaauaagaaaguggacgauggcuuccucgacaucuggacauacaacgcugaacugcugguccuccuggagaaugaacggacccuugauuaucaugacuccaacgugaagaaccuguacgagaaaguccgcaaucagcucaagacaaacgccaaggagauugggaauggauguuuugaguucuaucacaaaugcgauaacacguguauggaaagcgugaagaauggcaccuacgacuauccuaaauacucugaagaggccaagcugaacagagaagagaucgaugggguuaaacuugaguccacacggaucuaucaaauucuggcuaucuacagcaccguggccucuucccucguccuggugguuagccugggcgcgauuuccuuuuggaugugcucuaauggaagccuccagugccgcaucuguauuuga

SEQ ID NO: 200310 - RNA, 1701 nt, Artificial Sequence
  derived and/or modified CDS sequence (opt5) from hemagglutinin__InfluenzaA__AFB77632
augaaggccauccuggugguccuccuguacaccuucgcuacagccaacgcggacacgcuuugcauuggcuaucacgcuaauaacagcaccgauacaguugacaccgugcuggagaaaaaugugacagucacccauuccgugaaccuccuggaagauaagcacaaugggaaacuuuguaagcugagaggaguugcuccccuccaucugggcaaaugcaacaucgccggguggauucugggaaauccugagugugaaucucucacaaccgccagcuccuggucuuacaucguggagacgagcuccucugacaacgggaccugcuauccgggcgauuuuauuaauuacgaagaacugcgggagcagcuuagcuccgucagcucuuucgaacgcuuugagaucuuccccaagacauccagcuggccuaaccacgacucuaauaagggagugaccgccgcuuguccccaugccggcgcgaaauccuuuuauaagaaccugaucuggcucguuaaaaagggcaauagcuacccuaaacugucuaaguccuauauuaacgauaaggggaaagaagugcuuguccuguggggaauccaccaccccagcacaaccgccgaccaacagucccucuaccagaaugcugaugccuacguguucgugggcacgucuagauauagcaagaaauuuaagccugagauugcuauccggccgaaaguccgcgaccaggaggggagaaugaacuacuauuggacacugguugaacccggagauaagauuaccuucgaggccacaggcaaccugguggugccucgguacgcguuugccauggaacgcaaugcuggguccggaaucauuaucagcgacacccccguccaugauugcaacaccacaugucaaacgccuaaaggcgccaucaauaccucucuccccuuccagaacauucacccgaucacaauuggcaagugcccuaaguaugugaaauccaccaagcugagacuugcuacagggcugcggaauguucccagcauccagucucgcggacucuuuggcgccauugccggguucaucgagggaggcuggaccgggaugguggacggaugguacggcuaucaucaccagaacgaacaaggcagcggguacgcugcggaccugaaauccacgcagaaugccaucgauaagauuacaaacaaagucaauucugugaucgagaagaugaacacccaguuuaccgcuguuggaaaggaguucaaucaccuugagaaaagaauugagaaccugaauaagaaaguggacgauggcuuccucgacaucuggacauacaacgccgaacugcugguccuccuggagaaugaacggacccuugauuaucaugacagcaacgugaagaaccuguacgagaaaguccgcaaucagcucaagaacaaugccaaggagauugggaacggauguuuugaguucuaucacaaaugcgauaauacauguauggaauccgugaagaacggcacguacgacuauccuaaauacagcgaagaggcuaagcugaauagagaagagaucgaugggguuaaacuugagucuacccggaucuaucaaauucuggccaucuacuccacaguggcgagcucucucguccuggugguuucccugggcgcuauuagcuuuuggaugugcuccaacggaucucuccagugcaagaucuguauuuga

SEQ ID NO: 200311 - RNA, 1701 nt, Artificial Sequence
  derived and/or modified CDS sequence (opt5) from hemagglutinin__InfluenzaA__AFB77633
augaaggccauccuggugguccuccuguacaccuucgcuacagccaacgcggacacgcuuugcauuggcuaucacgcuaauaacagcaccgauacaguugacaccgugcuggagaaaaaugugacagucacccauuccgugaaccuccuggaagauaagcacaaugggaaacuuuguaagcugagaggaguugcuccccuccaucugggcaaaugcaacaucgccggguggauucugggaaauccugagugugaaucucucagcacagccuccucuuggagcuacaucguggagaccuccucuagcgacaacggcacgugcuauccgggggauuuuauuaauuacgaagaacugcgggagcagcuuuccagcgucucuuccuucgaacgcuuugagaucuuccccaagaccagcucuuggccuaaccacgacuccaauaagggagugacagccgcuuguagccaugccggcgcgaaaucuuuuuauaagaaccugaucuggcucguuaaaaagggcaauuccuaccccaaacugagcaaguccuauauuaacgauaaggggaaagaagugcuuguccuguggggaauccaccacccuucuaccacagccgaccaacagagccucuaccagaaugcugaugccuacguguucgugggcaccuccagauauagcaagaaauuuaagcccgagauugcuauccggccuaaaguccgcgaccaggaggggagaaugaacuacuauuggacgcugguugaaccgggagauaagauuacauucgaggccaccggcaaccugguggugccccgguacgcguuugccauggaacgcaaugcugggucuggaaucauuaucuccgacacaccuguccaugauugcaacaccaccugucaaacacccaaaggcgccaucaauacgagccucccuuuccagaacauucaccccaucaccauuggcaagugcccgaaguaugugaaaucuacaaagcugagacuugcuaccgggcugcggaauguuccuagcauccagucccgcggacucuuuggcgccauugccggguucaucgagggaggcuggacagggaugguggacggaugguacggcuaucaucaccagaacgaacaaggcucuggguacgcugcggaccugaaaagcacccagaaugccaucgauaagauuacgaacaaagucaauuccgugaucgagaagaugaacacacaguuuaccgcuguuggaaaggaguucaaucaccuugaaaagagaauugagaaccugaauaagaaaguggacgauggcuuccucgacaucuggaccuacaacgccgaacugcugguccuccuggagaaugaacggacacuugauuaucaugacagcaacgugaagaaccuguacgagaaagucaagaaucagcucaagaacaaugccaaagagauugggaacggauguuuugaguucuaucacaagugcgauaauacccccaucaaaaacgugaagaauggcacauacgacuauccuaaauacucugaggaagcuaagcugaaccgcgaggaaaucgaugggguuaaacuugaguccacgagaauuuaucaaauccuggccauuuacagcaccguggcgucuucccucguccuggugguuagccugggcgcuaucuccuuuuggauguguucuaauggaagccuccagugccggauuugcaucuga

SEQ ID NO: 200312 - RNA, 1701 nt, Artificial Sequence
  derived and/or modified CDS sequence (opt5) from hemagglutinin__InfluenzaA__AFB77634
augaaggccauccuggugguccuccuguacaccuucgcuacagccaacgcggacacgcuuugcauuggcuaucacgcuaauaacagcaccgauacaguugacaccgugcuggagaaaaaugugacagucacccauuccgugaaccuccuggaagauaagcacaaugggaaacuuuguaagcugagaggaguugcuccccuccaucugggcaaaugcaacaucgccggguggauucugggaaauccugagugugaaucucucagcacagccuccucuuggagcuacaucguggagaccuccucuagcgacaacggcacgugcuauccgggggauuuuauuaauuacgaagaacugcgggagcagcuuuccagcgucucuuccuucgaacgcuuugagaucuuccccaagaccagcucuuggccuaaccacgacuccaauaagggagugacagccgcuuguccccaugccggcgcgaaaucuuuuuauaagaaccugaucuggcucguuaaaaagggcaauagcuacccuaaacuguccaagagcuauauuaacgauaaggggaaagaagugcuuguccuguggggaauccaccaccccuccaccacagccgaccaacagucucucuaccagaaugcugaugccuacguguucgugggcaccagcagauauuccaagaaauuuaagccugagauugcuauccggccgaaaguccgcgaccaggaggggagaaugaacuacuauuggacgcugguugaacccggagagaagauuacauucgaagccaccggcaaccugguggugccucgguacgcguuugccauggagcgcaaugcugggagcggaaucauuaucucugauacacccguccaugacugcaacaccaccugucaaacaccuaaaggcgccaucaauacgucccuccccuuccagaacauucacccgaucaccauuggcaagugcccuaaguaugugaaaagcacaaagcugagacuugcuaccgggcugcggaauguucccucuauccagagccgcggacucuuuggcgccauugccggguucaucgaaggaggcuggacagggaugguggauggaugguacggcuaucaucaccagaacgagcaaggcuccggguacgcugcggaccugaaaucuacccagaaugccaucgacaagauuacgaacaaagucaauagcgugaucgagaagaugaacacacaguuuaccgcuguuggaaaggaguucaaucaccuugagaaaagaauugaaaaccugaauaagaaaguggaugacggcuuccucgauaucuggaccuacaacgccgagcugcugguccuccuggaaaaugagcggacacuugacuaucaugauuccaacgugaagaaccuguacgagaaaguccgcaaucagcucaagaacaaugccaaggaaauugggaacggauguuuugaguucuaucacaaaugcgacaauaccuguauggaaagcgugaagaacggcacauacgauuauccuaaauacucugaggaagcuaagcugaauagagaggagaucgacgggguuaaacuugaauccacgcggaucuaucaaauucuggccaucuacagcaccguggcgucuucccucguccuggugguuagccugggcgcuauuuccuuuuggaugugcucuaacggaagccuccagugccgcaucuguauuuga

SEQ ID NO: 200313 - RNA, 1701 nt, Artificial Sequence
  derived and/or modified CDS sequence (opt5) from hemagglutinin__InfluenzaA__AFB77635
augaaggccauccuggugguccuccuguacaccuucgcuacagccaacgcggacacgcuuugcauuggcuaucacgcuaauaacagcaccgauacaguugacaccgugcuggagaaaaaugugacagucacccauuccgugaaccuccuggaagauaagcacaaugggaaacuuuguaagcugagaggaguugcuccccuccaucugggcaaaugcaacaucgccggguggauucugggaaauccugagugugaaucucucagcacagccuccccguggucuuacaucguggagaccagcuccucugacaacggcacgugcuaucccggggauuuuauuaauuacgaagaacugcgggagcagcuuagcuccgucagcucuuucgaacgcuuugagaucuucccuaagaccuccagcuggcccaaccacgacucuaauaagggagugacagccgcuuguccucaugccggcgcgaaauccuuuuauaagaaccugaucuggcucguuaaaaagggcaauagcuaccccaaacugucuaaguccuauauuaacgauaaggggaaagaagugcuuguccuguggggaauccaccacccuagcaccacagccgaccaacagucccucuaccagaaugcugaugccuacguguucgugggcaccucuagauauagcaagaaauuuaagccggagauugcuauccggcccaaaguccgcgaccaggaggggagaaugaacuacuauuggacgcugguugaaccuggagauaagauuacauucgaggccaccggcaaccugguggugccccgguacgcguuugccauggaacgcaaugcuggguccggaaucauuaucagcgacacaccuguccaugauugcaacaccaccugucaaacacccaaaggcgccaucaauacgucucucccguuccagaacauucacccuaucaccauuggcaagugccccaaguaugugaaauccacaaagcugagacuugcuaccgggcugcggaauguuccuagcauccagucucgcggacucuuuggcgccauugccggguucaucgagggaggcuggacagggaugguggacggaugguacggcuaucaucaccagaacgaacaaggcagcggguacgcugcggaccugaaauccacccagaaugccaucgauaagauuacgaacaaagucaauucugugaucgagaagaugaacacacaguuuaccgcuguuggaaaggaguucaaucaccuugagaaaagaauugagaaccugaauaagaaaguggacgauggcuuccucgacaucuggaccuacaacgccgaacugcugguccuccuggagaaugaacggacacuugauuaucaugacagcaacgugaagaaccuguacgagaaaguccgcaaucagcucaagaacaaugccaaggagauugggaacggauguuuugaguucuaucacaaaugcgauaauaccuguauggaauccgugaagaacggcacauacgacuaucccaaauacagcgaagaggcuaagcugaauagagaagagaucgaugggguuaaacuugagucuacgcggaucuaucaaauucuggccaucuacuccaccguggcgagcucucucguccuggugguuucccugggcgcuauuagcuuuuggaugugcuccaacggaucucuccagugccgcaucuguauuuga

SEQ ID NO: 200314 - RNA, 1701 nt, Artificial Sequence
  derived and/or modified CDS sequence (opt5) from hemagglutinin__InfluenzaA__AFB77636
augaaggccauccuggugguccuccuguacaccuucgcuacagccaacgcggacacgcuuugcauuggcuaucacgcuaauaacagcaccgauacaguugacaccgugcuggagaagaaugugacagucacccauuccgugaaccuccuggaagauaagcacaaugggaaacuuuguaagcugagaggaguugcuccccuccaucugggcaaaugcaacaucgccggguggauucugggaaauccugagugugaaucucucagcacagccuccucuuggagcuacaucguggagaccuccucuagcgacaacggcacgugcuauccgggggauuuuauuaauuacgaagaacugcgggagcagcuuuccagcgucucuuccuucgaacgcuuugagaucuuccccaagaccagcucuuggccuaaccacgacuccaauaagggagugacagccgcuuguccccaugccggcgcgaaaucuuuuuauaagaaccugaucuggcucguuaaaaagggcaauagcuacccuaaacuguccaagagcuauauuaacgauaaggggaaagaagugcuuguccuguggggaauccaccaccccuccaccacagccgaccaacagucucucuaccagaaugcugaugccuacguguucgugggcaccagcagauauuccaagaaauuuaagccugagauugcuauccggccgaaaguccgcgaccaggaggggagaaugaacuacuauuggacgcugguugaacccggagauaagauuacauucgaggccaccggcaaccugguggugccucgguacgcguuugccauggaacgcaaagcugggagcggaaucauuaucucugacacacccguccaugauugcaauaccaccugucaaacaccuaagggcgccaucaacacgucccuccccuuccagaauauucacccgaucaccauuggcaagugcccuaaauauguuaagagcacaaaacugagacuugcuaccgggcugcggaacgugcccucuauccagagccgcggacucuuuggcgccauugccggguucaucgagggaggcuggacagggaugguggacggaugguacggcuaucaucaccagaaugaacaaggcuccggguacgcugcggaccugaagucuacccagaacgccaucgauaaaauuacgaauaaggucaacagcgugaucgagaagaugaauacacaguuuaccgcuguuggaaaagaguucaaccaccuugaaaagagaauugagaaucugaacaaaaagguggacgauggcuuccucgacaucuggaccuacaaugccgaacugcugguccuccuggagaacgaacggacacuugauuaucaugacuccaaugugaaaaaccuguacgagaagguccgcaaccagcucaagaauaacgccaaagagauugggaauggauguuuugaguucuaucacaagugcgauaacaccuguauggagagcgugaaaaauggcacauacgacuauccuaaguacucugaagaggcuaaacugaacagagaagagaucgaugggguuaaacuugaguccacgcggaucuaucaaauucuggccaucuacagcaccguggcgucuucccucgucauggugguuagccugggcgcuauuuccuuuuggaugugcucuaauggaagccugcagugccgcaucuguauuuga

SEQ ID NO: 200315 - RNA, 1701 nt, Artificial Sequence
  derived and/or modified CDS sequence (opt5) from hemagglutinin__InfluenzaA__AFB77637
augaaggccauccuggugguccuccuguacaccuucgcuacagccaacgcggacacgcuuugcauuggcuaucacgcuaauaacagcaccgauacaguugacaccgugcuggagaaaaaugugacagucacccauuccgugaaccuccuggaagauaagcacaaugggaaacuuuguaagcugagaggaguugcuccccuccaucugggcaaaugcaacaucgccggguggauucugggaaauccugagugugaaucucucagcacagccuccucuuggagcuacaucguggagaccuccucuagcgacaacggcacgugcuauccgggggauuuuauuaauuacgaagaacugcgggagcagcuuuccagcgucucuuccuucgaacgcuuugagaucuuccccaagaccagcucuuggccuaaccacgacuccaauaagggagugacagccgcuuguccccaugccggcgcgaaaucuuuuuauaagaaccugaucuggcucguuaaaaagggcaauagcuacccuaaacuguccaagagcuauauuaacgauaaggggaaagaagugcuuguccuguggggaauccaccaccccuccaccacagccgaccaacagucucucuaccagaaugcugaugccuacguguucgugggcaccagcagauauuccaagaaauuuaagccugagauugcuauccggccgaaagggcgcgaccaggagggaagaaugaacuacuauuggacgcuggucgaacccggcgauaagauuacauucgaggccaccgggaaccugguugugccucgguacgcguuugccauggaacgcaaugcuggaagcggcaucauuaucucugacacacccgugcaugauugcaacaccaccugucaaacaccuaaaggcgccaucaauacgucccuccccuuccagaacauucacccgaucaccauugggaagugcccuaaguaugucaaaagcacaaagcugagacuugcuaccggacugcggaaugugcccucuauccagagccgcggccucuuuggggccauugccggauucaucgagggcggguggacaggaaugguugacggcugguacggcuaucaucaccagaacgaacaaggguccggauacgcugcggaccugaaaucuacccagaaugccaucgauaagauuacgaacaaagugaauagcgucaucgagaagaugaacacacaguuuaccgcugugggcaaggaguucaaucaccuugagaaaagaauugagaaccugaauaagaaaguugacgauggguuccucgacaucuggaccuacaacgccgaacugcuggugcuccuggagaaugaacggacacuugauuaucaugacuccaacgucaagaaccuguacgagaaagugcgcaaucagcucaagaacaaugccaaggagauuggaaacggcuguuuugaguucuaucacaaaugcgauaauaccuguauggaaagcgucaagaacgggacauacgacuauccuaaauacucugaagaggcuaagcugaauagagaagagaucgauggcgugaaacuugaguccacgcggaucuaucaaauucuggccaucuacagcaccguugcgucuucccucgugcuggucgugagccugggagcuauuuccuuuuggaugugcucuaacggcagccuccagugccgcaucuguauuuga

SEQ ID NO: 200316 - RNA, 1701 nt, Artificial Sequence
  derived and/or modified CDS sequence (opt5) from hemagglutinin__InfluenzaA__AFB77638
augaaggccauccuggugguccuccuguacaccuucgcuacagccaacgcggacacgcuuugcauuggcuaucacgcuaauaacagcaccgauacaguugacaccgugcuggagaaaaaugugacagucacccauuccgugaaccuccuggaagauaagcacaaugggaaacuuuguaagcugagaggaguugcuccccuccaucugggcaaaugcaacaucgccggguggauucugggaaauccugagugugaaucucucagcacagccuccucuuggagcuacaucguggagaccuccucuagcgacaacggcacgugcuauccgggggauuuuauuaauuacgaagaacugcgggagcagcuuuccagcgucucuuccuucgaacgcuuugagaucuuccccaagaccagcucuuggccuaaccacgacuccaauaagggagugacagccgcuuguccccaugccggcgcgaaaucuuuuuauaagaaccugaucuggcucguuaaaaagggcaauagcuacccuaaacuguccaaguucuauauuaacgauaaggggaaagaagugcuuguccuguggggaauccaccaccccagcaccacagccgaccaacagucccucuaccagaaugcugaugccuacguguuugugggcaccucuagauauagcaagaaauucaagccugagauugcuauccggccgaaaguccgcgaccaggaggggagaaugaacuacuauuggacgcugguugaacccggagauaagauuacauuugaggccaccggcaaccugguggugccucgguacgcguucgccauggaacgcaaugcuggguccggaaucauuaucagcgacacacccguccaugauugcaacaccaccugucaaacaccuaaaggcgccaucaauacgucucuccccuuucagaacauucacccgaucaccauuggcaagugcccuaaguaugugaaauccacaaagcugagacuugcuaccgggcugcggaauguucccagcauccagucucgcggacucuucggcgccauugccggguuuaucgagggaggcuggacagggaugguggacggaugguacggcuaucaucaccagaacgaacaaggcagcggguacgcugcggaccugaaauccacccagaaugccaucgauaagauuacgaacaaagucaauucugugaucgagaagaugaacacacaguucaccgcuguuggaaaggaguucaaucaccuugagaaaagaauugagaaccugaauaagaaaguggacgauggcuuucucgacaucuggaccuacaacgccgaacugcugguccuccuggagaaugaacggacacuugauuaucaugacagcaacgugaagaaccuguacgagaaaguccgcaaucagcucaagaacaaugccaaggagauugggaacggauguuucgaauuuuaucacaaaugcgauaauaccuguauggaguccgugaagaacggcacauacgacuauccuaaauacagcgaagaggcuaagcugaauagagaagagaucgaugggguuaaacuugagucuacgcggaucuaucaaauucuggccaucuacuccaccguggcgagcucucucguccuggugguuucccugggcgcuauuagcuucuggaugugcuccaacggaucucuccagugccgcaucuguauuuga

SEQ ID NO: 200317 - RNA, 1701 nt, Artificial Sequence; identical to SEQ ID NO: 198939
  derived and/or modified CDS sequence (opt5) from hemagglutinin__InfluenzaA__AFB77639

SEQ ID NO: 200318 - RNA, 1701 nt, Artificial Sequence
  derived and/or modified CDS sequence (opt5) from hemagglutinin__InfluenzaA__AFB77640
augaaggccauccuggugguccuccuguacaccuucgcuacagccaacgcggacacgcuuugcauuggcuaucacgcuaauaacagcaccgauacaguugacaccgugcuggagaaaaaugugacagucacccauuccgugaaccuccuggaagauaagcacaaugggaaacuuuguaagcugagaggaguugcuccccuccaucugggcaaaugcaacaucgccggguggauucugggaaauccugagugugaaucucucagcacagccuccucuuggagcuacaucguggagaccuccucuagcgacaacggcacgugcuauccgggggauuuuauuaauuacgaagaacugcgggagcagcuuuccagcgucucuuccuucgaacgcuuugagaucuuccccaagaccagcucuuggccuaaccacgacuccaauaagggagugacagccgcuuguccccaugccggcgcgaaaucuuuuuauaagaaccugaucuggcucguuaaaaagggcaauagcuacccuaaacuguccaagagcuauauuaacgauaaggggaaagaagugcuuguccuguggggaauccaccaccccuccaccacagccgaccaacagggccucuaccagaaugcugaugccuacguguucguggggaccucuagauauagcaagaaauuuaagccugagauugcuauccggccgaaaguccgcgaccaggagggaagaaugaacuacuauuggacgcugguugaacccggcgauaagauuacauucgaggccaccgggaaccugguggugccucgguacgcguuugccauggaacgcaaugcuggauccggcaucauuaucagcgacacacccguccaugauugcaacaccaccugucaaacaccuaaaggcgccaucaauacgucucuccccuuccagaacauucacccgaucaccauugggaagugcccuaaguaugugaaauccacaaagcugagacuugcuaccggacugcggaauguucccagcauccagucucgcggccucuuuggggccauugccggauucaucgagggcggguggacaggaaugguggacggcugguacggcuaucaucaccagaacgaacaagggagcggauacgcugcggaccugaaauccacccagaaugccaucgauaagauuacgaacaaagucaauucugugaucgagaagaugaacacacaguuuaccgcuguuggcaaggaguucaaucaccuugagaaaagaauugagaaccugaauaagaaaguggacgauggguuccucgacaucuggaccuacaacgccgaacugcugguccuccuggagaaugaacggacacuugauuaucaugacagcaacgugaagaaccuguacgagaaaguccgcaaucagcucaagaacaaugccaaggagauuggaaacggcuguuuugaguucuaucacaaaugcgauaauaccuguauggaauccgugaagaacgggacauacgacuauccuaaauacagcgaagaggcuaagcugaauagagaagagaucgauggcguuaaacuugagucuacgcggaucuaucaaauucuggccaucuacuccaccguggcgagcucucucguccuggugguuucccugggagcuauuagcuuuuggaugugcuccaacggcucucuccagugccgcaucuguauuuga

SEQ ID NO: 200319 - RNA, 1701 nt, Artificial Sequence
  derived and/or modified CDS sequence (opt5) from hemagglutinin__InfluenzaA__AFB77641
augaaggccauccuggugguccuccuguacaccuucgcuacagccaacgcggacacgcuuugcauuggcuaucacgcuaauaacagcaccgauacaguugacaccgugcuggagaaaaaugugacagucacccauuccgugaaccuccuggaagauaagcacaaugggaaacuuuguaagcugagaggaguugcuccccuccaucugggcaaaugcaacaucgccggguggauucugggaaauccugagugugaaucucucagcacagccuccucuuggagcuacaucguggagaccuccucuagcgacaacggcacgugcuauccgggggauuuuauuaauuacgaagaacugcgggagcagcuuuccagcgucucuuccuucgaacgcuuugagaucuuccccaagaccagcucuuggccuaaccacgacuccaauaagggagugacagccgcuuguccccaugccggcgcgaaaucuuuuuauaagaaccugaucuggcucguuaaaaagggcaauagcuacccuaaacuguccaagagcuauauuaacgauaaggggaaagaagugcuuguccuguggggaauccaccaccccuccaccacagccgaccaacagucucucuaccagaaugcugaugccuacguguucgugggcaccagcagauauuccaagaaauuuaagccugagauugcuauccggccgaaaguccgcgaccaggaggggagaaugaacuacuauuggacgcugguugaacccggagauaagauuacauucgaggccaccggcaaccugguggugccucgguacgcguuugccauggaacgcaaugcugggagcggaaucauuaucucugacacacccguccaugauugcaacaccaccugucaaacaccuaaaggcgccaucaauacgucccuccccuuccagaacauucacccgaucaccauuggcaagugcccuaaguaugugaaaagcacaaagcugagacuugcuaccgggcugcggaauguucccucuauccagagccgcggacucuuuggcgccauugccggguucaucgagggaggcuggacagggaugguggacggaugguacggcuaucaucaccagaacgaacaaggcuccggguacgcugcggaccugaaaucuacccagaaugccaucgauaagauuacgaacaaagucaauagcgugaucgagaagaugaacacacaguuuaccgcuguuggaaaggaguucaaucaccuugagaaaagaauugagaaccugaauaagaaaguggacgauggcuuccucgacaucuggaccuacaacgccgaacugcugguccuccuggagaaugaacggacacuugauuaucaugacuccaacgugaagaaccuguacgagaaaguccgcaaucagcucaagaacaaugccaaggagauugggaacggauguuuugaguucuaucacaaaugcgauaauauguguauggaaagcgugaagaacggcaccuacgacuauccuaaauacucugaagaggcuaagcugaauagagaagagaucgaugggguuaaacuugaguccacacggaucuaucaaauucuggccaucuacagcacgguggcgucuucccucguccuggugguuagccugggcgcuauuuccuuuuggaugugcucuaacggaagccuccagugccgcaucuguauuuga

SEQ ID NO: 200320 - RNA, 1701 nt, Artificial Sequence; identical to SEQ ID NO: 198939
  derived and/or modified CDS sequence (opt5) from hemagglutinin__InfluenzaA__AFB77642

SEQ ID NO: 200321 - RNA, 1701 nt, Artificial Sequence
  derived and/or modified CDS sequence (opt5) from hemagglutinin__InfluenzaA__AFB77643
augaaggccauccuggugguccuccuguacaccuucgcuacagccaacgcggacacgcuuugcauuggcuaucacgcuaauaacagcaccgauacaguugacaccgugcuggagaaaaaugugacagucacccauuccgugaaccuccuggaagauaagcacaaugggaaacuuuguaagcugagaggaguugcuccccuccaucugggcaaaugcaacaucgccggguggauucugggaaauccugagugugaaucucucagcacagccuccucuuggagcuacaucguggagaccuccucuagcgacaacggcacgugcuauccgggggauuuuauuaauuacgaagaacugcgggagcagcuuuccagcgucucuuccuucgaacgcuuugagaucuuccccaagccuagcucuuggcccaaccacgacuccaauaagggagugaccgccgcuuguccucaugccggcgcgaaaucuuuuuauaagaaccugaucuggcucguuaaaaagggcaauagcuaccccaaacuguccaagagcuauauuaacgauaaggggaaagaagugcuuguccuguggggaauccaccacccuuccacaaccgccgaccaacagucucucuaccagaaugcugaugccuacguguucgugggcacaagcagauauuccaagaaauuuaagccggagauugcuauccggcccaaaguccgcgaccaggaggggagaaugaacuacuauuggacccugguugaaccuggagauaagauuacguucgaggccacaggcaaccugguggugccccgguacgcguuugccauggaacgcaaugcugggagcggaaucauuaucucugacaccccuguccaugauugcaacacaaccugucaaacccccaaaggcgccaucaauacaucccucccguuccagaacauucacccuaucacgauuggcaagugccccaaguaugugaaaagcaccaagcugagacuugcuacagggcugcggaauguuccuucuauccagagccgcggacucuuuggcgccauugccggguucaucgagggaggcuggaccgggaugguggacggaugguacggcuaucaucaccagaacgaacaaggcuccggguacgcugcggaccugaaaucuacacagaaugccaucgauaagauuaccaacaaagucaauagcgugaucgagaagaugaacacgcaguuuacagcuguuggaaaggaguucaaucaccuugagaaaagaauugagaaccugaauaagaaaguggacgauggcuuccucgacaucuggaccuacaacgccgaacugcugguccuccuggagaaugaacggacccuugauuaucaugacuccaacgugaagaaccuguacgagaaaguccgcaaucagcucaagaacaaugccaaggagauugggaacggauguuuugaguucuaucacaaaugcgauaauacauguauggaaagcgugaagaacggcaccuacgacgauacaaaagacucugaagaggcuaagcugaauagagaagagaucgaugggguuaaacuugaguccacgcggaucuaucaaauucuggccaucuacagcaccguggcgucuucccucguccuggugguuagccugggcgcuauuuccuuuuggaugugcucuaacggaagccuccagugccgcaucuguauuuga

SEQ ID NO: 200322 - RNA, 1701 nt, Artificial Sequence
  derived and/or modified CDS sequence (opt5) from hemagglutinin__InfluenzaA__AFB77691
augaagaccaucauugcccugagcuacauccucugccugguguucgcucagaaacuucccggcaacgacaauuccacagccacgcugugucucgggcaccaugcggucccuaacggaaccauuguuaagacaaucaccaaugaucaaauugaggugacaaacgcuaccgaacuggugcaaaauucuagcacaggcgagaucugcgacuccccgcaccagauccuugauggggaaaacuguacccugauugacgcccuccugggagauccccagugcgacggcuuucagaauaaaaagugggaucuguucgucgagagaucuaaagccuauagcaacuguuacccuuaugacgugcccgauuacgcuucccuccggucucugguugccagcuccgggacgcuugaauuuaauaacgagagcuucaauuggaccggagugacacagaacggcaccucuuccgcuugcauccgcagaagcaauaacuccuuuuucucucggcugaauuggcucacacaucugaacuuuaaguauccugcccuuaacgucaccaugcccaauaacgagcaguucgaaaagcuguacauuuggggcgugcaccauccugggacggacaaagaucagaucuuucucuaugcgcaagccagcggacgcauuacaguuucuaccaagagaucccagcaggcugugaucccgaauauuggcagccggcugcgcgucagaaacauccccucccggaucucuauuuacuggacaaucgugaaaccuggggacauucugcucaucaauagcaccggaaaccugaaugcuccccgcggcuacuucaagauuagauccgggaaaagcucuaucaugcgguccgaugccccuaucggaaaguguaacagcgagugcauuacccccaauggcucuaucccgaacgacaagccuuuucagaaugugaaccgcauuacauauggcgccugucccagauacgucaaacaaaauacgcuuaagcuggcgaccgggaugcggaacguuccugaaaaacagacacgcggaaucuucggcgccauugcuggguuuaucgagaauggaugggagggcaugguggacgggugguauggauucagacaccagaacagcgaaggccggggccaagccgcugaucucaaguccacccaggccgccaucgaccagauuaacgggaaacugaauagacuuaucggaaagacaaacgagaaauuccaccagauugaaaaggaguuuucugaaguggagggccgcauccaagaucuggagaaguacgucgaagacaccaaaauugaucucuggagcuauaaugcugagcugcugguggcgcucgaaaaccagcauacgaucgaccugacagauuccgagaugaauaaacuuuucgaaaagaccaagaaccagcugcgggagaaugccgaggacauggggaacggaugcuuuaaaauuuaccacaagugugauaauaccugcaucggcagcaucagaaacgggacauaugaccaugaugcuuaccgcgacgaagcccucaauaaccgguuccagauuaagggcguugagcugaaaucuggauacaaggacuggauccuuuggauuuccuuugccaucagcugcuuccugcucuguguggcucugcugggcuuuauuaugugggccugccaaaaagggaauaucagauguaacaucugcauuuga

SEQ ID NO: 200323 - RNA, 1701 nt, Artificial Sequence
  derived and/or modified CDS sequence (opt5) from hemagglutinin__InfluenzaA__AFB77692
augaagaccaucauugcccugagcuacauccucugccugguguucgcucagaaacuucccggcaacgacaauuccacagccacgcugugucucgggcaccaugcggucccuaacggaaccauuguuaagacaaucaccaaugaucaaauugaggugacaaacgcuaccgaacuggugcaaaauucuagcacaggcgagaucugcgacuccccgcaccagauccuugauggggaaaacuguacccugauugacgcccuccugggagauccccagugcgacggcuuucagaauaaaaagugggaucuguucgucgagagaucuaaagccuauagcaacuguuacccuuaugacgugcccgauuacgcuucccuccggucucugguugccagcuccgggacgcuugaauuuaauaacgagagcuucaauuggaccggagugacacagaacggcaccucuuccgcuugcauccgcagaagcaauaacuccuuuuucucucggcugaauuggcucacacaucugaacuuuaaguauccugcccuuaacgucaccaugcccaauaacgagcaguucgacaagcuguacauuuggggcgugcaccauccugggacggauaaagaccagaucuuucucuaugcgcaagccagcggacgcauuacaguuucuaccaagagaucccagcaggcugugaucccgaauacaggcagccggccccgcgucagaaacauuccuucccggaucucuaucuacuggaccauugugaaacccggggauauccugcugauuaauagcaccggaaaccucaucgccccucgcggcuacuucaagauuagauccgggaaaagcucuaucaugcgguccgacgcucccaucggaaaguguaauagcgaaugcauuacaccgaacggcucuaucccuaaugacaagcccuuucagaacgugaaucgcauuacguauggcgccuguccuagauacgucaaacaaaacacccugaaacuugcgacagggaugcggaauguucccgagaagcagacccgcggaaucuucggcgccauugcuggguuuaucgaaaacggaugggagggcaugguggaugggugguauggauucagacaccagaauagcgagggccggggccaagccgcugaccugaaguccacacaggccgccaucgaucagauuaacgggaaacucaacagacugaucggaaagaccaaugaaaaauuccaccagauugagaaggaauuuucugagguggaaggccgcauccaagaccuugagaaguacgucgaggauacgaaaauugaccuguggagcuauaacgcugaacuccugguggcgcuggagaaucagcauacaaucgaucucaccgacuccgaaaugaacaagcuguucgagaaaaccaagaaacagcuucgggaaaaugccgaggauauggggaacggaugcuuuaagauuuaccacaagugugacaaugcuugcaucggcagcaucagaaacgggacauaugaucaugacguuuaccgcgacgaggcccugaauaaccgguuccagauuaaaggcguggaacucaagucuggauacaaagauuggauccuguggauuuccuuugccaucagcugcuuccuucugugugucgcucuccugggcuuuauuaugugggccugccaaaaggggaauaucagauguaacaucugcauuuga

SEQ ID NO: 200324 - RNA, 1701 nt, Artificial Sequence; identical to SEQ ID NO: 199854
  derived and/or modified CDS sequence (opt5) from hemagglutinin__InfluenzaA__AFB77693

SEQ ID NO: 200325 - RNA, 1701 nt, Artificial Sequence
  derived and/or modified CDS sequence (opt5) from hemagglutinin__InfluenzaA__AFB77694
augaagaccaucauugcccugagcuacauccucugccugguguucgcucagaaacuucccggcaacgacaauuccacagccacgcugugucucgggcaccaugcggucccuaacggaaccauuguuaagacaaucgcuaaugaucaaauugaggugaccaacgccacagaacuggugcaaaauucuagcaccggcgagaucugcgacuccccgcaccagauccuugauggggaaaacuguacacugauugacgcccuccugggagauccccagugcgacgauuuucagaauaaaaagugggaccuguucgucgagagaucuaaggcuuauagcaacuguuacccuuaugaugugcccgacuacgccucccuccggucucugguugcuagcuccggcacccuugaauuuaauaacgagagcuucaauuggacgggggugacccagaacggaacaucuuccgccugcauccgcagaagcaauaacuccuuuuucucucggcugaauuggcucacccaucugaacuuuaaguauccugcgcuuaacgucacaaugcccaauaacgagcaguucgauaagcuguacauuuggggcgugcaccauccuggcaccgacaaagaucagaucuuucucuaugcccaagcuagcgggcgcauuacgguuucuacaaagagaucccagcaggccgugaucccgaauauuggaagccggccccgcgucagaaacaucccuucccggaucucuauuuacuggaccaucgugaaacccggcgacauucugcugaucaauagcacagggaaccucauugcuccucgcggauacuucaagaucagauccggcaaaagcucuaucaugcgguccgacgcccccauugggaaguguaauagcgaaugcaucaccccgaacggaucuauuccuaaugauaagcccuuucagaacgugaaucgcaucaccuauggcgcguguccuagauacgucaaacaaaacacacugaaacuugccacgggcaugcggaauguucccgagaaacagacccgcgggauuuucggagcuaucgccggcuuuaucgaaaacgggugggagggaaugguggacggcugguauggguucagacaccagaauagcgagggacggggccaagcugccgaucugaaguccacacaggccgcuauugaccagaucaacggcaaacucaacagacugauugggaagaccaaugaaaaauuccaccagaucgagaaggaauuuucugagguggaaggacgcauucaagaucuugagaaguacgucgaggacacaaaaaucgaucuguggagcuauaacgcggaacuccugguggcccuggagaaucagcauaccauugaccucacggauuccgaaaugaacaagcuguucgagaaaacaaagaaacagcuucgggaaaaugcugaggacaugggcaacgggugcuuuaagaucuaccacaagugugauaauaccugcaucggaagcauuagaaacggcaccuaugaccaugacguuuaccgcgaugaggcccugaauaaccgguuccagaucaaagggguggaacucaagucuggcuacaaagacuggauucuguggaucuccuuugccauuagcugcuuccuucugugugucgcucuccugggauuuaucaugugggccugccaaaagggcaauaucagauguaacauuugcaucuga

SEQ ID NO: 200326 - RNA, 1701 nt, Artificial Sequence
  derived and/or modified CDS sequence (opt5) from hemagglutinin__InfluenzaA__AFB77695
augaagaccaucauugcccugagcuacauccucugccugguguucgcucagaaacuucccggcaacgacaauuccacagccacgcugugucucgggcaccaugcggucccuaacggaaccauuguuaagacaaucaccaaugaucaaauugaggugacaaacgcuaccgaacuggugcaaaauucuagcacaggcgagaucugcgacuccccgcaccagauccuugauggggaaaacuguacccugauugacgcccuccugggagauccccagugcgacgauuuucagaauaaaaagugggaccuguucgucgagagaucuaaagccuauagcaacuguuacccuuaugaugugcccgacuacgcuucccuccggucucugguugccagcuccggcacgcuugaauuuaauaacgagagcuucaauuggaccggggugacacagaacggaaccucuuccgcuugcauccgcagaagcaauaacuccuuuuucucucggcugaauuggcucacacaucugaacuuuaaguauccugcccuuaacgucaccaugcccaauaacgagcaguucgauaagcuguacauuuggggcgugcaccauccuggcacggacaaagaucagaucuuucucuaugcgcaagccagcgggcgcauuacaguuucuaccaagagaucccagcaggcugugaucccgaauauuggaagccggccccgcgucagaaacaucccuucccggaucucuauuuacuggacaaucgugaaacccggcgacauucugcugaucaauagcaccgggaaccucauugccccucgcggauacuucaagaucagauccggcaaaagcucuaucaugcgguccgacgcucccauugggaaguguaauagcgaaugcaucaccccgaacggaucuauuccuaaugauaagcccuuucagaacgugaaucgcaucacauauggcgccuguccuagauacgucaaacaaaacacgcugaaacuugcgaccggcaugcggaauguucccgagaagcagacacgcgggauuuucggagccaucgcuggcuuuaucgaaaacgggugggagggaaugguggacggcugguauggguucagacaccagaauagcgagggacggggccaagccgcugaucugaaguccacccaggccgccauugaccagaucaacggcaaacucaacagacugauugggaagacaaaugaaaaauuccaccagaucgagaaggaauuuucugagguggaaggacgcauucaagaucuugagaaguacgucgaggacaccaaaaucgaucuguggagcuauaacgcugaacuccugguggcgcuggagaaucagcauacgauugaccucacagauuccgaaaugaacaagcuguucgagaaaaccaagaaacagcuucgggaaaaugccgaggacaugggcaacgggugcuuuaagaucuaccacaagugugauaaugcuugcaucggaagcauuagaaacggcaccuaugaccaugacguuuaccgcgaugaggcccugaauaaccgguuccagaucaaagggguggaacucaagucuggcuacaaagacuggauucuguggaucuccuuugccauuagcugcuuccuucugugugucgcucuccugggauuuaucaugugggccugccaaaagggcaauaucagauguaacauuugcaucuga

SEQ ID NO: 200327 - RNA, 1701 nt, Artificial Sequence
  derived and/or modified CDS sequence (opt5) from hemagglutinin__InfluenzaA__AFB78126
augaagaccaucauugcccugagcuacauccucugccugguguucgcucagaaacuucccggcaacgacaauuccacagccacgcugugucucgggcaccaugcggucucuaacggaacccugguuaagacaauuaccaaugaucaaaucgaggugacaaacgcuaccgaacuugugcagagcuccucuacaggcagaauuugcgacagcccucaccagauccuggauggggagaauuguacccucaucgacgcccugcugggagauccgcauugcgacggcuuucagaacaaagaaugggaucucuucgucgagcgguccaaggccuauucuaauuguuaccccuaugacgugccugauuacgcuagccugcgcucccuuguugccagcucugggacgcuggaauuuaacaaugaguccuucaacuggaccggaguggcucaagacggcacaagcucugccugcaaaagacgguccaauaagagcuuuuucucucgccucaacuggcugcaccagcuuaaguauaaauaccccgcgcugaaugucaccaugccuaacaaugagaaguuugauaaacucuauauuuggggcgugcaucaccccuccacagacagcgaucagaucuccauuuacgcccaggcuucugggagaguuaccgugagcacgaagcggucccaacagacagucaucccuaacauuggaagcucuccgugggugcgcggcgccuccagcagaaucucuauuuacuggaccaucgugaaacccggggacauccugcugauuaacagcacaggaaaucucaucgcuccucggggcuauuucaagauucgcuccgggaagucuagcaucaugagauccgacgcccccauuggaaaauguaacagcgaaugcaucaccccuaauggcucuauccccaacgauaagccguuucagaaugucaaccggauuaccuacggcgcguguccucgcuauguuaaacagaauacacugaagcuggccacggggaugagaaacgugcccgagaaacaaacccggggaaucuucggcgcuauugccggguuuaucgaaaauggaugggagggcaugguggacgggugguacggauuccgccaccagaacuccgagggcacaggccaggcugccgaucuuaagagcacccaagccgcuacaaaucagauuaacgggaaacucaauagacugaucgaaaagaccaacgagaaguuucaucagaucgaaaaagaguucucugaagucgagggacggauucaggaccuugagaaguauguggaagauacgaaaaucgaccugugguccuacaaugcggagcuccugguugcccuggaaaaccaacacacaauugaucucaccgacagcgagaugaacaagcuguucgaaagaaccaaaaagcagcuucgcgagaaugcugaggauaugggcaacgggugcuuuaagaucuaucauaaaugugacaaugccugcauuggauccauccggaacggcacauacgaucacgacguguacagagacgaagcccugaauaaccgcuuccagauuaagggggucgagcucaaaucuggcuauaaggauuggauccuguggaucagcuuugcuauuuccugcuuccuucugugugugguucuccugggauuuaucaugugggccugccagaaaggcaauauucgguguaacaucugcauuuga

SEQ ID NO: 200328 - RNA, 1701 nt, Artificial Sequence
  derived and/or modified CDS sequence (opt5) from hemagglutinin__InfluenzaA__AFC34056
augaagaccaucauugcccugagcuacauccucugccugguguucgcucagaaacuucccggcaacgacaauuccacagccacgcugugucucgggcaccaugcggucccuaacggaaccauuguuaagacaaucaccaaugaucaaauugaggugacaaacgcuaccgaacuggugcagucuagcuccacaggcgagaucugcgacucuccgcaccagauccuugauggggaaaauuguacccugauugacgcccuccugggagauccccagugcgacggcuuucaaaacaaaaagugggaucuguucgucgagagaagcaaagccuauuccaauuguuacccuuaugacgugcccgauuacgcuucucuccggagccugguugccuccagcgggacgcuugaauuuaacaaugagucuuucaacuggaccggagugacacagaauggcaccuccagcgcuugcauccgcagaucuaacuccagcuuuuucucucggcugaauuggcucacacaucugaacuuuaaguauccugcccuuaaugucaccaugcccaacaacgagcaguucgacaagcuguacauuuggggcgugcaccauccugggacggauaaagaccagaucuuucucuaugcgcaauccagcggacgcauuacaguuuccaccaagagaucucagcaggccgugaucccgaauauuggcagccggccccgcaucagaaacaucccuucccggauuagcaucuacuggacaauugucaaacccggggauauccugcugauuaauucuaccggaaaccucaucgcuccucgcggcuacuucaagaucagauccgggaaaagcucuauuaugcggagcgacgcccccaucggaaaguguaauuccgaaugcauuaccccgaacggcucuaucccuaaugacaagcccuuucagaacgugaaucgcauuacauauggcgcuuguccuagauacgugaaacaacggacgcugaaacuugccaccgggaugcgcaacguccccgagaagcagacaagaggaaucuucggcgcgaucgccggguuuauugaaaauggaugggagggcaugguugaugggugguauggauuccggcaccagaacagcgagggcagaggccaagcugccgaccugaaguccacccaggcugccaucgaucagauuaaugggaaacucaaccgccugaucggaaagacaaaugaaaaauuccaccagauugagaaggaauuuagcgagguggaaggccggauccaagaccuugagaaguacguggaggauaccaaaauugaccuguggucuuauaacgccgaacuccuggucgcucuggagaaccagcauacgaucgaucucacagacuccgaaaugaauaagcuguucgagaaaaccaagaaacagcuuagagaaaacgcggaggauauggggaauggaugcuuuaagaucuaccacaagugugacaacgccugcauuggcagcauccgcaaugggaccuauaaccaugauguguaccgggacgaggcucugaauaacagauuccagauuaaaggcguugaacucaagucuggauacaaagacuggauccuguggauuuccuuugccaucagcugcuuccuucuguguguggcccuccugggcuuuaucaugugggcuugccaaaaggggaauauucgcuguaacaucugcauuuga

SEQ ID NO: 200329 - RNA, 1701 nt, Artificial Sequence; identical to SEQ ID NO: 200328
  derived and/or modified CDS sequence (opt5) from hemagglutinin__InfluenzaA__AFC34057

SEQ ID NO: 200330 - RNA, 1701 nt, Artificial Sequence
  derived and/or modified CDS sequence (opt5) from hemagglutinin__InfluenzaA__AFD32426
augaaggccaaccugcucgugcugcuuagcgcucuggccgcggcugacgccgauaccaucugcauuggcuaccacgccaauaacuccacagacacggucgauaccguucucgagaaaaaugugacagugacccauucugucaaccugcuugaagacagccacaaugggaagcuguguaaacucagaggaguggcuccccugcaucugggcaagugcaacaucgccgggcggauucucggaaauccugagugugaaucccugucuacagcuagcuccuggucuuauaucguugagaccccgagcuccgauaacggcacaugcuaccccggggacuucauugauuaugaagaacuucgcgagcagcugagcucuguguccagcuuugaaagauucgagaucuuuccuaaaaccucuuccuggcccaaucacgacagcaacaagggagucacggccgcguguccucaugccggcgcuaagucuuucuacaaaaaucucaucuggcuggugaagaaaggcaacuccuaucccaaacuuagcaaguccuacauuaaugauaaggggaaggaaguucuggugcucuggggaauccaccacccuucuaccagcgccgaccaacagucccuguaucagaacgcugauacauacgucuuugugggcagcucucgguacuccaaaaaguucaaaccggagauugccauccgccccaaggugagagaccaggaggggcggaugaauuauuacuggacccuggucgaaccuggagauaaaauuacauuugaggcgaccggcaaccucguugugccccgcuaugccuucgcuauggaaagaaacgccgggagcggaaucauuaucucugacacgccugugcaugacugcaauacaaagugucaaacaccccugggcgcuaucaacagcucccuuccguaccagaauauucacccugucaccaucggcgagugccccaaauaugugcggucugccaagcugcgcaugguuaccgggcucagaaacaccccuagcauucagucccggggacuguuuggcgccaucgcuggguucauugaaggaggcuggacagggaugaucgauggaugguacggcuaucaucaccagaaugagcaaggcagcggguacgcggccgaccagaagucuacgcagaacgcuaucaauggaauuaccaacaaagugaauacagucaucgagaagaugaacauucaguuuaccgccgugggcaaagaguucaauaaacuugagaagcgcauggaaaaccugaauaagaagguugaugacggguuucucgauaucuggacauacaacgccgagcugcuggugcuccuggaaaaugagagaacccuugacuuccacgauuccaacgucaaaaaccuguaugagaaggugaaaagccaacucaagaauaacgcuaaagaaauuggaaauggcuguuucgaguuuuaccauaagugcgacaacgaauguauggagucuguccggaaugggacguaugauuaccccaaguauuccgaagagagcaaacugaaccgcgagaagguggacggcguuaaacuugaauccaugggaaucuaccagauccuggccauuuauucuacaguggcgagcucccucguccugcuggugucucucggcgcuaucagcuucuggaugugcuccaaugggagccugcagugcagaauuuguaucuga

SEQ ID NO: 200331 - RNA, 1698 nt, Artificial Sequence
  derived and/or modified CDS sequence (opt5) from hemagglutinin__InfluenzaA__AFD32427
augaaggccaaccugcucgugcugcuuagcgcucuggccgcggcugacgccgauaccaucugcauuggcuaccacgccaauaacuccacagacacggucgauaccguucucgagaaaaaugugacagugacccauucugucaaccugcuugaagacagccacaaugggaagcugugugaucucgacggagugaaaccccugauccugagagauugcuccguugcuggcuggcuccuggggaacccuaugugugacgaguucauuaaugugccggaauggucuuauaucgucgagaaggccaaccccgugaaugaucuuugcuacccuggagacuuuaacgauuaugaggaacugaaacaucuccugagccggauuaaucacuucgagaagauccagaucauucccaaguccucuuggagcucccaugaagcuagccuuggcguuucuuccgccuguccuuaccaagggaaaagcucuuucuuccgcaacguggucuggcugaucaagaaaaauuccacauaucccaccauuaagagaagcuacaacaauacaaaccaggaggaccuccuggugcuguggggaauccaccacccuaacgaugcggccgaacagaccaaacucuaucagaauccgacgaccuacauuucugugggcacauccacccugaaccaacggcuugucccccgcaucgcuacaagaagcaagguuaauggccaguccgggcggauggaguuuuucuggaccauucugaagccuaacgacgccaucaauuuugagucuaacggaaauuucaucgcucccgaauacgccuauaaaauugugaagaaaggcgacagcacgaucaugaaguccgagcucgaauacgggaacugcaauacaaaaugucagaccccucugggagcgauuaacagcucucuucccuaucagaauauccauccggugacaauuggcgagugcccuaaguacguccgcuccgccaaacugagaauggugaccgggcuccggaacacccccagcauccaaucucgcggacuguuuggcgcuaucgccggcuucauugaagggggauggacaggcaugaucgaugggugguauggauaccaccaucagaaugagcagggcagcggguaugcugccgaccagaaguccacgcaaaacgccauuaauggaaucaccaacaagguuaacacagugauugagaaaaugaauauccaguuuaccgcugucggcaaggaauuuaacaaacuggagaagagaauggaaaaucucaacaaaaagguggaugacggcuuucuggauaucuggacauacaaugcggagcuucugguucuccuggaaaacgagcggacccuugacuuccacgauucuaaugugaagaaccuguacgagaaagucaagagccagcucaaaaauaacgccaaggaaauugggaauggauguuucgaguuuuaucacaaaugcgacaacgaauguauggaguccgugcgcaauggcacguacgauuauccuaaguacagcgaagagucuaagcugaacagagagaaagucgacggggugaagcuggaauccaugggaaucuaucaaauucucgcuaucuacagcacaguugccucuucccuggugcuucuggucagccucggcgccauuuccuucuggaugugcucuaaugggagccugcagugccggaucuguauuuga

SEQ ID NO: 200332 - RNA, 1722 nt, Artificial Sequence
  derived and/or modified CDS sequence (opt5) from hemagglutinin__InfluenzaA__AFD32428
augaagaccaucauugcccugagcuacauccucugccugguguucgcucagaaacuucccggcaacgacaauuccacagccacgcugugucucgggcaccaugcggucccuaacggaaccauuguuaagacaaucaccaaugaucaaauugaggugacaaacgcuaccgaacuggugcagucuagcuccacaggcgagaucugcgaccuugauggggucaaaccgcugauccucagagacuguucuguggccggauggcugcugggcaaucccaugugcgaugaauuuauuaacguuccugaguggagcuauaucguggaaaaggccaaucccgucaacgaccucuguuacccuggggauuucaaugacuaugaggagcugaaacaccuucugucccggauuaaccauuuugaaaagauccagauuauccccaagucuagcugguccagccacgaggcuucucucggaguguccagcgccugcccuuaccagggcaaaucuuccuucuuucgcaauguuguguggcugauuaagaaaaacagcaccuauccgacgaucaagagaucuuacaauaacaccaaucaagaagaucuucugguccucuggggcauccaucaccccaacgacgcugccgagcagacaaaacuguaucagaacccuaccacauacauuuccguggggaccagcacgcugaaucagcggcucgugccccgcaucgcgacaagauccaaggucaacggacaaucuggccggauggaguucuuuuggaccauucugaagccuaaugaugccaucaacuucgaaagcaaugggaacuuuauugcucccgaguacgccuauaaaaucguuaagaaaggagacuccacaaucaugaaaagcgaacuugaguacggcaauuguaacucugaaugcauuaccccgaauggguccaucccuaacgauaagcccuuccagaaugugaaccgcauuaccuauggagcuuguccuagauacgugaagcagaauacacugaaacucgccacgggcaugcggaacguccccgagaagcagacccgcggcaucuuuggggcgauugccggauucaucgagaauggcugggaagggaugguggacggaugguauggcuuuagacaccaaaacagcgaggggcggggacaggcugccgaccugaagucuacacaggcugccaucgaucaaauuaacggcaaacuuaaucgccugaucggcaagaccaacgaaaaauuccaucagauugagaaggaguucagcgaaguugaggggagaauccaggaccucgaaaaauacguggaggauacaaagauugaccugugguccuauaaugccgaacugcucgucgcucuggagaaccagcacaccaucgaucuuacggacucugaaaugaauaagcuguuugagaaaacaaagaaacaacuccgggagaacgcggaagauaugggaaauggcugcuucaagauuuaccauaaaugugacaacgccugcaucgggagcauccgcaauggaaccuacgaucacgacguguauagagaugaggcucugaacaaucgguuucagauuaagggcguugaacuuaaguccggguacaaagacuggauccuguggauuagcuucgccaucucuugcuuucuccuguguguggcccugcucggcuucauuaugugggcuugccagaagggaaacaucagauguaauaucugcauuuga

SEQ ID NO: 200333 - RNA, 1704 nt, Artificial Sequence
  derived and/or modified CDS sequence (opt5) from hemagglutinin__InfluenzaA__AFD32429
augaagaccaucauugcccugagcuacauccucugccugguguucgcucagaaacuucccggcaacgacaauuccacagccacgcugugucucgggcaccaugcggucccuaacggaaccauuguuaagacaaucaccaaugaucaaauugaggugacaaacgcuaccgaacuggugcagucuagcuccacaggcgagaucugcacccaggggaaaagaccgacggaccuuggacaguguggccugcucgggacccugaucggacccccucaaugcgaucaguuucuggaguucgacgccgaucucauuaucgaacggcgcgaaggcacagacgucuguuaucccggcaaguuuaccaaugaggagucucugagacagauucuucgggggagcggaggcaucgauaaagaauccaugggguucacauacucugggauucgcaccaacggcgccacgagcgcuugcagacgguccgggagcucuuuuuaugccgagaugaaguggcugcucuccaauagcgacaacgcugaguucccucagaugacaaagucuuaccgcaaucccagaaacaaaccugcccugaucauuuggggagugcaccauuccggcagcgcgaccgaacaaacaaaacuuuauggcucugggaauaagcugaucaccguuggauccagcaaguaccagcaguccuuuaccccgucucccggcgcccggccucaggugaacgggcaaagcggacgcaucgauuuccacuggcuccugcuggaccccaaugauacagucacguuuaccuucaacggcgcuuuuauugccccugacagagcuuccuucuuucggggagagagccucggagugcagucugauguuccccuggacuccggcuguaauagcgaaugcaucacaccgaacggcucuauuccuaacgacaaacccuuccagaaugugaaccgcaucaccuauggggccuguccuagauacgucaagcaaaauacacuuaagcuggcgaccggaaugcggaacgugcccgagaaacagacgcgcggcauuuucggggccaucgcuggauuuaucgaaaauggcugggaggggaugguggauggcugguacggauucagacaucagaacagcgaaggccgggggcaggccgcugaccucaaguccacacaagccgccauugaucagaucaauggaaaacugaacagacuuauuggcaagaccaaugagaaauuucaccagaucgagaaggaguucucugaagucgaagggcgcauucaggaccuggagaaauauguugaagauaccaagaucgaccucuggagcuacaacgcugagcugcugguggcgcucgagaaucaacacacaaucgaucugaccgacuccgaaaugaacaaacuuuuugagaagacaaagaaacagcugcgggaaaaugccgaggauaugggaaacggcugcuucaagauuuaucauaaaugugacaaugcuugcaucgggagcauuagaaacggcacguacgaucacgacguguaucgcgacgaagcccucaacaaucgguuucagaucaagggagucgagcugaagucuggcuacaaagauuggauucuuuggaucuccuucgccauuagcugcuuucugcucuguguggcucugcugggguucaucaugugggccugccagaagggaaacaucagauguaauauuugcaucuga

SEQ ID NO: 200334 - RNA, 1701 nt, Artificial Sequence; identical to SEQ ID NO: 192145
  derived and/or modified CDS sequence (opt5) from hemagglutinin__InfluenzaA__AFD63527

SEQ ID NO: 200335 - RNA, 1701 nt, Artificial Sequence
  derived and/or modified CDS sequence (opt5) from hemagglutinin__InfluenzaA__AFD63538
augaagaccaucauugcccugagcuacauccucugccugguguucgcucagaaacuucccggcaacgacaauuccacagccacgcugugucucgggcaccaugcggucccuaacggaaccauuguuaagacaaucaccaaugaucaaauugaggugacaaacgcuaccgaacuggugcagucuagcuccacaggcgggaucugcgacucuccgcaccagauccuugauggagagaauuguacccugauugacgcccuccugggcgauccccagugcgacggguuucaaaacaaaaagugggaucuguucgucgaaagaagcaaagccuauuccaauuguuacccuuaugacgugcccgauuacgcuucucuccggagcaucguugccuccagcggaacgcuggaguuuaacaaugaaucuuucaacuggaccggcgugacacagaauggcaccuccagcgcuugcaagcgcaagucuaacaaauccuuuuucagcagacuuaauuggcugacacaucucaaguauaaauacccugcccugaacgucaccaugcccaauaacgagaaguuugacaaacuuuauauuuggggagugcaccauccugggacggauaacgaccagaucucucuguacgcgcaggccuccggccggauuacaguuagcaccaagcgcucccaacagacagugaucccgaauauugggucuagaccccggguccgcgaugugagcuccagaaucagcaucuacuggaccauugugaagccuggagacauccuccugauuaacucuaccggcaaucugaucgcuccccggggguauuucaaaauucgcuccggaaagagcucuaucaugagaagcgacgccccuaucggcaaauguaacuccgagugcauuacacccaauggcucuaucccgaacgauaagccuuuucagaaugucaaccggauuacguacggggcuuguccccgcuauguuaaacagaauacccucaagcuggccacaggaaugagaaacgugccugaaaaacaaacccggggcaucuucggggcgauugccggauuuaucgagaauggcugggaagggaugguggacggaugguacggcuuccgccaccagaacagcgagggcacagggcaggcugccgaucuuaaguccacccaagcugccaucaaucagauuaacggaaagcugaauagacucaucggcaaaacgaacgagaaguuucaccagauugaaaaagaguucagcgaagucgaggggcggauccaggaccuggaaaaguauguggaggauacaaaaauugaccuuuggucuuacaacgccgagcugcucguugcucuggaaaaucaacauaccaucgaucugaccgacuccgagaugaacaaacucuucgaaagaacaaagaagcagcugcgcgagaaugcggaagauaugggaaacggcugcuuuaagauuuaucacaaaugugacaaugccugcaucgggagcauccggaacggcaccuacgaucaugacguguacagagacgaggcucuuaauaaccgcuaucagauuaagggagucgagcugaaaucuggcuacaaggauuggauccucuggauuuccuucgccaucagcugcuuucugcuuuguguggcccugcucggguucauuaugugggcuugccagaagggaaauauccgguguaacaucugcauuuga

SEQ ID NO: 200336 - RNA, 1701 nt, Artificial Sequence
  derived and/or modified CDS sequence (opt5) from hemagglutinin__InfluenzaA__AFD63549
augaagaccaucauugcccugagcuacauccucugccugguguucgcucagaaacuucccggcaacgacaauuccacagccacgcugugucucgggcaccaugcggucccuaacggaaccauuguuaagacaaucaccaaugaucaaauugaggugacaaacgcuaccgaacuggugcagaucucuagcacaggcgggaucugcgacuccccgcaccagauucuugauggagagaauuguacccugaucgacgcccuccugggcgauccccagugcgacggguuucaaaacaaaaagugggaucuguucgucgaaagaucuaaagccuauagcaauuguuacccuuaugacgugcccgauuacgcuucccuccggucucugguugccagcuccggaacgcuugaguuuaacaaugaaucuuucgacuggaccggcgugacacagaacggcaccucuuccgcuugcaagcgcagaagcaauaagagcuuuuucucccggcugaacuggcucacacaucugaaauauaaguacccugcccuuaaugucaccaugcccaacaaugagaaauuugauaagcuguauauuuggggagugcaccauccugggacggacaacgaucagaucagccucuacgcgcaggccucuggccgcauuacaguuuccaccaaaagaagccaacagacagugaucccgaacauugggucccggccccgcgucagagacgugucuagccggaucuccaucuacuggaccauugugaagccuggagacauccugcugauuaauagcaccggcaaccucaucgcuccccgcggguauuucaagauuagaucuggaaaauccagcaucaugcggucugaugccccuaucggcaaguguaauagcgagugcauuacacccaacggcuccaucccgaaugacaaaccuuuucagaacgucaaucgcauuacguacggggcuugucccagauauguuaagcagaacacccugaaacuugccacaggaaugcggaaugugccugaaaagcaaacccgcggcaucuucggggcgauugccggauuuaucgagaacggcugggaagggaugguggauggaugguacggcuucagacaccaaaauucugagggcacagggcaggcugccgaccugaaaagcacccaggcugccaucaaccagauuaauggaaagcucaaccggcugaucggcaagacgaaugagaaauuucaccagauugaaaaggaguucuccgaagucgaggggagaauccaggaucuugaaaaauauguggaggacacaaagauugaucuguggagcuacaacgccgagcuccugguugcucuggaaaaccaacauaccaucgaccucaccgauucugagaugaauaaacuguucgaacgcacaaagaagcagcuucgggagaacgcggaagacaugggaaauggcugcuuuaaaauuuaucacaagugugauaacgccugcaucggguccaucagaaauggcaccuacgaccaugacguguaccgcgaugaggcucugaacaaucgguuccagauuaaaggagucgagcucaagagcggcuauaaagacuggauccuguggauuucuuuugccaucuccugcuuccuucuguguguggcccuccugggguuuauuaugugggcuugccagaagggaaacaucagauguaauaucugcauuuga

SEQ ID NO: 200337 - RNA, 1701 nt, Artificial Sequence; identical to SEQ ID NO: 192145
  derived and/or modified CDS sequence (opt5) from hemagglutinin__InfluenzaA__AFD63571

SEQ ID NO: 200338 - RNA, 1701 nt, Artificial Sequence
  derived and/or modified CDS sequence (opt5) from hemagglutinin__InfluenzaA__AFD63615
augaagaccaucauugcccugagcuacauccucugccugguguucgcucagaaacuucccggcaacgacaauuccacagccacgcugugucucgggcaccaugcggucccuaacggaaccauuguuaagacaaucaccaaugaucaaauugaggugacaaacgcuaccgaacuggugcagucuagcuccacaggcgggaucugcgacucuccgcaccagauccuugauggagagaauuguacccugauugacgcccuccugggcgauccccagugcgacggguuucaaaacaaaaagugggaucuguucgucgaaagaagcaaagccuauuccaauuguuacccuuaugacgugcccgauuacgcuucucuccggagccugguugccuccagcggaacgcuugaguuuaacaaugaaucuuucaacuggaccggcgugacacagaauggcaccuccagcgcuugcaagcgcaagucuaacaaauccuuuuucagcagacugaauuggcucacacaucugaaguauaaauacccugcccuuaacgucaccaugcccaauaacgagaaguuugacaaacuguauaucuggggagugcaccauccugggacggauaacgaccagauuucucucuacgcgcaggccuccggccggaucacaguuagcaccaagcgcucccaacagacagugauuccgaauaucgggucuagaccccggguccgcgaugugagcuccagaauuagcaucuacuggaccaucgugaagccuggagacauucugcugaucaacucuaccggcaaucucauugcuccccggggguauuucaaaauccgcuccggaaagagcucuauuaugagaagcgacgccccuaucggcaaauguaacuccgagugcaucacacccaauggcucuauuccgaacgauaagccuuuucagaaugucaaccggaucacguacggggcuuguccccgcuauguuaaacagaauacccugaaacuugccacaggaaugagaaacgugccugaaaagcaaacccggggcauuuucggggcgaucgccggauuuauugagaauggcugggaagggaugguggacggaugguacggcuuccgccaccagaacagcgagggcacagggcaggcugccgaucugaaguccacccaagcugccaucaaucagaucaacggaaagcucaauagacugauuggcaaaacgaacgagaaguuucaccagaucgaaaaagaguucagcgaagucgaggaacggauucaggaccuugagaaguauguggaggauacaaaaaucgaccuguggucuuacaacgccgaacuccugguugcucuggagaaucaacauaccauugaucucaccgacuccgaaaugaacaagcuguucgagagaacaaagaaacagcuucgcgaaaaugcggaggauauggggaacggaugcuuuaagaucuaucacaaaugugacaaugccugcauuggcagcauccggaacgggaccuacgaucaugacguguacagagacgaggcucugaauaaccgcuuccagaucaagggcgucgaacucaaaucuggauauaaggauuggauucuguggaucuccuuugccauuagcugcuuccuucuguguguggcccuccugggcuuuaucaugugggcuugccagaaggggaauauucgguguaacaucugcaucuga

SEQ ID NO: 200339 - RNA, 1701 nt, Artificial Sequence
  derived and/or modified CDS sequence (opt5) from hemagglutinin__InfluenzaA__AFD63626
augaagaccaucauugcccugagcuacauccucugccugguguucgcucagaaacuucccggcaacgacaauuccacagccacgcugugucucgggcaccaugcggucccuaacggaaccauuguuaagacaaucaccaaugaucaaauugaggugacaaacgcuaccgaacuggugcagaucucuagcacaggcgggaucugcgacuccccgcaccagauucuugauggagagaauuguacccugaucgacgcccuccugggcgauccccagugcgacggguuucaaaacaaaaagugggaucuguucgucgaaagaucuaaagccuauagcaauuguuacccuuaugacgugcccgauuacgcuucccuccggucucugguugccagcuccggaacgcuugaguuuaacaaugaaucuuucgacuggaccggcgugacacagaacggcaccucuuccgcuugcaagcgcagaagcaauaagagcuuuuucucccggcugaacuggcucacacaucugaaauauaaguacccugcccuuaaugucaccaugcccaacaaugagaaauuugauaagcuguauauuuggggagugcaccauccugggacggacagcgaucagaucucucucuacgcgcaggccuccggccgcauuacaguuagcaccaaaagaucccaacagacagugaucccgaacauugggucucggccccgcgucagagacaucagcucccggaucagcauuuacuggaccaucgugaagccuggagacauucugcugaucaacucuaccggcaaucucauugcuccccgcggguauuucaagaucagauccggaaaaagcucuaucaugcggagcgaugccccuauuggcaaguguaacuccgagugcaucacacccaauggcucuauuccgaacgacaaaccuuuucagaaugugaaccgcaucacguacggggcuugucccagauaugucaagcagaauacccugaaacuugccacaggaaugcggaacguuccugaaaagcaaacccgcggcauuuucggggcgaucgccggauuuaucgagaauggcugggaagggaugguggauggaugguacggcuucagacaccagaacagcgagggcacagggcaggcugccgaccugaaauccacccaagcugccauuaaucagaucaacggaaagcucaaucggcugauuggcaagacgaacgagaaauuucaccagaucgaaaaggaguucagcgaaguggaggggcgcauucaggaucuugaaaaauaugucgaggacacaaagaucgaucuguggucuuacaaugccgagcuccugguggcucuggaaaaccaacauaccauugaccucaccgauuccgagaugaacaaacuguucgaaagaacaaagaagcagcuucgggagaaugcggaagacaugggaaacggcugcuuuaaaaucuaucacaagugugauaaugccugcaucgggagcauuagaaacggcaccuacgaccaugacguuuaccgcgaugaggcucugaauaaccgguuccagaucaaaggaguggagcucaagucuggcuauaaagacuggauucuguggaucuccuuugccauuagcugcuuccuucugugugucgcccuccugggguuuaucaugugggcuugccagaagggaaauaucagauguaacauuugcaucuga

SEQ ID NO: 200340 - RNA, 1701 nt, Artificial Sequence
  derived and/or modified CDS sequence (opt5) from hemagglutinin__InfluenzaA__AFD63637
augaagaccaucauugcccugagcuacauccucugccugguguucgcucagaaacuucccggcaacgacaauuccacagccacgcugugucucgggcaccaugcggucccuaacggaaccauuguuaagacaaucaccaaugaucaaauugaggugacaaacgcuaccgaacuggugcagaucucuagcacaggcgggaucugcgacuccccgcaccagauucuugauggagagaauuguacccugaucgacgcccuccugggcgauccccagugcgacggguuucaaaacaaaaagugggaucuguucgucgaaagaucuaaagccuauagcaauuguuacccuuaugacgugcccgauuacgcuucccuccggucucugguugccagcuccggaacgcuugaguuuaacaaugaaucuuucgacuggaccggcgugacacagaacggcaccucuuccacaugcaagcgcagaagcaauaagagcuuuuucucccggcugaacuggcucacccaucugaaauauaaguacccugcucuuaaugucacgaugcccaacaaugagaaauuugauaagcuguauauuuggggagugcaccauccugggacagacagcgaucagaucucucucuacgcccaggcguccggccgcauuaccguuagcacaaaaagaucccaacagaccgugaucccgaacauugggucucggccccgcgucagagacgugagcucccggaucagcaucuacuggaccauugugaagccuggagacauccugcugauuaacucuacaggcaaucucaucgcuccccgcggguauuucaagauuagauccggaaaaagcucuaucaugcggagcgaugccccuaucggcaaguguaacuccgagugcauuacgcccaauggcucuaucccgaacgacaaaccuuuucagaaugucaaccgcauuaccuacggggccugucccagauauguuaagcagaauacacugaaacuugcuaccggaaugcggaacgugccugaaaagcaaacacgcggcaucuucggggccauugcgggauuuaucgagaauggcugggaagggaugguggauggaugguacggcuucagacaccagaacagcgagggcaccgggcaggccgcugaccugaaauccacgcaagccgcuaucaaucagauuaacggaaagcucaaucggcugaucggcaagacaaacgagaaauuucaccagauugaaaaggaguucagcgaagucgaggggagaauccaggaucuugaaaaauauguggaggacaccaagauugaucuguggucuuacaaugccgagcuccugguugcccuggaaaaccaacauaccaucgaccucacagauuccgagaugaacaaacuguucgaacgcaccaagaagcagcuucgggagaaugcugaagacaugggaaacggcugcuuuaaaauuuaucacaagugugauaaugcgugcaucgggagcaucagaaacggcacauacgaccaugacguguaccgcgaugaggcccugaauaaccgguuccagauuaaaggagucgagcucaagucuggcuauaaagacuggauccuguggauuuccuuugcuaucagcugcuuccuucuguguguggcccuccugggguuuauuaugugggccugccagaagggaaauaucagauguaacaucugcauuuga

SEQ ID NO: 200341 - RNA, 1701 nt, Artificial Sequence
  derived and/or modified CDS sequence (opt5) from hemagglutinin__InfluenzaA__AFD63648
augaagaccaucauugcccugagcuacauccucugccugguguucgcucagaaacuucccggcaacgacaauuccauggccacacugugucucgggcaccaugcggucccuaacggaacgauuguuaagaccaucacaaaugaucaaauugaggugaccaacgcuacagaacuggugcagaucucuagcaccggcgggaucugcgacuccccgcaccagauucuugauggagagaauuguacacugaucgacgcccuccugggcgauccccagugcgacggguuucaaaacaaaaagugggaucuguucgucgaaagaucuaaagccuauagcaauuguuacccuuaugacgugcccgauuacgcuucccuccggucucugguugccagcuccggaacccuugaguuuaacaaugaaucuuucgacuggacgggcgugacccagaacggcacaucuuccgcuugcaagcgcagaagcaauaagagcuuuuucucccggcugaacuggcucacccaucugaaauauaaguacccugcccuuaaugucacaaugcccaacaaugagaaauuugauaagcuguauauuuggggagugcaccauccugggaccgacagcgaucagaucucucucuacgcgcaggccuccggccgcauuacgguuagcacaaaaagaucccaacagaccgugaucccgaacauugggucucggccccgcgucagagacgugagcucccggaucagcaucuacuggacaauugugaagccuggagacauccugcugauuaacucuaccggcaaucucaucgcuccccgcggguauuucaagauuagauccggaaaaagcucuaucaugcggagcgaugccccuaucggcaaguguaacuccgagugcauuacccccaauggcucuaucccgaacgacaaaccuuuucagaaugucaaccgcauuacauacggggcuugucccagauauguuaagcagaauacgcugaaacuugccaccggaaugcggaacgugccugaaaagcaaacacgcggcaucuucggggcgauugccggauuuaucgagaauggcugggaagggaugguggauggaugguacggcuucagacaccagaacagcgagggcaccgggcaggcugccgaccugaaauccacacaagcugccaucaaucagauuaacggaaagcucaaucggcugaucggcaagaccaacgagaaauuucaccagauugaaaaggaguucagcgaagucgaggggagaauccaggaucuugaaaaauauguggaggacacgaagauugaucuguggucuuacaaugccgagcuccugguugcucuggaaaaccaacauacaaucgaccucaccgauuccgagaugaacaaacuguucgaacgcaccaagaagcagcuucgggagaaugcggaagacaugggaaacggcugcuuuaaaauuuaucacaagugugauaaugccugcaucgggagcaucagaaacggcacauacgaccaugacguguaccgcgaugaggcucugaauaaccgguuccagauuaaaggagucgagcucaagucuggcuauaaagacuggauccuguggauuuccuuugccaucagcugcuuccuucuguguguggcccuccugggguuuauuaugugggcuugccagaagggaaauaucagauguaacaucugcauuuga

SEQ ID NO: 200342 - RNA, 1701 nt, Artificial Sequence; identical to SEQ ID NO: 192145
  derived and/or modified CDS sequence (opt5) from hemagglutinin__InfluenzaA__AFD63659

SEQ ID NO: 200343 - RNA, 1701 nt, Artificial Sequence
  derived and/or modified CDS sequence (opt5) from hemagglutinin__InfluenzaA__AFD63681
augaagaccaucauugcccugagcuacauccucugccugguguucgcucagaaacuucccggcaacgacaauuccacagccacgcugugucucgggcaccaugcggucccuaacggaaccauuguuaagacaaucaccaaugaucaaauugaggugacaaacgcuaccgaacuggugcagucuagcuccacaggcgggaucugcgacucuccgcaccagauccuugauggagagaauuguacccugauugacgcccuccugggcgauccccagugcgacggguuucaaaacaaaaagugggaucuguucgucgaaagaagcaaagccuauuccaauuguuacccuuaugacgugcccgauuacgcuucucuccggagccugguugccuccagcggaacgcuugaguuuaacaaugaaucuuucaacuggaccggcgugacacagaauggcaccuccagcgcuugcaagcgcaagucuaacaaauccuuuuucagcagacugaauuggcucacacaucugaaguauaaauacccugcccuuaacgucaccaugcccaauaacgagaaguuugacaaacuguauaucuggggagugcaccauccugggacggauaacgaccagauuucucucuacgcgcaggccuccggccggaucacaguuagcaccaagcgcucccaacagacagugauuccgaauaucgggucuagaccccggguccgcgaugugagcuccagaauuagcaucuacuggaccaucgugaagccuggagacauucugcugaucaacucuaccggcaaucucauugcuccccggggguauuucaaaguccgcuccggaaagagcucuaucaugagaagcgacgccccuauuggcaaauguaacuccgagugcaucacacccaauggcucuaucccgaacgauaagccuuuucagaauguuaaccggauuacguacggggcuuguccccgcuaugugaaacagaauacccugaaacuugccacaggaaugagaaacgugccugaaaagcaaacccggggcaucuucggggcgauugccggauuuaucgagaauggcugggaagggauggucgacggaugguacggcuuccgccaccagaacagcgagggcacagggcaggcugccgaucugaaguccacccaagcugccauuaaucagaucaacggaaagcucaauagacugaucggcaaaacgaacgagaaguuucaccagauugaaaaagaguucagcgaaguggaggggcggauccaggaccuugaaaaguauguugaggauacaaaaauugaccuguggucuuacaacgccgagcuccugguggcucuggaaaaucaacauaccaucgaucucaccgacuccgagaugaacaagcuguucgaaagaacaaagaaacagcuucgcgagaaugcggaagauaugggaaacggcugcuuuaagauuuaucacaaaugugacaaugccugcaucgggagcauucggaacggcaccuacgaucaugacgucuacagagacgaggcucugaauaaccgcuuccagaucaagggaguggagcucaaaucuggcuauaaggauuggauccuguggauuuccuuugccaucagcugcuuccuucuguguguugcccuccugggguuuauuaugugggcuugccagaagggaaauauccgguguaacauuugcaucuga

SEQ ID NO: 200344 - RNA, 1701 nt, Artificial Sequence
  derived and/or modified CDS sequence (opt5) from hemagglutinin__InfluenzaA__AFD63692
augaagaccaucauugcccugagcuacauccucugccugguguucgcucagaaacuucccggcaacgacaauuccacagccacgcugugucucgggcaccaugcggucccuaacggaaccauuguuaagacaaucaccaaugaucaaauugaggugacaaacgcuaccgaacuggugcagucuagcuccacaggcgggaucugcgacucuccgcaccagauccuugauggagagaauuguacccugauugacgcccuccugggcgauccccagugcgacggguuucaaaacaaaaagugggaucuguucgucgaaagaagcaaagccuauuccaauuguuacccuuaugacgugcccgauuacgcuucucuccggagccugguugccuccagcggaacgcuugaguuuaacaaugaaucuuucgacuggaccggcgugacacagaacggcaccuccagcgcuugcaagcgcagaucuaauaaguccuuuuucagccggcugaacuggcucacacaucugaaauauaaguacccugcccuuaaugucaccaugcccaacaaugagaaauuugauaagcuguauaucuggggagugcuccacccugggacggacucugaucagauuucccuguacgcgcaggccagcggccgcaucacaguuuccaccaaaagaucucaacagacagugauuccgaacaucgggagccggccccgcgucagagacguguccagccggauuucuaucuacuggaccaucgugaagccuggagacauucugcucaucaacuccaccggcaaucugauugcuccccgcggguauuucaagaucagaagcggaaaaucuagcauuaugcgguccgaugccccuaucggcaaguguaacucugagugcaucacacccaauggcagcauuccgaacgacaaaccuuuucagaaugucaaccgcaucacguacggggcuugucccagauauguuaagcagaauacccuuaaacuggccacaggaaugcggaacgugccugaaaagcaaacccgcggcauuuucggggcgaucgccggauuuauugagaauggcugggaagggaugguggauggaugguacggcuucagacaucagaacuccgagggcacagggcaggcugccgaccucaaaagcacccaagcugccaucaaucagaucaacggaaagcugaaucggcuuauuggcaagacgaacgagaaauuucaccagaucgaaaaggaguucucugaagucgaggggcgcauucaggaucuggaaaaauauguggaggacacaaagaucgaucucugguccuacaaugccgagcugcugguugcucucgaaaaccaacacaccauugaccugaccgauagcgagaugaacaaacuuuucgaaagaacaaagaagcagcugcgggagaaugcggaagacaugggaaacggcugcuuuaaaaucuaucauaagugugauaaugccugcauugggucuaucagaaacggcaccuacgaccacgacguguaccgcgaugaggcucucaauaaccgguuccagaucaaaggagucgagcugaaguccggcuauaaagacuggauucuuuggaucagcuuugccauuuccugcuuccugcucuguguggcccugcugggguuuaucaugugggcuugccagaagggaaauauuagauguaacaucugcaucuga

SEQ ID NO: 200345 - RNA, 1701 nt, Artificial Sequence
  derived and/or modified CDS sequence (opt5) from hemagglutinin__InfluenzaA__AFD63703
augaagaccaucauugcccugagcuacauccucugccugguguucgcucagaaacuucccggcaacgacaauuccacagccacgcugugucucgggcaccaugcggucccuaacggaaccauuguuaagacaaucaccaaugaucaaauugaggugacaaacgcuaccgaacuggugcagaucucuagcacauccggcaucugcgacucuccguaucagauucuugauggggagaauuguacccugaucgacgcccuccugggagauccccagugcgacggcuuucaaaacaaaaagugggaucuguucgucgaaagaagcaaagccuacuccaauuguuauccuuacgacgugcccgauuaugcuucucuccggagccugguugccuccagcgggacgcuugaguuuaacaaugaaucuuucgacuggaccggagugacacagaacggcaccuccagcgcuugcaagcgcagaucuaauaaguccuuuuucagccggcugaacuggcucacacaccugaaauacaaguauccugcccuuaaugucaccaugcccaacaaugagaaauuugauaagcuguacauuuggggcgugcaucacccugggacggacucugaucagaucucccucuacgcgcaggccagcggacgcauuacaguuuccaccaaaagaucucaacagacagugaucccgaacauuggcagccggccccgcgucagagacguguccagccagaucucuaucuauuggaccauugugaagccuggggacauccugcugauuaacuccaccggaaaucucaucgcuccccggggcuacuucaagauucgcagcgggaaaucuagcaucaugagauccgaugccccuaucggaaaguguaacucugagugcauuacacccaauggcagcaucccgaacgacaaaccuuuucagaaugucaaccggauuacguauggcgcuuguccccgcuacguuaagcaaaauacccugaaacuugccacagggaugagaaacgugccugaaaagcagacccggggaaucuucggcgcgauugccggguuuaucgagaauggaugggaaggcaugguggaugggugguauggauuccgccaucagaacuccgagggcacaggccaagcugccgaccugaaaagcacccaggcugccaucaaucagauuaacgggaagcucaauagacugaucggaaagacgaacgagaaauuucaccagauugaaaaggaguucucugaagucgagggccggauccaagaucuugaaaaauacguggaggacacaaagauugaucugugguccuauaaugccgagcuccugguugcucuggaaaaccagcacaccaucgaccucaccgauagcgagaugaacaaacuguucgaaagaacaaagaagcagcuucgcgagaaugcggaagacauggggaacggaugcuuuaaaauuuaccauaagugugauaaugccugcaucggcucuauccggaacgggaccuacgaccacgacguguauagagaugaggcucugaauaaccgcuuccagauuaaaggcgucgagcucaaguccggauacaaagacuggauccuguggauuagcuuugccaucuccugcuuccuucuguguguggcccuccugggcuuuauuaugugggcuugccaaaaggggaauauccgguguaacaucugcauuuga

SEQ ID NO: 200346 - RNA, 1701 nt, Artificial Sequence
  derived and/or modified CDS sequence (opt5) from hemagglutinin__InfluenzaA__AFD63714
augaagaccaucauugcccugagcuacauccucugccugguguucgcucagaaacuucccggcaacgacaauuccacagccacgcugugucucgggcaccaugcggucccuaacggaaccauuguuaagacaaucaccaaugaucaaauugaggugacaaacgcuaccgaacuggugcagaucucuagcacaggcgggaucugcgacuccccgcaccagauucuugauggagagaauuguacccugaucgacgcccuccugggcgauccccagugcgacggguuucaaaacaaaaagugggaucuguucgucgaaagaucuaaagccuauagcaauuguuacccuuaugacgugcccgauuacgcuucccuccggucucugguugccagcuccggaacgcuugaguuuaacaaugaaucuuucgacuggaccggcgugacacagaacggcaccucuuccacaugcaagcgcagaagcaauaagagcuuuuucucccggcugaacuggcucacccaucugaaauauaaguacccugcucuuaaugucacgaugcccaacaaugagaaauuugauaagcuguauauuuggggagugcaccauccugggacagacaacgaucagaucagccucuacgcccaggcgucuggccgcauuaccguuuccacaaaaagaagccaacagaccgugaucccgaacauugggucccggccccgcgucagagacgugucuagccggaucuccaucuacuggaccauugugaagccuggagacauccugcugauuaauagcacaggcaaccucaucgcuccccgcggguauuucaagauuagaucuggaaaauccagcaucaugcggucugaugccccuaucggcaaguguaauagcgagugcauuacgcccaacggcuccaucccgaaugacaaaccuuuucagaacgucaaucgcauuaccuacggggccugucccagauauguuaagcagaacacacugaaacuugcuaccggaaugcggaaugugccugaaaagcaaacacgcggcaucuucggggccauugcgggauuuaucgagaacggcugggaagggaugguggauggaugguacggcuucagacaccaaaauucugagggcaccgggcaggccgcugaccugaaaagcacgcaggccgcuaucaaccagauuaauggaaagcucaaccggcugaucggcaagacaaaugagaaauuucaccagauugaaaaggaguucuccgaagucgaggggagaauccaggaucuugaaaaauauguggaggacaccaagauugaucuguggagcuacaacgccgagcuccugguugcccuggaaaaccaacagaccaucgaccucacagauucugagaugaauaaacuguucgaacgcaccaagaagcagcuucgggagaacgcugaagacaugggaaauggcugcuuuaaaauuuaucauaagugugauaacgcgugcaucggguccaucagaaauggcacauacgaccacgacguguaccgcgaugaggcccugaacaaucgguuccauauuaaaggagucgagcucaagagcggcuauaaagacuggauccuguggauuucuuuugcuaucuccugcuuccuucuguguguggcccuccugggguuuauuaugugggccugccagaagggaaacaucagauguaauaucugcauuuga

SEQ ID NO: 200347 - RNA, 1701 nt, Artificial Sequence
  derived and/or modified CDS sequence (opt5) from hemagglutinin__InfluenzaA__AFD63736
augaagaccaucauugcccugagcuacauccucugccugguguucgcucagaaacuucccggcaacgacaauuccacagccacgcugugucucgggcaccaugcggucccuaacggaaccauuguuaagacaaucaccaaugaucaaauugaggugacaaacgcuaccgaacuggugcagaucucuagcacaggcgggaucugcgacuccccgcaccagauucuugauggagagaauuguacccugaucgacgcccuccugggcgauccccagugcgacggguuucaaaacaaaaagugggaucuguucgucgaaagaucuaaagccuauagcaauuguuacccuuaugacgugcccgauuacgcuucccuccggucucugguugccagcuccggaacgcuugaguuuaacaaugaaucuuucgacuggaccggcgugacacagaacggcaccucuuccacaugcaagcgcagaagcaauaagagcuuuuucucccggcugaacuggcucacccaucugaaauauaaguacccugcucuuaaugucacgaugcccaacaaugagaaauuugauaagcuguauauuuggggagugcaccauccugggacagacaacgaucagaucagccucuacgcccaggcgucuggccgcauuaccguuuccacaaaaagaagccaacagaccgugaucccgaacauugggucccggccccgcgucagagacgugucuagccggaucuccaucuacuggaccauugugaagccuggagacauccugcugauuaauagcacaggcaaccucaucgcuccccgcggguauuucaagauuagaucuggaaaauccagcaucaugcggucugaugccccuaucggcaaguguaauagcgagugcauuacgcccaacggcuccaucccgaaugacaaaccuuuucagaacgucaaucgcauuaccuacggggccugucccagauauguuaagcagaacacacugaaacuugcuaccggaaugcggaaugugccugaaaagcaaacacgcggcaucuucggggccauugcgggauuuaucgagaacggcugggaagggaugguggauggaugguacggcuucagacaccaaaauucugagggcaccgggcaggccgcugaccugaaaagcacgcaggccgcuaucaaccagauuaauggaaagcucaaccggcugaucggcaagacaaaugagaaauuucaccagauugaaaaggaguucuccgaagucgaggggagaauccaggaucuugaaaaauauguggaggacaccaagauugaucuguggagcuacaacgccgagcuccugguugcccuggaaaaccaacauaccaucgaccucacagauucugagaugaauaaacuguucgaacgcaccaagaagcagcuucgggagaacgcugaagacaugggaaauggcugcuuuaaaauuuaucacaagugugauaacgcgugcaucggguccaucagaaauggcacauacgaccaugacguguaccgcgaugaggcccugaacaaucgguuccacauuaaaggagucgagcucaagagcggcuauaaagacuggauccuguggauuucuuuugcuaucuccugcuuccuucuguguguggcccuccugggguuuauuaugugggccugccagaagggaaacaucagauguaauaucugcauuuga

SEQ ID NO: 200348 - RNA, 1701 nt, Artificial Sequence
  derived and/or modified CDS sequence (opt5) from hemagglutinin__InfluenzaA__AFD63747
augaagaccaucauugcccugagcuacauccucugccugguguucgcucagaaacuucccggcaacgacaauuccacagccacgcugugucucgggcaccaugcggucccuaacggaaccauuguuaagacaaucaccaaugaucaaauugaggugacaaacgcuaccgaacuggugcagucuagcuccacaggcgggaucugcgacucuccgcaccagauccuugauggagagaauuguacccugauugacgcccuccugggcgauccccagugcgacggguuucaaaacaaaaagugggaucuguucgucgaaagaagcaaagccuauuccaauuguuacccuuaugacgugcccgauuacgcuucucuccggagccugguugccuccagcggaacgcuugaguuuaacaaugaaucuuucgacuggaccggcgugacacagaacggcaccuccagcgcuugcaagcgcagaucuaauaaguccuuuuucagccggcugaacuggcucacacaucugaaauauaaguacccugcccuuaaugucaccaugcccaacaaugagaaauuugauaagcuguauaucuggggagugcaccauccugggacggacucugaucagauuucccucuacgcgcaggccagcggccgcaucacaguuuccaccaaaagaucucaacagacagugauuccgaacaucgggagccggccccgcgucagagacguguccagccggauuucuaucuacuggaccaucgugaagccuggagacauucugcugaucaacuccaccggcaaucucauugcuccccgcggguauuucaagaucagaagcggaaaaucuagcauuaugcgguccgaugccccuaucggcaaguguaacucugagugcaucacacccaauggcagcauuccgaacgacaaaccuuuucagaaugucaaccgcaucacguacggggcuugucccagauauguuaagcagaauacccugaaacuugccacaggaaugcggaacgugccugaaaagcaaacccgcggcauuuucggggcgaucgccggauuuauugagaauggcugggaagggaugguggauggaugguacggcuucagacaccagaacuccgagggcacagggcaggcugccgaccugaaaagcacccaagcugccaucaaucagaucaacggaaagcucaaucggcugauuggcaagacgaacgagaaauuucacagaaucgaaaaggaguucucugaagucgaggggcgcauucaggaucuugaaaaauauguggaggacacaaagaucgaucugugguccuacaaugccgagcuccugguugcucuggaaaaccagcauaccauugaccucaccgauagcgagaugaacaaacuguucgaacggacaaagaagcaacuuagagagaaugcggaagacaugggaaacggcugcuuuaaaaucuaucacaagugugauaaugccugcauugggucuauccgcaacggcaccuacgaccaugacguguaccgggaugaggcucugaauaacagauuccagaucaaaggagucgagcucaaguccggcuauaaagacuggauucuguggaucagcuuugccauuuccugcuuccuucuguguguggcccuccugggguuuaucaugugggcuugccagaagggaaauauucgcuguaacaucugcaucuga

SEQ ID NO: 200349 - RNA, 1701 nt, Artificial Sequence
  derived and/or modified CDS sequence (opt5) from hemagglutinin__InfluenzaA__AFD63758
augaagaccaucauugcccugagcuacauccucugccugguguucgcucagaaacuucccggcaacgacaauuccacagccacgcugugucucgggcaccaugcggucccuaacggaaccauuguuaagacaaucaccaaugaucaaauugaggugacaaacgcuaccgaacuggugcagucuagcuccacaggcgggaucugcgacucuccgcaccagauccuugauggagagaauuguacccugauugacgcccuccugggcgauccccagugcgacggguuucaaaacaaaaagugggaucuguucgucgaaagaagcaaagccuauuccaauuguuacccuuaugacgugcccgauuacgcuucucuccggagccugguugccuccagcggaacgcuugaguuuaacaaugaaucuuucaacuggaccggcgugacacagaauggcaccuccagcgcuugcaagcgcaagucuaacaaauccuuuuucagcagacugaauuggcucacacaucugaaguauaaauacccugcccuuaacgucaccaugcccaauaacgagaaguuugacaaacuguauaucuggggagugcaccauccugggacggauaacgaccagauuucucucuacgcgcaggccuccggccggaucacaguuagcaccaagcgcucccaacagacagugauuccgaauaucgggucuagaccccggguccgcgaugugagcuccagaauuagcaucuacuggaccaucgugaagccuggagacauucugcugaucaacucuaccggcaaucucauugcuccccggggguauuucaaaauccgcuccggaaagagcucuauuaugagaagcgacgccccuaucggcaaauguaacuccgagugcaucacacccaauggcucuauuccgaacgauaagccuuuucagaaugucaaccggaucacguacggggcuuguccccgcuauguuaaacagaauacccugaaacuugccacaggaaugagaaacgugccugaaaagcaaacccggggcauuuucggggcgaucgccggauuuauugagaauggcugggaagggaugguggacggaugguacggcuuccgccaccagaacagcgagggcacagggcaggcugccgaucugaaguccacccaagcugccaucaaucagaucaacggaaagcucaauagacugauuggcaaaacgaacgagaaguuucaccagaucgaaaaagaguucagcgaagucgaggggcggauucaggaccuugaaaaguauguggaggauacaaaaaucgaccuguggucuuacaacgccgagcuccugguugcucuggaaaaucaacauaccauugaucucaccgacuccgagaugaacaagcuguucgaaagaacaaagaaacagcuucgcgagaaugcggaagauaugggaaacggcugcuuuaagaucuaucacaaaugugacaaugccugcauugggagcauccggaacggcaccuacgaucaugacguguacagagacgaggcucugaauaaccgcuuccagaucaagggagucgagcucaaaucuggcuauaaggauuggauucuguggaucuccuuugccauuagcugcuuccuucuguguguggcccuccugggguuuaucaugugggcuugccagaagggaaauauucgguguaacaucugcaucuga

SEQ ID NO: 200350 - RNA, 1701 nt, Artificial Sequence
  derived and/or modified CDS sequence (opt5) from hemagglutinin__InfluenzaA__AFD63769
augaagaccaucauugcccugagcuacauccucugccugguguucgcucagaaacuucccggcaacgacaauuccacagccacgcugugucucgggcaccaugcggucccuaacggaaccauuguuaagacaaucaccaaugaucaaauugaggugacaaacgcuaccgaacuggugcagaucucuagcacaggcgggaucugcgacuccccgcaccagauucuugauggagagaauuguacccugaucgacgcccuccugggcgauccccagugcgacggguuucaaaacaaaaagugggaucuguucgucgaaagaucuaaagccuauagcaauuguuacccuuaugacgugcccgauuacgcuucccuccggucucugguugccagcuccggaacgcuugaguuuaacaaugaaucuuucgacuggaccggcgugacacagaacggcaccucuuccgcuugcaagcgcagaagcaauaagagcuuuuucucccggcugaacuggcucacacaucugaaauauaaguacccugcccuuaaugucaccaugcccaacaaugagaaauuugauaagcuguauauuuggggagugcaccauccugggacggacaacgaucagaucagccucuacgcgcaggccucuggccgcauuacaguuuccaccaaaagaagccaacagacagugaucccgaacauugggucccggccccgcgucagagacgugucuagccggaucuccaucuacuggaccauugugaagccuggagacauccugcugauuaauagcaccggcaaccucaucgcuccccgcggguauuucaagauuagaucuggaaaauccagcaucaugcggucugaugccccuaucggcaaguguaauagcgagugcauuacacccaacggcuccaucccgaaugacaaaccuuuucagaacgucaaucgcauuacguacggggcuugucccagauauguuaagcagaacacccugaaacuugccacaggaaugcggaaugugccugaaaagcaaacccgcggcaucuucggggcgauugccggauuuaucgagaacggcugggaagggaugguggauggaugguacggcuucagacaccaaaauucugagggcacagggcaggcugccgaccugaaaagcacccaggcugccaucaaccagauuaauggaaagcucaaccggcugaucggcaagacgaaugagaaauuucaccagauugaaaaggaguucuccgaagucgaggggagaauccaggaucuugaaaaauauguggaggacacaaagauugaucuguggagcuacaacgccgagcuccugguugcucuggaaaaccaacauaccaucgaccucaccgauucugagaugaauaaacuguucgaacgcacaaagaagcagcuucgggagaacgcggaagacaugggaaauggcugcuuuaaaauuuaucacaagugugauaacgccugcaucggguccaucagaaauggcaccuacgaccaugacguguaccgcgaugaggcucugaacaaucgguuccacauuaaaagcgucgagcucaagucuggauauaaagacuggauccuguggauuuccuuugccaucagcugcuuccuucuguguguggcccuccugggcuuuauuaugugggcuugccagaaggggaacaucagauguaauaucugcauuuga

SEQ ID NO: 200351 - RNA, 1701 nt, Artificial Sequence; identical to SEQ ID NO: 192145
  derived and/or modified CDS sequence (opt5) from hemagglutinin__InfluenzaA__AFD63780

SEQ ID NO: 200352 - RNA, 1701 nt, Artificial Sequence; identical to SEQ ID NO: 200349
  derived and/or modified CDS sequence (opt5) from hemagglutinin__InfluenzaA__AFD63791

SEQ ID NO: 200353 - RNA, 1701 nt, Artificial Sequence; identical to SEQ ID NO: 192145
  derived and/or modified CDS sequence (opt5) from hemagglutinin__InfluenzaA__AFD63802

SEQ ID NO: 200354 - RNA, 1701 nt, Artificial Sequence
  derived and/or modified CDS sequence (opt5) from hemagglutinin__InfluenzaA__AFD63813
augaagaccaucauugcccugagcuacauccucucccugguguucgcucagaaauuucccggcaacgacaauucuacagccacgcuuugccuggggcaccaugcggucccuaacggaaccauuguuaagacaaucaccaaugaucaaauugaggugacaaacgcuaccgaacucgugcagaucagcuccacaggcgggaucugugacucuccgcaccagauucuggauggagagaauugcacccuuaucgacgcccugcucggcgauccccagugugacggguuccaaaacaaaaagugggaucuguuugucgaaagaagcaaagccuauuccaauugcuacccuuaugacgugcccgauuacgcuucucugcggagccucguugccuccagcggaucucuggaguucaacaaugaauccuuugacuggacgggcgugacccagaacggcacaagcucugcuuguaagcgcagauccaauaagagcuucuuuucucggcuuaacuggcugacccaucucaaauauaaguacccugcccugaaugucacaaugcccaacaaugagaaauucgauaagcuguauauuuggggagugcaccauccugggaccgacuccgaucagaucagccuguacgcgcaggccuccggccgcauuacgguuucuacaaaaagaagccaacagaccgugaucccgaacauugggucccggccccgcgucagagacaucagcucucggaucuccauuuacuggacaaucgugaagccuggagacauucuccugaucaacagcaccggcaaucugauugcuccccgcggguauuuuaagaucagaucuggaaaaagcuccaucaugcggucugaugccccuauuggcaagugcaacagcgaguguaucacccccaauggcuccauuccgaacgacaaaccuuuccagaaugugaaccgcaucacauacggggcuugccccagauaugucaagcagaauacgcucaaacuggccaccggaaugcggaacguuccugaaaagcaaacacgcggcauuuuuggggcgaucgccggauucaucgagaauggcugggaagggaugguggauggaugguacggcuuuagacaccagaacagcgagggcaccgggcaggcugccgaccuuaaaucuacacaagcugccauuaaucagaucaacggaaagcugaaucggcucauuggcaagaccaacgagaaauuccaccagaucgaaaaggaguucuccgaaguggaggggcgcauucaggaucuggaaaaauaugucgaggacacgaagaucgaucuuuggagcuacaaugccgagcugcucguggcucuggaaaaccaacauacaauugaccugaccgauucugagaugaacaaacucuuugaaagaaccaagaagcagcugcgggagaaugcggaagacaugggaaacggcuguuucaaaaucuaucacaagugcgauaaugccuguaucggguccauuagaaacggcacauacgaccaugacguuuaccgcgaugaggcucuuaauaaccgguuucagaucaaaggaguggagcuuaagagcggcuauaaagacuggauucucuggaucuccuucgccaccucuugcuuucugcuuugcgucgcccugcucggguucauuaugugggcuugucagaagggaaauaucagaugcaacaucuguauuuga

SEQ ID NO: 200355 - RNA, 1701 nt, Artificial Sequence; identical to SEQ ID NO: 200339
  derived and/or modified CDS sequence (opt5) from hemagglutinin__InfluenzaA__AFD63824

SEQ ID NO: 200356 - RNA, 1701 nt, Artificial Sequence; identical to SEQ ID NO: 192145
  derived and/or modified CDS sequence (opt5) from hemagglutinin__InfluenzaA__AFD63846

SEQ ID NO: 200357 - RNA, 1701 nt, Artificial Sequence; identical to SEQ ID NO: 193383
  derived and/or modified CDS sequence (opt5) from hemagglutinin__InfluenzaA__AFD63857

SEQ ID NO: 200358 - RNA, 1701 nt, Artificial Sequence; identical to SEQ ID NO: 192145
  derived and/or modified CDS sequence (opt5) from hemagglutinin__InfluenzaA__AFD63868

SEQ ID NO: 200359 - RNA, 1701 nt, Artificial Sequence; identical to SEQ ID NO: 192145
  derived and/or modified CDS sequence (opt5) from hemagglutinin__InfluenzaA__AFD63890

SEQ ID NO: 200360 - RNA, 1701 nt, Artificial Sequence; identical to SEQ ID NO: 192145
  derived and/or modified CDS sequence (opt5) from hemagglutinin__InfluenzaA__AFD63901

SEQ ID NO: 200361 - RNA, 1701 nt, Artificial Sequence; identical to SEQ ID NO: 192145
  derived and/or modified CDS sequence (opt5) from hemagglutinin__InfluenzaA__AFD63912

SEQ ID NO: 200362 - RNA, 1701 nt, Artificial Sequence
  derived and/or modified CDS sequence (opt5) from hemagglutinin__InfluenzaA__AFD63923
augaagaccaucauugcccugagcuacauccucugccugguguucgcucagaaacuucccggcaacgacaauuccacagccacgcugugucucgggcaccaugcggucccuaacggaaccauuguuaagacaaucaccaaugaucaaauugaggugacaaacgcuaccgaacuggugcagucuagcuccacaggcgggaucugcgacucuccgcaccagauccuugauggagagaauuguacccugauugacgcccuccugggcgauccccagugcgacggguuucaaaacaaaaagugggaucuguucgucgaaagaagcaaagccuauuccaauuguuacccuuaugacgugcccgauuacgcuucucuccggagccugguugccuccagcggaacgcuugaguuuaacaaugaaucuuucaacuggaccggcgugacacagaauggcaccuccagcgcuugcaagcgcaagucuaacaaauccuuuuucagcagacugaauuggcucacacaucugaaguauaaauacccugcccuuaacgucaccaugcccaauaacgagaaguuugacaaacuguauaucuggggagugcaccauccugggacggauaacgaccagauuucucucuacgcgcaggccuccggccggaucacaguuagcaccaagcgcucccaacagacagugauuccgaauaucgggucuagaccccggguccgcgauauuagcuccagaaucagcaucuacuggaccauugugaagccuggagacauccugcugauuaacucuaccggcaaucucaucgcuccccggggguauuucaaaauucgcuccggaaagagcucuaucaugagaagcgacgccccuaucggcaaauguaacuccgagugcauuacacccaauggcucuaucccgaacgauaagccuuuucagaaugugaaccggauuacguacggggcuuguccccgcuaugucaaacagaauacccugaaacuugccacaggaaugagaaacguuccugaaaagcaaacccggggcaucuucggggcgauugccggauuuaucgagaauggcugggaagggaugguggacggaugguacggcuuccgccaccagaacagcgagggcacagggcaggcugccgaucugaaguccacccaagcugccaucaaucagauuaacggaaagcucaauagacugaucggcaaaacgaacgagaaguuucaccagauugaaaaagaguucagcgaaguggaggggcggauccaggaccuugaaaaguaugucgaggauacaaaaauugaccuguggucuuacaacgccgagcuccugguggcucuggaaaaucaacauaccaucgaucucaccgacuccgagaugaacaagcuguucgaaagaacaaagaaacagcuucgcgagaaugcggaagauaugggaaacggcugcuuuaagauuuaucacaaaugugacaaugccugcaucgggagcauccggaacggcaccuacgaucaugacguuuacagagacgaggcucugaauaaccgcuuccagauuaagggaguggagcucaaaucuggcuauaaggauuggauccuguggauuuccuuugccaucagcugcuuccuucugugugucgcccuccugggguuuauuaugugggcuugccagaagggaaauauccgguguaacaucugcauuuga

SEQ ID NO: 200363 - RNA, 1701 nt, Artificial Sequence
  derived and/or modified CDS sequence (opt5) from hemagglutinin__InfluenzaA__AFD63934
augaagaccaucauugcccugagcuacauccucugccugguguucgcucagaaacuucccggcaacgacaauuccacagccacgcugugucucgggcaccaugcggucccuaacggaaccauuguuaagacaaucaccaaugaucaaauugaggugacaaacgcuaccgaacuggugcagucuagcuccacaggcgggaucugcgacucuccgcaccagauccuugauggagagaauuguacccugauugacgcccuccugggcgauccccagugcgacggguuucaaaacaaaaagugggaucuguucgucgaaagaagcaaagccuauuccaauuguuacccuuaugacgugcccgauuacgcuucucuccggagccugguugccuccagcggaacgcuugaguuuaacaaugaaucuuucgacuggaccggcgugacacagaacggcaccuccagcgcuugcaagcgcagaucuaauaaguccuuuuucagccggcugaacuggcucacacaucugaaauauaaguacccugcccuuaaugucaccaugcccaacaaugagaaauuugauaagcuguauaucuggggagugcaccauccugggacggagucugaccagauuucccucuacgcgcaggccagcggccgcaucacaguuuccaccaaaagaucucaacagacagugauuccgaacaucgggagccggccccgcgucagagauguguccagccggauuucuaucuacuggaccguggucaagccuggagacauccugcugauuaacuccaccggcaaucucaucgcuccccgcggguauuucaagauuagaagcggaaaaucuagcaucaugcgguccgacgccccuauuggcaaguguaacucugaaugcaucacacccaauggcagcaucccgaacgauaaaccuuuucagaauguuaaccgcauuacguacggggcuugucccagauaugugaagcagaauacccugaaacuugccacaggaaugcggaacgugccugagaagcaaacccgcggcaucuucggggcgauugccggauuuaucgaaaauggcugggaggggauggucgacggaugguacggcuucagacaccagaacuccgagggcacagggcaggcugccgaucugaaaagcacccaagcugccauuaaucagaucaacggaaagcucaaucggcugaucggcaagacgaacgaaaaauuucaccagauugagaaggaguucucugaaguggaagggagaauccaggaccuugagaaauauguugaggauacaaagauugaccugugguccuacaaugccgaacuccugguggcucuggagaaccaacauaccaucgaucucaccgacagcgaaaugaacaaacuguucgagcgcacaaagaagcagcuucgggaaaaugcggaggauaugggaaacggcugcuuuaaaauuuaucacaagugugacaaugccugcaucgggucuauuagaaacggcaccuacgaucaugacgucuaccgcgacgaggcucugaauaaccgguuccagaucaaaggaguggaacucaaguccggcuauaaagauuggauccuguggauuagcuuugccaucuccugcuuccuucuguguguugcccuccugggguuuauuaugugggcuugccagaagggaaauaucagauguaacauuugcaucuga

SEQ ID NO: 200364 - RNA, 1701 nt, Artificial Sequence; identical to SEQ ID NO: 200339
  derived and/or modified CDS sequence (opt5) from hemagglutinin__InfluenzaA__AFD63945

SEQ ID NO: 200365 - RNA, 1701 nt, Artificial Sequence; identical to SEQ ID NO: 200339
  derived and/or modified CDS sequence (opt5) from hemagglutinin__InfluenzaA__AFD63956

SEQ ID NO: 200366 - RNA, 1701 nt, Artificial Sequence; identical to SEQ ID NO: 200339
  derived and/or modified CDS sequence (opt5) from hemagglutinin__InfluenzaA__AFD63967

SEQ ID NO: 200367 - RNA, 1701 nt, Artificial Sequence; identical to SEQ ID NO: 192145
  derived and/or modified CDS sequence (opt5) from hemagglutinin__InfluenzaA__AFD63989

SEQ ID NO: 200368 - RNA, 1701 nt, Artificial Sequence; identical to SEQ ID NO: 192145
  derived and/or modified CDS sequence (opt5) from hemagglutinin__InfluenzaA__AFD64000

SEQ ID NO: 200369 - RNA, 1701 nt, Artificial Sequence
  derived and/or modified CDS sequence (opt5) from hemagglutinin__InfluenzaA__AFD64011
augaagaccaucauugcccugagcuacauccucugccugguguucgcucagaaacuucccggcaacgacaauuccacagccacgcugugucucgggcaccaugcggucccuaacggaaccauuguuaagacaaucaccaaugaucaaauugaggugacaaacgcuaccgaacuggugcagucuagcuccacaggcgggaucugcgacucuccgcaccagauccuugauggagagaauuguacccugauugacgcccuccugggcgauccccagugcgacggguuucaaaacaaaaagugggaucuguucgucgaaagaagcaaagccuauuccaauuguuacccuuaugacgugcccgauuacgcuucucuccggagccugguugccuccagcggaacgcuugaguuuaacaaugaaucuuucgacuggaccggcgugacacagaacggcaccuccagcgcuugcaagcgcagaucuaauaaguccuuuuucagccggcugaacuggcucacacaucugaaauauaaguacccugcccuuaaugucaccaugcccaacaaugagaaauuugauaagcuguauaucuggggagugcaccauccugggacggacucugaucagauuucccucuacgcgcaggccccgggcaaaaucacaguuagcaccaagcgcucccaacagacagugauucccaacaucgggucuagaccucggguccgcgacgugagcuccagaauuagcaucuacuggaccaucgugaagcccggagacauucugcugaucaacucuaccggcaaucucauugcuccucggggguauuucaaaauccgcuccggaaagagcucuauuaugagaagcgaugcccccaucggcaaauguaacuccgagugcaucacaccgaauggcucuauuccuaacgacaagcccuuucagaaugucaaccggaucacguacggggcuuguccucgcuauguuaaacagaauacccugaaacuugccacaggaaugagaaacgugcccgaaaagcaaacccggggcauuuucggggcgaucgccggauuuauugagaauggcugggaagggaugguggauggaugguacggcuuccgccaccagaacagcgagggcacagggcaggcugccgaccugaaguccacccaagcugccaucaaucagaucaacggaaagcucaauagacugauuggcaaaacgaacgagaaguuucaccagaucgaaaaagaguucagcgaagucgaggggcggauucaggaucuugaaaaguauguggaggacacaaaaaucgaucuguggucuuacaaugccgagcuccugguugcucuggaaaaccaacauaccauugaccucaccgauuccgagaugaacaagcuguucgaaagaacaaagaaacagcuucgcgagaaugcggaagacaugggaaacggcugcuuuaagaucuaucacaaaugugauaaugccugcauugggagcauccggaacggcaccuacgaccaugacguguacagagaugaggcucugaauaaccgcuuccagaucaagggagucgagcucaaaucuggcuauaaggacuggauucuguggaucuccuuugccauuagcugcuuccuucuguguguggcccuccugggguuuaucaugugggcuugccagaagggaaauauucggugugauaucugcaucuga

SEQ ID NO: 200370 - RNA, 1701 nt, Artificial Sequence; identical to SEQ ID NO: 192145
  derived and/or modified CDS sequence (opt5) from hemagglutinin__InfluenzaA__AFD64022

SEQ ID NO: 200371 - RNA, 1701 nt, Artificial Sequence; identical to SEQ ID NO: 192145
  derived and/or modified CDS sequence (opt5) from hemagglutinin__InfluenzaA__AFD64033

SEQ ID NO: 200372 - RNA, 1701 nt, Artificial Sequence
  derived and/or modified CDS sequence (opt5) from hemagglutinin__InfluenzaA__AFD64044
augaagaccaucauugcccugagcuacauccucugccugguguucgcucagaaacuucccggcaacgaaaauuccacagccacgcugugucucgggcaccaugcggucccuaacggaaccauuguuaagacaaucaccaaugaccaaauugaagugacaaacgcuaccgagcuggugcagucuagcuccacaggcgggaucugcgauucuccgcaccagauccuugacggagaaaauuguacccugauugaugcccuccugggcgacccccagugcgauggguuucaaaacaaaaagugggaccuguucgucgagagaagcaaagccuauuccaauuguuacccuuaugaugugcccgacuacgcuucucuccggagccugguugccuccagcggaacgcuugaauuuaacaaugagucuuucgauuggaccggcgugacacagaacggcaccuccagcgcuugcaagcgcagaucuaauaaguccuuuuucagccggcugaacuggcucacacaucugaaauauaaguacccugcccuuaaugucaccaugcccaacaaugagaaauuugacaagcuguauaucuggggagugcaccauccugggacggauucugaccagauuucccucuacgcgcaggccagcggccgcaucacaguuuccaccaaaagaucucaacagacagugauuccgaacaucgggagccggccccgcgucagagauguguccagccggauuucuaucuacuggaccaucgugaagccuggagacauucugcugaucaacuccaccggcaaucucauugcuccccgcggguauuucaagaucagaagcggaaaaucuagcauuaugcgguccgacgccccuaucggcaaguguaacucugaaugcaucacacccaauggcagcauuccgaacgauaaaccuuuucagaaugucaaccgcaucacguacggggcuugucccagauauguuaagcagaauacccugaaacuugccacaggaaugcggaacgugccugagaagcaaacccgcggcauuuucggggcgaucgccggauuuauugaaaauggcugggaggggaugguggacggaugguacggcuucagacaccagaacuccgagggcacagggcaggcugccgaucugaaaagcacccaagcugccaucaaucagaucaacggaaagcucaaucggcugauuggcaagacgaacgaaaaauuucaccagaucgagaaggaguucucugaggucgaagggcgcauucaggaccuugagaaauauguggaggauacaaagaucgaccugugguccuacaaugccgaacuccugguugcucuggagaaccaacauaccauugaucucaccgacagcgaaaugaacaaacuguucgagagaacaaagaagcagcuucgggaaaaugcggaggauaugggaaacggcugcuuuaaaaucuaucacaagugugacaaugccugcauugggucuaucagaaacggcaccuacgaucaugacguguaccgcgacgaggcucugaauaaccgguuccagaucaaaggagucgaacucaaguccggcuauaaagauuggauucuguggaucagcuuugccauuuccugcuuccuucuguguguggcccuccugggguuuaucaugugggcuugccagaagggaaauauuagauguaacaucugcaucuga

SEQ ID NO: 200373 - RNA, 1701 nt, Artificial Sequence; identical to SEQ ID NO: 200349
  derived and/or modified CDS sequence (opt5) from hemagglutinin__InfluenzaA__AFD64055

SEQ ID NO: 200374 - RNA, 1701 nt, Artificial Sequence
  derived and/or modified CDS sequence (opt5) from hemagglutinin__InfluenzaA__AFD64066
augaagaccaucauugcccugagcuacauccucugccugguguucgcucagaaacuucccggcaacgacaauuccacagccacgcugugucucgggcaccaugcggucccuaacggaaccauuguuaagacaaucaccaaugaucaaauugaggugacaaacgcuaccgaacuggugcagucuagcuccacaggcgggaucugcgacucuccgcaccagauccuugauggagagaauuguacccugauugacgcccuccugggcgauccccagugcgacggguuucaaaacaaaaagugggaucuguucgucgaaagaagcaaagccuauuccaauuguuacccuuaugacgugcccgauuacacgucucuccggagccugguugcuuccagcggaacccuugaguuuaacaaugaaucuuucaacuggacaggcgugacccagaauggcacauccagcgccugcaagcgcagaucuaacaaguccuuuuucagccggcugaauuggcucacccaucugaaauuuaaguauccugcucuuaacgucacgaugcccaauaacgagaaauucgacaagcuguacaucuggggagugcaccauccugggacagauaacgaccagauuucucucuaugcccaggcguccggccgcaucaccguuagcacaaaaagaucccaacagaccgugauuccgaauaucgggucucggccccgcgucagagaugugccuagccggauuuccaucuacuggaccaucgugaagcccggagacauucugcugaucaacagcacaggcaaucucauugccccucgcggguacuuuaagaucagaucuggaaaauccagcauuaugcggucugacgcucccaucggcaaguguaacagcgagugcaucacgccgaauggcuccauuccuaacgauaaacccuuccagaaugucaaccgcaucaccuauggggccuguccuagauacguuaagcagaauacacugaaacuugcuaccggaaugcggaacgugcccgaaaagcaaacacgcggcauuuuuggggccaucgcgggauucauugagaauggcugggaagggaugguggacggaugguauggcuuuagacaccagaacgccgagggcaccgggcaggcugccgaucugaaaucuacgcaagcugccaucaaucagaucaacggaaagcucaaucggcugauuggcaagacaaacgagaaauuccaccagaucgaaaaggaguucagcgaagucgaggggcgcauucaggaccuugaaaaauacguggaggauaccaagaucgaccugugguccuauaacgccgagcuccugguugcucuggaaaaucaacauaccauugaucucacagacagcgagaugaacaaacuguuugaaagaaccaagaagcagcuucgggagaaugcggaagauaugggaaacggcugcuucaaaaucuaccacaagugugacaaugccugcauugggucuaucagaaacggcacauaugaucaugacguguaccgcgacgaggcucugaauaaccgguuucagaucaaaggagucgagcucaaguccggcuacaaaaauuggauucuguggaucagcuucgccauuucuugcuuucuucuguguguggcccuccugggguucaucaugugggcuugccagaagggaaacauuagauguaauaucugcaucuga

SEQ ID NO: 200375 - RNA, 1701 nt, Artificial Sequence
  derived and/or modified CDS sequence (opt5) from hemagglutinin__InfluenzaA__AFD64077
augaagaccaucauugcccugagcuacauccucugccugguguucgcucagaaacuucccggcaacgacaauuccacagccacgcugugucucgggcaccaugcggucccuaacggaaccauuguuaagacaaucaccaaugaucaaauugaggugacaaacgcuaccgaacuggugcagaucucuagcacaggcgagaucugcgacuccccgcaccagauucuugauggggaaaauuguacccugaucgacgcccuccugggagauccccagugcgacggcuuucaaaacaaaaagugggaucuguucgucgagagaucuaaagccuauagcaauuguuacccuuaugacgugcccgauuacgcuucccuccggucucugguugccagcuccgggacgcuugaauuuaacaaugagagcuucgacuggaccggagugacacagaacggcaccucuuccgcuugcaagcgcagaagcaauaagucuuucuucucccggcugaacuggcucacacaucugaaauauaaguacccugcccuuaaugucaccaugcccaacaaugagaaauuugauaagcuguauauuuggggcgugcaccauccugggacggacagcgaucagaucucucucuacgcgcaggccuccggacgcauuacaguuagcaccaaaagaucccaacagacagugaucccgaacauuggcucucggccccgcaucagagacgucagcucccggaucagcauuuacuggaccaucgugaagccuggggacauucugcugaucaacucuaccggaaaucucauugcuccccgcggcuauuucaagaucagauccgggaaaagcucuaucaugcggagcgaugccccuauuggaaaguguaacuccgaaugcaucacacccaauggcucuauuccgaacgacaaaccuuuucagaaugugaaccgcaucacguacggcgcuugucccagauaugucaagcagaauacccugaaacuugccacagggaugcggaacguuccugagaagcaaacccgcggaauuuucggcgcgaucgccggguuuaucgaaaauggaugggagggcaugguggaugggugguacggauucagacaccagaacagcgagggcacaggccaggcugccgaccugaaauccacccaagcugccauuaaucagaucaacgggaagcucaaucggcugauuggaaagacgaacgaaaaauuucaccagaucgagaaggaauuuagcgagguggaaggccgcauucaggaucuugagaaauaugucgaggacacaaagaucgaucuguggucuuacaaugccgaacuccugguggcucuggagaaccaacauaccauugaccucaccgauuccgaaaugaacaaacuguucgagagaacaaagaagcagcuucgggaaaaugcggaggacauggggaacggaugcuuuaaaaucuaucacaagugugauaaugccugcaucggcagcauuagaaacgggaccuacgaccaugacguuuaccgcgaugaggcucugaauaaccgguuccagaucaaaggcguggaacucaagucuggauauaaagacuggauucuguggaucuccuuugccauuagcugcuuccuucugugugucgcccuccugggcuuuaucaugugggcuugccagaaggggaauaucagauguaacauuugcaucuga

SEQ ID NO: 200376 - RNA, 1701 nt, Artificial Sequence; identical to SEQ ID NO: 192145
  derived and/or modified CDS sequence (opt5) from hemagglutinin__InfluenzaA__AFD64088

SEQ ID NO: 200377 - RNA, 1701 nt, Artificial Sequence; identical to SEQ ID NO: 192145
  derived and/or modified CDS sequence (opt5) from hemagglutinin__InfluenzaA__AFD64099

SEQ ID NO: 200378 - RNA, 1701 nt, Artificial Sequence; identical to SEQ ID NO: 200349
  derived and/or modified CDS sequence (opt5) from hemagglutinin__InfluenzaA__AFD64110

SEQ ID NO: 200379 - RNA, 1701 nt, Artificial Sequence
  derived and/or modified CDS sequence (opt5) from hemagglutinin__InfluenzaA__AFD64121
augaagaccaucauugcccugagcuacauccucugccugguguucgcucagaaacuucccggcaacgacaauuccacagccacgcugugucucgggcaccaugcggucccuaacggaaccauuguuaagacaaucaccaaugaucaaauugaggugacaaacgcuaccgaacuggugcagucuagcuccacaggcgggaucugcgacucuccgcaccagauccuugauggagagaauuguacccugauugacgcccuccugggcgauccccagugcgacggguuucaaaacaaaaagugggaucuguucgucgaaagaagccgggccuauuccaauuguuacccuuaugacgugcccgauuacgcuucucuccgcagccugguugccuccagcggaacgcuugaguuuaacaaugaaucuuucaacuggaccggcgugacacagaauggcaccuccagcgcuugcaaaagaaagucuaacaaguccuuuuucagccggcugaauuggcucacacaucugaaauauaaguacccugcccuuaacgucaccaugcccaauaacgagaaauuugacaagcuguauaucuggggagugcaccauccugggacggauaacgaccagauuucucucuacgcgcaggccuccggccgcaucacaguuagcaccaaaagaucccaacagacagugauuccgaauaucgggucucggccccgcgucagagaugugagcucccggauuagcaucuacuggaccaucgugaagccuggagacauucugcugaucaacucuaccggcaaucucauugcuccccgcggguauuucaagaucagauccggaaaaagcucuauuaugcggagcgacgccccuaucggcaaguguaacuccgagugcaucacacccaauggcucuauuccgaacgauaaaccuuuucagaaugucaaccgcaucacguacggggcuugucccagauauguuaagcagaauacccugaaacuugccacaggaaugcggaacgugccugaaaagcaaacccgcggcauuuucggggcgaucgccggauuuauugagaauggcugggaagggaugguggacggaugguacggcuucagacaccagaacagcgagggcacagggcaggcugccgaucugaaauccacccaagcugccaucaaucagaucaacggaaagcucaaucggcugauuggcaagacgaacgagaaauuucaccagaucgaaaaggaguucagcgaagucgaggggcgcauucaggaccuugaaaaauauguggaggauacaaagaucgaccuguggucuuacaacgccgagcuccugguugcucuggaaaaucaacauaccauugaucucaccgacuccgagaugaacaaacuguucgaaagaacaaagaagcagcuucgggagaaugcggaagauaugggaaacggcugcuuuaaaaucuaucacaagugugacaaugccugcauugggagcaucagaaacggcaccuacgaucaugacguguaccgcgacgaggcucugaauaaccgguuccagaucaaaggagucgagcucaagucuggcuauaaagauuggauucuguggaucuccuuugccauuagcugcuuccuucuguguguggcccuccugggguuuaucaugugggcuugccagaagggaaauauuagauguaacaucugcaucuga

SEQ ID NO: 200380 - RNA, 1701 nt, Artificial Sequence; identical to SEQ ID NO: 192145
  derived and/or modified CDS sequence (opt5) from hemagglutinin__InfluenzaA__AFD64132

SEQ ID NO: 200381 - RNA, 1701 nt, Artificial Sequence; identical to SEQ ID NO: 200339
  derived and/or modified CDS sequence (opt5) from hemagglutinin__InfluenzaA__AFD64143

SEQ ID NO: 200382 - RNA, 1701 nt, Artificial Sequence; identical to SEQ ID NO: 192145
  derived and/or modified CDS sequence (opt5) from hemagglutinin__InfluenzaA__AFD64154

SEQ ID NO: 200383 - RNA, 1701 nt, Artificial Sequence
  derived and/or modified CDS sequence (opt5) from hemagglutinin__InfluenzaA__AFD64179
augaagaccaucauugcccugagcuacauccucugccugguguucgcucagaaacuucccggcaacgacaauuccacagccacgcugugucucgggcaccaugcggucccuaacggaaccauuguuaagacaaucaccaaugaucaaauugaggugacaaacgcuaccgaacuggugcagaucucuagcacaggcgggaucugcgacuccccgcaccagauucuugauggagagaauuguacccugaucgacgcccuccugggcgauccccagugcgacggguuucaaaacaaaaagugggaucuguucgucgaaagaucuaaagccuauagcaauuguuacccuuaugacgugcccgauuacgcuucccuccggucucugguugccagcuccggaacgcuugaguuuaacaaugaaucuuucgacuggaccggcgugacacagaacggcaccucuuccgcuugcaagcgcagaagcaauaagagcuuuuucucccggcugaacuggcucacacaucugaaauauaaguacccugcccuuaaugucaccaugcccaacaaugagaaauuugauaagcuguauauuuggggagugcaccauccugggacggacagcgaucagaucucucucuacgcgcaggccuccggccgcauuacaguuagcaccaaaagaucccaacagacagugaucccgaacauugggucucggccccgcgucagagacgugagcucccagaucagcaucuacuggaccauugugaagccuggagacauccugcugauuaacucuaccggcaaucucaucgcuccccggggguauuucaagauucgcuccggaaaaagcucuaucaugagaagcgaugccccuaucggcaaguguaacuccgagugcauuacacccaauggcucuaucccgaacgacaaaccuuuucagaaugucaaccggauuacguacggggcuuguccccgcuauguuaagcaaaauacccugaaacuugccacaggaaugagaaacgugccugaaaagcagacccggggcaucuucggggcgauugccggauuuaucgagaauggcugggaagggaugguggauggaugguacggcuuccgccaccagaacagcgagggcacagggcaagcugccgaccugaaauccacccaggcugccaucaaucagauuaacggaaagcucaauagacugaucggcaagacgaacgagaaauuucaccagauugaaaaggaguucagcgaagucgaggggcggauccaagaucuugaaaaauauguggaggacacaaagauugaucuguggucuuacaaugccgagcuccugguugcucuggaaaaccagcauaccaucgaccucaccgauuccgagaugaacaaacuguucgaaagaacaaagaagcagcuucgcgagaaugcggaagacaugggaaacggcugcuuuaaaauuuaucacaagugugauaaugccugcaucgggagcauccggaacggcaccuacgaccaugacguguacagagaugaggcucugaauaaccgcuuccagauuaaaggagucgagcucaagucuggcuauaaagacuggauccuguggauuuccuuugccaucagcugcuuccuucuguguguggcccuccugggguuuauuaugugggcuugccaaaagggaaauauccgguguaacaucugcauuuga

SEQ ID NO: 200384 - RNA, 1701 nt, Artificial Sequence; identical to SEQ ID NO: 200383
  derived and/or modified CDS sequence (opt5) from hemagglutinin__InfluenzaA__AFD64190

SEQ ID NO: 200385 - RNA, 1701 nt, Artificial Sequence; identical to SEQ ID NO: 200339
  derived and/or modified CDS sequence (opt5) from hemagglutinin__InfluenzaA__AFD64201

SEQ ID NO: 200386 - RNA, 1701 nt, Artificial Sequence; identical to SEQ ID NO: 200349
  derived and/or modified CDS sequence (opt5) from hemagglutinin__InfluenzaA__AFD64212

SEQ ID NO: 200387 - RNA, 1701 nt, Artificial Sequence
  derived and/or modified CDS sequence (opt5) from hemagglutinin__InfluenzaA__AFD64223
augaagaccaucauugcccugagcuacauccucugccugguguucgcucagaaacuucccggcaacgacaauuccacagccacgcugugucucgggcaccaugcggucccuaacggaaccauuguuaagacaaucaccaaugaucaaauugaggugacaaacgcuaccgaacuggugcagucuagcuccacaggcgggaucugcgacucuccgcaccagauccuugauggagagaauuguacccugauugacgcccuccugggcgauccccagugcgacggguuucaaaacaaaaagugggaucuguucgucgaaagaagcaaagccuauuccaauuguuacccuuaugacgugcccgauuacgcuucucuccggagccugguugccuccagcggaacgcuugaguuuaacaaugaaucuuucaacuggaccggcgugacacagaauggcaccuccagcgcuugcaagcgcagaucuaacaaguccuuuuucagccggcugaauuggcucacacaucugaaauauaaguacccugcccuuaacgucaccaugcccaauaacgagaaauuugacaagcuguauaucuggggagugcuccacccugggacggauucugaccagauucgccuguacgcgcaggccuccggcagaaucacaguuagcaccaaacggucccaacagacagugauuccgaacaucgggucucgccccagaguccgggaugugagcucccgcauuagcaucuacuggaccaucgugaagccuggagacauucugcucaucaauucuaccggcaaccugauugcucccagaggguauuucaagauccgguccggaaaaagcucuauuaugcgcagcgacgccccuaucggcaaguguaauuccgagugcaucacacccaacggcucuauuccgaaugauaaaccuuuucagaacgucaauagaaucacguacggggcuuguccccgguauauuaagcagaacacccuuaaacuggccacaggaaugcgcaauguuccugaaaagcaaaccagaggcaucuucggggcgauugccggauuuaucgagaacggcugggaagggaugguggacggaugguacggcuuccggcaucagaauagcgagggcacagggcaggcugccgaucucaaauccacccaagcugccaucaaccagauuaauggaaagcugaacagacuuaucggcaagacgaaugagaaauuucaccagauugaaaaggaguucagcgaaguggaggggcgcauccaggaccuggaaaaauaugucgaggauacaaagauugaccucuggucuuacaacgccgagcugcugguggcucucgaaaaccaauauaccaucgaucugaccgacuccgagaugaauaaacuuuucgaacggacaaagaagcagcugagagagaacgcggaagauaugggaaauggcugcuuuaaaauuuaccacaagugugacaacgccugcaucgggagcauccgcaauggcaccuacgaucaugacguuuaucgggacgaggcucucaacaauagauuccagauuaaaggaguggagcugaagucuggcuacaaagauuggauccuuuggauuuccuuugccaucagcugcuuccugcucugugucgcccugcugggguuuauuaugugggcuugccagaagggaaacauccgcuguaauaucugcauuuga

SEQ ID NO: 200388 - RNA, 1701 nt, Artificial Sequence
  derived and/or modified CDS sequence (opt5) from hemagglutinin__InfluenzaA__AFD64315
augaagaccaucauugcccugagcuacauccucugccugguguucgcucagaaacuucccggcaacgacaauuccacagccacgcugugucucgggcaccaugcggucccuaacggaaccauuguuaagacaaucaccaaugaucaaauugaggugacaaacgcuaccgaacuggugcagaucucuagcacaggcgggaucugcgacuccccgcaccagauucuugauggagagaauuguacccugaucgacgcccuccugggcgauccccagugcgacggguuucaaaacaaaaagugggaucuguucgucgaaagaucuaaagccuauagcaauuguuacccuuaugacgugcccgauuacgcuucccuccggucucugguugccagcuccggaacgcuugaguuuaacaaugaaucuuucgacuggaccggcgugacacagaacggcaccucuuccgcuugcaagcgcagaagcaauaagagcuuuuucucccggcugaacuggcucacacaucugaaauauaaguacccugcccuuaaugucaccaugcccaacaaugagaaauuugauaagcuguauauuuggggagugcaccauccugggacggacagcgaucagaucucucucuacgcgcaggccuccggccgcauuacaguuagcaccaaaagaucccaacagacagugaucccgaacauugggucucggccccgcgucagagacgugagcucccggaucagcaucuacuggaccauugugaagccuggagacauccugcugauuaacucuaccggcaaucucaucgcuccccgcggguauuucaagauuagauccggaaaaagcucuaucaugcggagcgaugccccuaucggcaaguguaacuccgagugcauuacacccaauggcucuaucccgaacgacaaaccuuuucagaaugucaaccgcauuacguacggggcuugucccagauauguuaagcagaauacccugaaacuugccacaggaaugcggaacgugccugaaaagcaaacccgcggcaucuucggggcgauugccggauuuaucgagaauggcugggaagggaugguggauggaugguacggcuucagacaccagaacagcgagggcacagggcaggcugccgaccugaaauccacccaagcugccaucaaucagauuaacggaaagcucaaucggcugaucggcaagacgaacgagaaauuucaccagauugaaaaggaguucagcgaagucgaggggagaauccaggaucuugaaaaauauguggaggacacaaagauugaucuguggucuuacaaugccgagcuccugguugcucuggaaaaccaacauaccaucgaccucaccgauuccgagaugaacaaacuguucgaacgcacaaagaaucagcuucgggagaacgcggaagacaugggaaauggcugcuuuaagauuuaucacaaaugugauaacgccugcaucgggagcaucagaaauggcaccuacgaccaugacguguaccgcgaugaggcucugaacaaucgguuccagauuaagggagucgagcucaaaucuggcuauaaggacuggauccuguggauuuccuuugccaucagcugcuuccuucuguguguggcccuccugggguuuauuaugugggcuugccagaaaggaaacaucagauguaauaucugcauuuga

SEQ ID NO: 200389 - RNA, 1701 nt, Artificial Sequence; identical to SEQ ID NO: 200379
  derived and/or modified CDS sequence (opt5) from hemagglutinin__InfluenzaA__AFD64326

SEQ ID NO: 200390 - RNA, 1701 nt, Artificial Sequence; identical to SEQ ID NO: 200349
  derived and/or modified CDS sequence (opt5) from hemagglutinin__InfluenzaA__AFD64337

SEQ ID NO: 200391 - RNA, 1701 nt, Artificial Sequence; identical to SEQ ID NO: 192145
  derived and/or modified CDS sequence (opt5) from hemagglutinin__InfluenzaA__AFD64348

SEQ ID NO: 200392 - RNA, 1701 nt, Artificial Sequence; identical to SEQ ID NO: 200349
  derived and/or modified CDS sequence (opt5) from hemagglutinin__InfluenzaA__AFD64359

SEQ ID NO: 200393 - RNA, 1701 nt, Artificial Sequence
  derived and/or modified CDS sequence (opt5) from hemagglutinin__InfluenzaA__AFD64370
augaagaccaucauugcccugagcuacauccucugccugguguucgcucagaaacuucccggcaacgacaauuccacagccacgcugugucucgggcaccaugcggucccuaacggaaccauuguuaagacaaucaccaaugaucaaauugaggugacaaacgcuaccgaacuggugcagucuagcuccacaggcgggaucugcgacucuccgcaccagauccuugauggagagaauuguacccugauugacgcccuccugggcgauccccauugcgacggguuucagaacaaaaagugggaucuguucgucgaaagaagcaaagccuauuccaauuguuacccuuaugacgugcccgauuacgcuucucuccggagccugguugccuccagcggaacgcuugaguuuaacaaugaaucuuucaacuggaccggcgugacacaaaauggcaccuccagcgcuugcaagcgcaagucuaacaaauccuuuuucagcagacugaauuggcucacacaccugaaguauaaauacccugcccuuaacgucaccaugcccaauaacgagaaguuugacaaacuguauaucuggggagugcaucacccugggacggauaacgaccagauuucucucuacgcgcaggccuccggccggaucacaguuagcaccaagcgcucccagcaaacagugauuccgaauaucgggucuagaccccggguccgcgauauuagcuccagaaucagcaucuacuggaccauugugaagccuggagacauccugcugauuaacucuaccggcaaucucaucgcuccccggggguauuucaaaauucgcuccggaaagagcucuaucaugagaagcgacgccccuaucggcaaauguaacuccgagugcauuacacccaauggcucuaucccgaacgauaagccuuuucagaaugugaaccggauuacguacggggcuuguccccgcuaugucaaacagaauacccugaaacuugccacaggaaugagaaacguuccugaaaagcagacccggggcaucuucggggcgauugccggauuuaucgagaauggcugggaagggaugguggacggaugguacggcuuccgccaccaaaacagcgagggcacagggcaggcugccgaucugaaguccacccaggcugccaucaaucaaauuaacggaaagcucaauagacugaucggcaaaacgaacgagaaguuucaucagauugaaaaagaguucagcgaaguggaggggcggauccaggaccuugaaaaguaugucgaggauacaaaaauugaccuguggucuuacaacgccgagcuccugguggcucuggaaaaucagcacaccaucgaucucaccgacuccgagaugaacaagcuguucgaaagaacaaagaaacaacuucgcgagaaugcggaagauaugggaaacggcugcuuuaagauuuaucauaaaugugacaaugccugcaucgggagcauccggaacggcaccuacgaucacgacguuuacagagacgaggcucugaauaaccgcuuccagauuaagggaguggagcucaaaucuggcuauaaggauuggauccuguggauuuccuuugccaucagcugcuuccuucugugugucgcccuccugggguuuauuaugugggcuugccagaagggaaauauccgguguaacaucugcauuuga

SEQ ID NO: 200394 - RNA, 1701 nt, Artificial Sequence; identical to SEQ ID NO: 192145
  derived and/or modified CDS sequence (opt5) from hemagglutinin__InfluenzaA__AFD64381

SEQ ID NO: 200395 - RNA, 1701 nt, Artificial Sequence; identical to SEQ ID NO: 200349
  derived and/or modified CDS sequence (opt5) from hemagglutinin__InfluenzaA__AFD64392

SEQ ID NO: 200396 - RNA, 1701 nt, Artificial Sequence; identical to SEQ ID NO: 200339
  derived and/or modified CDS sequence (opt5) from hemagglutinin__InfluenzaA__AFD64403

SEQ ID NO: 200397 - RNA, 1701 nt, Artificial Sequence; identical to SEQ ID NO: 200339
  derived and/or modified CDS sequence (opt5) from hemagglutinin__InfluenzaA__AFD64414

SEQ ID NO: 200398 - RNA, 1701 nt, Artificial Sequence
  derived and/or modified CDS sequence (opt5) from hemagglutinin__InfluenzaA__AFD64425
augaagaccaucauugcccugagcuacauccucugccugguguucgcucagaaacuucccggcaacgacaauuccacagccacgcugugucucgggcaccaugcggucccuaacggaaccauuguuaagacaaucaccaaugaucaaauugaggugacaaacgcuaccgaacuggugcagaucucuagcacaggcgggaucugcgacuccccgcaccagauucuugauggagagaauuguacccugaucgacgcccuccugggcgauccccagugcgacggguuucaaaacaaaaagugggaucuguucgucgaaagaucuaaagccuauagcaauuguuacccuuaugacgugcccaacuacgcuucccuccggucucugguugccagcuccggaacgcuugaguuuaauaacgaaucuuucgauuggaccggcgugacacagaauggcaccucuuccgcuugcaagcgcagaagcaacaagagcuuuuucucccggcugaauuggcucacacaucugaaauauaaguacccugcccuuaacgucaccaugcccaauaacgagaaauuugacaagcuguauauuuggggagugcaccauccugggacggauagcgaccagaucucucucuacgcgcaggccuccggccgcauuacaguuagcaccaaaagaucccaacagacagugaucccgaacauugggucucggccccgcgucagagaugugagcucccggaucagcaucuacuggaccauugugaagccuggagacauccugcugauuaauucuaccggcaaccucaucgcuccccgcggguauuucaagauuagauccggaaaaagcucuaucaugcggagcgacgccccuaucggcaaguguaauuccgagugcauuacacccaacggcucuaucccgaaugauaaaccuuuucagaacgucaaucgcauuacguacggggcuugucccagauauguuaagcagaacacccugaaacuugccacaggaaugcggaaugugccugaaaagcaaacccgcggcaucuucggggcgauugccggauuuaucgagaacggcugggaagggaugguggacggaugguacggcuucagacaccagaauagcgagggcacagggcaggcugccgaucugaaauccacccaagcugccaucaaccagauuaauggaaagcucaaccggcugaucggcaagacgaaugagaaauuucaccagauugaaaaggaguucagcgaagucgaggggagaauccaggaccuugaaaaauauguggaggauacaaagauugaccuguggucuuacaacgccgagcuccugguugcucuggaaaaccaacauaccaucgaucucaccgacuccgagaugaauaaacuguucgaacgcacaaagaagcagcuucgggagaacgcggaagauaugggaaauggcugcuuuaaaauuuaucacaagugugacaacgccugcaucgggagcaucagaaauggcaccuacgaucauaacguguaccgcgacgaggcucugaauaaccgguuccagauuaaaggagucgagcucaagucuggcuauaaagacuggauccuguggauuuccuuugccaucagcugcuuccuucuguguguggcccuccugggguuuauuaugugggcuugccagaagggaaauaucagauguaacaucugcauuuga

SEQ ID NO: 200399 - RNA, 1701 nt, Artificial Sequence; identical to SEQ ID NO: 192145
  derived and/or modified CDS sequence (opt5) from hemagglutinin__InfluenzaA__AFD64436

SEQ ID NO: 200400 - RNA, 1701 nt, Artificial Sequence; identical to SEQ ID NO: 192145
  derived and/or modified CDS sequence (opt5) from hemagglutinin__InfluenzaA__AFD64447

SEQ ID NO: 200401 - RNA, 1701 nt, Artificial Sequence
  derived and/or modified CDS sequence (opt5) from hemagglutinin__InfluenzaA__AFD64458
augaagaccaucauugcccugagcuacauccucugccugguguucgcucagaaacuucccggcaacgacaauuccacagccacgcugugucucgggcaccaugcgguccaaaacggaaccauuguuaagacaaucaccaaugaucagauugaggugacaaacgcuaccgaacuggugcagucuagcuccacaggcgggaucugcgacucuccucaccagauccuugauggagagaauuguacccugauugacgcccuccugggcgauccgcaaugcgacggguuucagaacaaaaagugggaucuguucgucgaaagaagcaaagccuauuccaauuguuaccccuaugacgugccugauuacgcuucucuccggagccugguugccuccagcggaacgcuugaguuuaacaaugaaucuuucgacuggaccggcgugacacagaacggcaccuccagcgcuugcaagcgcagaucuaauaaguccuuuuucagccggcugaacuggcucacacaucugaaauauaaguaccccgcccuuaaugucaccaugccuaacaaugagaaauuugauaagcuguauaucuggggagugcaccaucccgggacggacucugaucagauuucccucuacgcgcaagccagcggccgcaucacaguuuccaccaaaagaucucagcagacagugauuccuaacaucgggagccggccgcgcgucagagacguguccagccggauuucuaucuacuggaccaucgugaagcccggagacauucugcugaucaacuccaccggcaaucucauugcuccucgcggguauuucaagaucagaagcggaaaaucuagcauuaugcgguccgaugcccccaucggcaaguguaacucugagugcaucacaccuaauggcagcauucccaacgacaaaccguuucagaaugucaaccgcaucacguacggggcuuguccuagauauguuaagcaaaauacccugaaacuugccacaggaaugcggaacgugcccgaaaagcagacccgcggcauuuucggggcgaucgccggauuuauugagaauggcugggaagggaugguggauggaugguacggcuucagacaccagaacuccgagggcacagggcaagcugccgaccugaaaagcacccaggcugccaucaaucagaucaacggaaagcucaaucggcugauuggcaagacgaacgagaaauuucaccagaucgaaaaggaguucucugaagucgaggggcgcauucaagaucuugaaaaauauguggaggacacaaagaucgaucugugguccuacaaugccgagcuccugguugcucuggaaaaccagcauaccauugaccucaccgauagcgagaugaacaaacuguucgaaagaacaaagaagcagcuucgggagaaugcggaagacaugggaaacggcugcuuuaaaaucuaucacaagugugauaaugccugcauugggucuaucagaaacggcaccuacgaccaugacguguaccgcgaugaggcucugaauaaccgguuccagaucaaaggagucgagcucaaguccggcuauaaagacuggauucuguggaucagcuuugccauuuccugcuuccuucuguguguggcccuccugggguuuaucaugugggcuugccaaaagggaaauauuagauguaacaucugcaucuga

SEQ ID NO: 200402 - RNA, 1701 nt, Artificial Sequence; identical to SEQ ID NO: 198927
  derived and/or modified CDS sequence (opt5) from hemagglutinin__InfluenzaA__AFD64795

SEQ ID NO: 200403 - RNA, 1701 nt, Artificial Sequence; identical to SEQ ID NO: 199054
  derived and/or modified CDS sequence (opt5) from hemagglutinin__InfluenzaA__AFD64799

SEQ ID NO: 200404 - RNA, 1701 nt, Artificial Sequence
  derived and/or modified CDS sequence (opt5) from hemagglutinin__InfluenzaA__AFD64802
augaagaccaucauugcccugagcuacauccucugccugguguucgcucagaaacuucccggcaacgacaauuccacagccacgcugugucucgggcaccaugcggucccuaacggaaccauuguuaagacaaucaccaaugaucaaauugaggugacaaacgcuaccgaacuggugcagucuagcuccacaggcgagaucugcaauucuccgcaccagauccuugacggggaaaacuguacccugauugaugcccuccugggagacccccagugcgauggcuuucaaaauaaaaagugggaccuguucgucgagagaagcaaagcccauuccaacuguuauccuuacgaugugcccgacuaugcuucucuccggagccugguugccuccagcgggacgcuugaauuuaauaacgagucuuucaauuggaccggagugacacagaacggcaccuccagcgcuugcauccgcagaucuaauaacuccuuuuucagccggcugaauuggcucacacaccugaacuuuaaguacccugcccuuaacgucaccaugcccaauaacgagcaguucgauaagcuguauauuuggggcgugcaucacccugggacggacaaagaucagacauuucucuacgcgcaagccucuggacgcaucaccguuuccacaaagagaagccagcaggcugugauuccgaauaucggcucccggccccgcgucagaaacauuccuucucgggugagcaucuauuggaccaucgugaaacccggggacauucugcugaucaauuccaccggaaaccucauugccccucgcggcuacuucaagaucagaagcgggaaaucuuccauuaugcggagcgaugcucccaucggaaaguguaauucugccugcaucacaccgaacggcagcauuccuaaugacaagcccuuucagaacgucaaucgcaucacguacggcgcguguccuagauauguuaaacaaaacacccugaaacuugccacagggaugcggaaugugcccgaaaaacagacccgcggaauuuucggcgcuaucgccggguuuauugagaacggaugggaaggcaugguggacgggugguacggauucagacaccaaaauuccgagggccggggccaggcugccgaucugaagucuacacaggccgcuaucgaccagaucaacgggaaacucaacagacugauuggaaagaccaaugagaaauuccaucagaucgaaaaggaguuuagcgaagucgagggccgcauucaagaucuugaaaaguauguggaggacacgaaaaucgaucugugguccuacaacgcggagcuccugguugcccuggaaaaucagcacacaauugaccucaccgauagcgagaugaacaagcuguucgaaaagaccaagaaacagcuucgggagaaugcugaagacauggggaacggaugcuuuaagaucuaucauaagugugauaaugccugcauuggcucuaucagaaacgggacauacgaccacgauguguaucgcgacgaggcccugaauaaccgguuccagaucaaaggcgucgagcucaaguccgaauacaaagacuggauucuguggaucagcuuugcuauuucuugcuuccuucuguguguggcccuccugggauuuaucaugugggcgugccaaaagggcaauauuagauguaacaucugcaucuga

SEQ ID NO: 200405 - RNA, 1701 nt, Artificial Sequence
  derived and/or modified CDS sequence (opt5) from hemagglutinin__InfluenzaA__AFD64804
augaagaccaucauugcccugagcuacauccucugccugguguucgcucagaaacuucccggcaacgacaauuccacagccacgcugugucucgggcaccaugcggucccuaacggaaccauuguuaagacaaucaccaaugaucaaauugaggugacaaacgcuaccgaacuggugcagucuagcuccacaggcgagaucugcaauucuccgcaccagauccuugacggggaaaacuguacccugauugaugcccuccugggagacccccagugcgauggcuuucaaaauaaaaagugggaccuguucgucgagagaagcaaagcccauuccaacuguuauccuuacgaugugcccgacuaugcuucucuccggagccugguugccuccagcgggacgcuugaauuuaauaacgagucuuucaauuggaccggagugacacagaacggcaccuccagcgcuugcauccgcagaucuaauaacuccuuuuucagccggcugaauuggcucacacaccugaacuuuaaguacccugcccuuaacgucaccaugcccaauaacgagcaguucgauaagcuguauauuuggggcgugcaucacccugggacggacaaagaucagaucuuucucuacgcgcaagccucuggacgcauuacaguuuccaccaagagaagccagcaggcugugaucccgaauauuggcucccggccccgcgucagaaacaucccuucucgggugagcaucuauuggacaauugugaaacccggggacauccugcugauuaauuccaccggaaaccucaucgccccucgcggcuacuucaagauuagaagcgggaaaucuuccaucaugcggagcgaugcucccaucggaaaguguaauucugccugcauuaccccgaacggcagcaucccuaaugacaagcccuuucagaacgucaaucgcauuacauacggcgcguguccuagauauguuaaacaaaacacgcugaaacuugccaccgggaugcggaaugugcccgaaaaacagacacgcggaaucuucggcgcuauugccggguuuaucgagaacggaugggaaggcaugauggacgggugguacggauucagacaccaaaauuccgagggccggggccaggcugccgaucugaagucuacccaggccgcuaucgaccagauuaacgggaaacucaacagacugaucggaaagacaaaugagaaauuccaucagauugaaaaggaguuuagcgaaguggagggccgcauccaagaucuugaaaaguaugucgaggacaccaaaauugaucugugguccuacaacgcggagcuccugguggcccuggaaaaucagcacacgaucgaccucacagauagcgagaugaacaagcuguucgaaaagaccaagaaacagcuucgggagaaugcugaagacauggggaacggaugcuuuaagauuuaucauaagugugauaaugccugcaucggcucuaucagaaacgggaccuacgaccacgauguuuaucgcgacgaggcccugaauaaccgguuccagauuaaaggcguggagcucaaguccggauacaaagacuggauccuguggauuagcuuugcuaucucuugcuuccuucugugugucgcccuccugggcuuuauuaugugggcgugccaaaaggggaauaucagauguaacaucugcauuuga

SEQ ID NO: 200406 - RNA, 1701 nt, Artificial Sequence
  derived and/or modified CDS sequence (opt5) from hemagglutinin__InfluenzaA__AFD64806
augaagaccaucauugcccugagcuacauccucugccugguguucgcucagaaacuucccggcaacgacaauuccacagccacgcugugucucgggcaccaugcggucccuaacggaaccauuguuaagacaaucaccaaugaucaaauugaggugacaaacgcuaccgaacuggugcagucuagcuccacaggcgagaucugcaauucuccgcaccagauccuugacggggaaaacuguacccugauugaugcccuccugggagacccccagugcgauggcuuucaaaauaaaaagugggaccuguucgucgagagaagcaaagcccauuccaacuguuauccuuacgaugugcccgacuaugcuucucuccggagccugguugccuccagcgggacgcuugaauuuaauaacgagucuuucaauuggaccggagugacacagaacggcaccuccagcgcuugcauccgcagaucuaauaacuccuuuuucagccggcugaauuggcucacacaccugaacuuuaaguacccugcccuuaacgucaccaugcccaauaacgagcaguucgauaagcuguauauuuggggcgugcaucacccugggacggacaaagaucagacauuucucuacgcgcaagccucuggacgcaucaccguuuccacaaagagaagccagcaggcugugauuccgaauaucggcucccggccccgcgucagaaacauuccuucucgggugagcaucuauuggaccaucgugaaacccggggacauucugcugaucaauuccaccggaaaccucauugccccucgcggcuacuucaagaucagaagcgggaaaucuuccauuaugcggagcgaugcucccaucggaaaguguaauucugccugcaucacaccgaacggcagcauuccuaaugacaagcccuuucagaacgucaaucgcaucacguacggcgcguguccuagauauguuaaacaaaacacccugaaacuugccacagggaugcggaaugugcccgaaaaacagacccgcggaauuuucggcgcuaucgccggguuuauugagaacggaugggaaggcaugguggacgggugguacggauucagacaccaaaauuccgagggccggggccaggcugccgaucugaagucuacacaggccgcuaucgaccagaucaacgggaaacucaacagacugauuggaaagaccaaugagaaauuccaucagaucgaaaaggaguuuagcgaagucgagggccgcauucaagaucuugaaaaguauguggaggacacgaaaaucgaucugugguccuacaacgcggagcuccugguugcccuggaaaaucagcacacaauugaccucaccgauagcgagaugaacaagcuguucgaaaagaccaagaaacagcuucgggagaaugcugaagacauggggaacggaugcuuuaagaucuaucauaagugugauaaugccugcauuggcucuaucagaaacgggacauacgaccacgauguguaucgcgacgaggcccugaauaaccgguuccagaucaaaggcgucgagcucaaguccggauacaaagacuggauucuguggaucagcuuugcuauuucuugcuuccuucuguguguggcccuccugggcuuuaucaugugggcgugccaaaaggggaauauuagauguaacaucugcaucuga

SEQ ID NO: 200407 - RNA, 1701 nt, Artificial Sequence
  derived and/or modified CDS sequence (opt5) from hemagglutinin__InfluenzaA__AFD64807
augaagaccaucauugcccugagcuacauccucugccugguguucgcucagaaacuucccggcaacgacaauuccacagccacgcugugucucgggcaccaugcggucccuaacggaaccauuguuaagacaaucaccaaugaucaaauugaggugacaaacgcuaccgaacuggugcagucuagcuccacaggcgagaucugcaauucuccgcaccagauccuugacggggaaaacuguacccugauugaugcccuccugggagacccccagugcgauggcuuucaaaauaaaaagugggaccuguucgucgagagaagcaaagcccauuccaacuguuauccuuacgaugugcccgacuaugcuucucuccggagccugguugccuccagcgggacgcuugaauuuaauaacgagucuuucaauuggaccggagugacacagaacggcaccuccagcgcuugcauccgcagaucuaauaacuccuuuuucagccggcugaauuggcucacacaccugaacuuuaaguacccugcccuuaacgucaccaugcccaauaacgagcaguucgauaagcuguauauuuggggcgugcaucacccugggacggacaaagaucagacauuucucuacgcgcaagccucuggacgcaucaccguuuccacaaagagaagccagcaggcugugauuccgaauaucggcucccggccccgcgucagagacauuccuucucgggugagcaucuauuggaccaucgugaaacccggggauauucugcugaucaacuccaccggaaaucucauugccccucgcggcuacuucaagaucagaagcgggaaaucuuccauuaugcggagcgacgcuccccugggaaagugucacucugccugcaucacaccgaacggcagcaucccuaaugacaagcccuuucagaacgucaaucgcauuacguacggcgcguguccuagauauguuaaacaaaacacccuuaagcuggccacagggaugcggaaugugcccgaaaaacagacccgcggaaucuucggcgcuauugccggguuuaucgagaacggaugggaaggcaugguggaugggugguacggauucagacaucaaaauuccgagggccggggccaggcugccgaccucaagucuacacaggccgcuauugaucagaucaacgggaaacugaauagacuuaucggaaagaccaacgagaaauuccaccagauugaaaaggaguuuagcgaagucgagggccgcauccaagaccuggaaaaguauguggaggauacgaaaauugaccucugguccuacaacgcggagcugcugguugcccucgaaaaucagcauacaaucgaucugaccgacagcgagaugaacaaacuuuucgaaaagaccaagaaacagcugcgggagaaugcugaagauauggggaacggaugcuuuaagauuuaucacaagugugacaaugccugcaucggcucuauuagaaacgggacauacgaucacgacauguaucgcgacgaggcccucaauaaccgguuccagaucaaaggcguggagcugaaguccggauacaaagauuggauccuuuggauuagcuuugcuaucucuugcuuccugcucugugucgcccugcugggcuuuauuaugugggcgugccaaaaggggaauaucagauguaacauuugcaucuga

SEQ ID NO: 200408 - RNA, 1701 nt, Artificial Sequence
  derived and/or modified CDS sequence (opt5) from hemagglutinin__InfluenzaA__AFD64810
augaagaccaucauugcccugagcuacauccucugccugguguucgcucagaaacuucccggcaacgacaauuccacagccacgcugugucucgggcaccaugcggucccuaacggaaccauuguuaagacaaucaccaaugaucaaauugaggugacaaacgcuaccgaacuggugcagucuagcuccacaggcgagaucugcaauucuccgcaccagauccuugacggggaaaacuguacccugauugaugcccuccugggagacccccagugcgauggcuuucaaaauaaaaagugggaccuguucgucgagagaagcaaagcccauuccaacuguuauccuuacgaugugcccgacuaugcuucucuccggagccugguugccuccagcgggacgcuugaauuuaauaacgagucuuucaauuggaccggagugacacagaacggcaccuccagcgcuugcauccgcagaucuaauaacuccuuuuucagccggcugaauuggcucacacaccugaacuuuaaguacccugcccuuaacgucaccaugcccaauaacgagcaguucgauaagcuguauauuuggggcgugcaucacccugggacggacaaagaucagaucuuucucuacgcgcaagccucuggacgcauuacaguuuccaccaagagaagccagcaggcugugaucccgaauauuggcucccggccccgcgucagaaacaucccuucucgggugagcaucuauuggacaauugugaaacccggggacauccugcugauuaauuccaccggaaaccucaucgccccucgcggcuacuucaagauuagaagcgggaaaucuuccaucaugcggagcgaugcucccaucggaaaguguaauucugccugcauuaccccgaacggcagcaucccuaaugacaagcccuuucagaacgucaaucgcauuacauacggcgcguguccuagauauguuaaacaaaacacgcugaaacuugccaccgggaugcggaaugugcccgaaaaacagacacgcggaaucuucggcgcuauugccggguuuaucgagaacggaugggaaggcaugguggacgggugguacggauucagacaccaaaauuccgagggccggggccaggcugccgaucugaagucuacccaggccgcuaucgaccagauuaacgggaaacucaacagacugaucggaaagacaaaugagaaauuccaucagauugaaaaggaguuuagcgaagucgagggccgcauccaagaucuugaaaaguauguggaggacaccaaaauugaucugugguccuacaacgcggagcuccugguugcccuggaaaaucagcacacgaucgaccucacagauagcgagaugaacaagcuguucgaaaagaccaagaaacagcuucgggagaaugcugaagacauggggaacggaugcuuuaagauuuaucauaagugugauaaugccugcaucggcucuaucagaaacgggaccuacgaccccgauguguaucgcgacgaggcccugaauaaccgguuccagauuaaaggcgucgagcucaaguccggauacaaagacuggauccuguggauuagcuuugcuaucucuugcuuccuucuguguguggcccuccugggcuuuauuaugugggcgugccaaaaggggaauaucagauguaacaucugcauuuga

SEQ ID NO: 200409 - RNA, 1701 nt, Artificial Sequence
  derived and/or modified CDS sequence (opt5) from hemagglutinin__InfluenzaA__AFD64812
augaagaccaucauugcccugagcuacauccucugccugguguucgcucagaaacuucccggcaacgacaauuccacagccacgcugugucucgggcaccaugcggucccuaacggaaccauuguuaagacaaucaccaaugaucaaauugaggugacaaacgcuaccgaacuggugcagucuagcuccacaggcgagaucugcaauucuccgcaccagauccuugacggggaaaacuguacccugauugaugcccuccugggagacccccagugcgauggcuuucaaaauaaaaagugggaccuguucgucgagagaagcaaagcccauuccaacuguuauccuuacgaugugcccgacuaugcuucucuccggagccugguugccuccagcgggacgcuugaauuuaauaacgagucuuucaauuggaccggagugacacagaacggcaccuccagcgcuugcauccgcagaucuaauaacuccuuuuucagccggcugaauuggcucacacaccugaacuuuaaguacccugcccuuaacgucaccaugcccaauaacgagcaguucgauaagcuguauauuuggggcgugcaucacccugggacggacaaagaucagacauuucucuacgcgcaagccucuggacgcaucaccguuuccacaaagagaagccagcaggcugugauuccgaauaucggcucccggccccgcgucagaaacauuccuucucgggugagcaucuauuggaccaucgugaaacccggggacauucugcugaucaauuccaccggaaaccucauugccccucgcggcuacuucaagaucagaagcgggaaaucuuccauuaugcggagcgaugcucccaucggaaaguguaauucugccugcaucacaccgaacggcagcauuccuaaugacaagcccuuucagaacgucaaucgcaucacguacggcgcguguccuagauauguuaaacaaaacacccugaaacuugccacagggaugcggaaugugcccgaaaaacagacccgcggaauuuucggcgcuaucgccggguuuauugagaacggaugggaaggcaugguggacgggugguacggauucagacaccaaaauuccgagggccggggccaggcugccgaucugaagucuacacaggccgcuaccgaccagaucaacgggaaacucaacagacugaucggaaagacgaaugagaaauuccaucagauugaaaaggaguuuagcgaagucgagggccgcauccaagaucuugaaaaguauguggaggacacaaaaauugaucugugguccuacaacgcggagcuccugguugcccuggaaaaucagcacaccaucgaccucaccgauagcgagaugaacaagcuguucgaaaagacaaagaaacagcuucgggagaaugcugaagacauggggaacggaugcuuuaagauuuaucauaagugugauaaugccugcaucggcucuauuagaaacgggaccuacgaccacgauguguaucgcgacgaggcccugaauaaccgguuccagaucaaaggcgucgagcucaaguccggauacaaagacuggauccuguggauuagcuuugcuaucucuugcuuccuucuguguguggcccuccugggcuuuauuaugugggcgugccaaaaggggaauaucagauguaacauuugcaucuga

SEQ ID NO: 200410 - RNA, 1701 nt, Artificial Sequence
  derived and/or modified CDS sequence (opt5) from hemagglutinin__InfluenzaA__AFD64814
augaagaccaucauugcccugagcuacauccucugccugguguucgcucagaaacuucccggcaacgacaauuccacagccacgcugugucucgggcaccaugcggucccuaacggaaccauuguuaagacaaucaccaaugaucaaauugaggugacaaacgcuaccgaacuggugcagucuagcuccacaggcgagaucugcaauucuccgcaccagauccuugacggggaaaacuguacccugauugaugcccuccugggagacccccagugcgauggcuuucaaaauaaaaagugggaccuguucgucgagagaagcaaagcccauuccaacuguuauccuuacgaugugcccgacuaugcuucucuccggagccugguugccuccagcgggacgcuugaauuuaauaacgagucuuucaauuggaccggagugacacagaacggcaccuccagcgcuugcauccgcagaucuaauaacuccuuuuucagccggcugaauuggcucacacaccugaacuuuaaguacccugcccuuaacgucaccaugcccaauaacgagcaguucgauaagcuguauauuuggggcgugcaucacccugggacggacaaagaucagacauuucucuacgcgcaagccucuggacgcaucaccguuuccacaaagagaagccagcaggcugugauuccgaauaucggcucccggccccgcgucagaaacauuccuucucgggugagcaucuauuggaccaucgugaaacccggggacauucugcugaucaauuccaccggaaaccucauugccccucgcggcuacuucaagaucagaagcgggaaaucuuccauuaugcggagcgaugcucccaucggaaaguguaauucugccugcaucacaccgaacggcagcauuccuaaugacaagcccuuucagaacgucaaucgcaucacguacggcgcguguccuagauauguuaaacaaaacacccugaaacuugccacagggaugcggaaugugcccgaaaaacagacccgcggaauuuucggcgcuaucgccggguuuauugagaacggaugggaaggcaugguggacgggugguacggauucagacaccaaaauuccgagggccggggccaggcugccgaucugaagucuacacaggccgcuaucgaccagaucaacgggaaacucaacagacugauuggaaagaccaaugagaaauuccaucagaucgaaaaggaguuuagcgaagucgagggccgcauucaagaucuugaaaaguauguggaggacacgaaaaucgaucugugguccuacaacgcggagcuccugguugcccuggaaaaucagcacacaauugaccucaccgauagcgagaugaacaagcuguucgaaaagaccaagaaacagcuucgggagaaugcugaagacauggggaacggaugcuuuaagaucuaucauaagugugauaaugccugcauuggcucuaucagaaacgggacauacgaccccgauguguaucgcgacgaggcccugaauaaccgguuccagaucaaaggcgucgagcucaaguccggauacaaagacuggauucuguggaucagcuuugcuauuucuugcuuccuucuguguguggcccuccugggcuuuaucaugugggcgugccaaaaggggaauauuagauguaacaucugcaucuga

SEQ ID NO: 200411 - RNA, 1701 nt, Artificial Sequence
  derived and/or modified CDS sequence (opt5) from hemagglutinin__InfluenzaA__AFD64816
augaagaccaucauugcccugagcuacauccucugccugguguucgcucagaaacuucccgagaacgacaauuccacagccacgcugugucucggccaccaugcggucccuaacgggaccauuguuaagacaaucaccaaugaucaaauugaagugacaaacgcuaccgagcuggugcagucuagcuccacaggagaaaucugcaauucuccgcaccagauccuugacggcgagaacuguacccugauugaugcccuccugggggacccccagugcgauggauuucaaaauaaaaagugggaccuguucgucgaaagaagcaaagcccauuccaacuguuauccuuacgaugugcccgacuaugcuucucuccggagccugguugccuccagcggcacgcuugaguuuaauaacgagucuuucaauuggaccggggugacacagaacggaaccuccagcgcuugcaugcgcagaucuaauaacuccuuuuucagccggcugaauuggcucacacaccugaacuuuaaguacccugcccuuaacgucaccaugcccaauaacgaacaguucgauaagcuguauaucuggggcgugcaucacccuggcacggacaaagaucagauuuuucucuacgcgcaagccucugggcgcaucacaguuuccaccaagagaagccagcaggcugugauuccgaauaucggaucccggccccgcgucagaaacauuccuucucgggugagcaucuauuggacaaucgugaaacccggcgacauucugcugaucaauuccaccgggaaccucauugccccucgcggauacuucaagaucagaagcggcaaaucuuccauuaugcggagcgaugcucccaucgggaaguguaauucugccugcaucaccccgaacggaagcauuccuaaugacaagcccuuucagaacgucaaucgcaucacauacggcgcguguccuagauauguuaaacaaaacacgcugaaacuugccaccggcaugcggaaugugcccgagaagcagacacgcgggauuuucggagcuaucgccggcuuuauugaaaacgggugggagggaaugguggacggcugguacggguucagacaccaaaauuccgagggacggggccaggcugccgaucugaagucuacccaggccgcuaucgaccagaucaacggcaaacucaacagacugauugggaagacaaaugaaaaauuccaucagaucgagaaggaauuuagcgaggucgaaggacgcauucaagaucuugagaaguauguggaggacaccaaaaucgaucugugguccuacaacgcggaacuccugguugcccuggagaaucagcacacgauugaccucacagauagcgaaaugaacaagcuguucgagaaaaccaagaaacagcuucgggaaaaugcugaggacaugggcaacgggugcuuuaagaucuaucauaagugugauaaugccugcauuggaucuaucagaaacggcaccuacgaccacgauguguaucgcgacgaggcccugaauaaccgguuccagaucaaaggggucgaacucaaguccggcuacaaagacuggauucuguggaucagcuuugcuauuucuugcuuccuucuguguguggcccuccugggauuuaucaugugggcgugccaaaagggcaauauuagauguaacaucugcaucuga

SEQ ID NO: 200412 - RNA, 1701 nt, Artificial Sequence
  derived and/or modified CDS sequence (opt5) from hemagglutinin__InfluenzaA__AFD64818
augaagaccaucauugcccugagcuacauccucugccugguguucgcucagaaacuucccggcaacgacaauuccacagccacgcugugucucgggcaccaugcggucccuaacggaaccauuguuaagacaaucaccaaugaucaaauugaggugacaaacgcuaccgaacuggugcagucuagcuccacaggcgagaucugcaauucuccgcaccagauccuugacggggaaaacuguacccugauugaugcccuccugggagacccccagugcgauggcuuucaaaauaaaaagugggaccuguucgucgagagaagcaaagcccauuccaacuguuauccuuacgaugugcccgacuaugcuucucuccggagccugguugccuccagcgggacgcuugaauuuaauaacgagucuuucaauuggaccggagugacacagaacggcaccuccagcgcuugcauccgcagaucuaauaacuccuuuuucagccggcugaauuggcucacacaccugaacuuuaaguacccugcccuuaacgucaccaugcccaauaacgagcaguucgauaagcuguauauuuggggcgugcaucacccugggacggacaaagaucagacauuucucuacgcgcaagccucuggacgcaucaccguuuccacaaagagaagccagcaggcugugauuccgaauaucggcucccggccccgcgucagaaacauuccuucucgggugagcaucuauuggaccaucgugaaacccggggacauucugcugaucaauuccaccggaaaccucauugccccucgcggcuacuucaagaucagaagcgggaaaucuuccauuaugcggagcgaugcuccccugggaaaguguaucucugccugcaucacaccgaauggcagcauuccuaacgacaagcccuuucagaaugucaaccgcaucacguacggcgcguguccuagauauguuaaacaaaauacccuuaagcuggccacagggaugcggaacgugcccgaaaaacagacccgcggaauuuucggcgcuaucgccggguuuauugagaauggaugggaaggcaugguggacgggugguacggauucagacaccagaacuccgagggccggggccaagcugccgaucucaagucuacacaggccgcuaucgaccagaucaaugggaaacugaacagacuuauuggaaagaccaacgagaaauuccaucagaucgaaaaggaguuuagcgaagucgagggccgcauucaagaucuggaaaaguauguggaggacacgaaaaucgaucucugguccuacaaugcggagcugcugguugcccucgaaaaccagcacacaauugaccugaccgauagcgagaugaauaaacuuuucgaaaagaccaagaaacagcugcgggagaacgcugaagacauggggaauggaugcuuuaagaucuaucauaagugugauaacgccugcauuggcucuaucagaaaugggacauacgaccacgauguguaucgcgacgaggcccucaacaaucgguuccagaucaaaggcgucgagcugaaguccggauacaaagacuggauucuuuggaucagcuuugcuauuucuugcuuccugcucuguguggcccugcugggcuuuaucaugugggcgugccaaaaggggaacauuagauguaauaucugcaucuga

SEQ ID NO: 200413 - RNA, 1701 nt, Artificial Sequence
  derived and/or modified CDS sequence (opt5) from hemagglutinin__InfluenzaA__AFD64819
augaagaccaucauugcccugagcuacauccucugccugguguucgcucagaaacuucccggcaacgacaauuccacagccacgcugugucucgggcaccaugcggucccuaacggaaccauuguuaagacaaucaccaaugaucaaauugaggugacaaacgcuaccgaacuggugcagucuagcuccacaggcgagaucugcaauucuccgcaccagauccuugacggggaaaacuguacccugauugaugcccuccugggagacccccagugcgauggcuuucaaaauaaaaagugggaccuguucgucgagagaagcaaagcccauuccaacuguuauccuuacgaugugcccgacuaugcuucucuccggagccugguugccuccagcgggacgcuugaauuuaauaacgagucuuucaauuggaccggagugacacagaacggcaccuccagcgcuugcauccgcagaucuaauaacuccuuuuucagccggcugaauuggcucacacaccugaacuuuaaguacccugcccuuaacgucaccaugcccaauaacgagcaguucgauaagcuguauauuuggggcgugcaucacccugggacggacaaagaucagacauuucucuacgcgcaagccucuggacgcaucaccguuuccacaaagagaagccagcaggcugugauuccgaauaucggcucccggccccgcauuagaaacaucccuucucgggucagcaucuauuggaccauugugaaacccggggacauccugcugauuaauuccaccggaaaccucaucgccccucgcggcuacuucaagauuagaagcgggaaaucuuccaucaugcggagcgaugcucccaucggaaaguguauuucugccugcaucacaccgaauggcagcauuccuaacgacaagcccuuucagaaugugaaccgcaucacguacggcgcguguccuagauaugucaaacaaaauacccugaaacuugccacagggaugcggaacguucccgaaaaacagacccgcggaauuuucggcgcuaucgccggguuuaucgagaauggaugggaaggcaugguggacgggugguacggauucagacaccagaacuccgagggccggggccaagcugccgaucugaagucuacacaggccgcuauugaccagaucaaugggaaacucaacagacugauuggaaagaccaacgagaaauuccaucagaucgaaaaggaguuuagcgaaguggagggccgcauucaagaucuugaaaaguaugucgaggacacgaaaaucgaucugugguccuacaaugcggagcuccugguggcccuggaaaaccagcacacaauugaccucaccgauagcgagaugaauaagcuguucgaaaagaccaagaaacagcuucgggagaacgcugaagacauggggaauggaugcuuuaagaucuaucauaagugugauaacgccugcaucggcucuauuagaaaugggacauacgaccccgauguuuaucgcgacgaggcccugaacaaucgguuccagaucaaaggcguggagcucaaguccggauacaaagacuggauucuguggaucagcuuugcuauuucuugcuuccuucugugugucgcccuccugggcuuuaucaugugggcgugccaaaaggggaacaucagauguaauauuugcaucuga

SEQ ID NO: 200414 - RNA, 1701 nt, Artificial Sequence; identical to SEQ ID NO: 199054
  derived and/or modified CDS sequence (opt5) from hemagglutinin__InfluenzaA__AFD64820

SEQ ID NO: 200415 - RNA, 1701 nt, Artificial Sequence
  derived and/or modified CDS sequence (opt5) from hemagglutinin__InfluenzaA__AFD64822
augaagaccaucauugcccugagcuacauccucugccugguguucgcucagaaacuucccggcaacgacaauuccacagccacgcugugucucgggcaccaugcggucccuaacggaaccauuguuaagacaaucaccaaugaucaaauugaggugacaaacgcuaccgaacuggugcagucuagcuccacaggcgagaucugcaauucuccgcaccagauccuugacggggaaaacuguacccugauugaugcccuccugggagacccccagugcgauggcuuucaaaauaaaaagugggaccuguucgucgagagaagcaaagcccauuccaacuguuauccuuacgaugugcccgacuaugcuucucuccggagccugguugccuccagcgggacgcuugaauuuaauaacgagucuuucaauuggaccggagugacacagaacggcaccuccagcgcuugcaugcgcagaucuaauaacuccuuuuucagccggcugaauuggcucacacaccugaacuuuaaguacccugcccuuaacgucaccaugcccaauaacgagcaguucgauaagcuguauaucuggggcgugcaucacccugggacggacaaagaucagauuuuucucuacgcgcaagccucuggacgcaucacaguuuccaccaagagaagccagcaggcugugauuccgaauaucggcucccggccccgcgucagaaacauuccuucucgggugagcaucuauuggacaaucgugaaacccggggacauucugcugaucaauuccaccggaaaccucauugccccucgcggcuacuucaagaucagaagcgggaaaucuuccauuaugcggagcgaugcucccaucggaaaguguaauucugccugcaucaccccgaacggcagcauuccuaaugacaagcccuuucagaacgucaaucgcaucacauacggcgcguguccuagauauguuaaacaaaacacgcugaaacuugccaccgggaugcggaaugugcccgaaaaacagacacgcggaauuuucggcgcuaucgccggguuuauugagaacggaugggaaggcaugguggacgggugguacggauucagacaccaaaauuccgagggccggggccaggcugccgaucugaagucuacccaggccgcuaucgaccagaucaacgggaaacucaacagacugauuggaaagacaaaugagaaauuccaucagaucgaaaaggaguuuagcgaagucgagggccgcauucaagaucuugaaaaguauguggaggacaccaaaaucgaucugugguccuacaacgcggagcuccugguugcccuggaaaaucagcacacgauugaccucacagauagcgagaugaacaagcuguucgaaaagaccaagaaacagcuucgggagaaugcugaagacauggggaacggaugcuuuaagaucuaucauaagugugauaaugccugcauuggcucuaucagaaacgggaccuacgaccacgauguguaucgcgacgaggcccugaauaaccgguuccagaucaaaggcgucgagcucaaguccggauacaaagacuggauucuguggaucagcuuugcuauuucuugcuuccuucuguguguggcccuccugggcuuuaucaugugggcgugccaaaaggggaauauuagauguaacaucugcaucuga

SEQ ID NO: 200416 - RNA, 1701 nt, Artificial Sequence
  derived and/or modified CDS sequence (opt5) from hemagglutinin__InfluenzaA__AFD64823
augaagaccaucauugcccugagcuacauccucugccugguguucgcucagaaacuucccggcaacgacaauuccacagccacgcugugucucgggcaccaugcggucccuaacggaaccauuguuaagacaaucaccaaugaucaaauugaggugacaaacgcuaccgaacuggugcagucuagcuccacaggcgagaucugcaauucuccgcaccagauccuugacggggaaaacuguacccugauugaugcccuccugggagacccccagugcgauggcuuucaaaauaaaaagugggaccuguucgucgagagaagcaaagcccauuccaacuguuauccuuacgaugugcccgacuaugcuucucuccggagccugguugccuccagcgggacgcuugaauuuaauaacgagucuuucaauuggaccggagugacacagaacggcaccuccagcgcuugcauccgcagaucuaauaacuccuuuuucagccggcugaauuggcucacacaccugaacuuuaaguacccugcccuuaacgucaccaugcccaauaacgagcaguucgauaagcuguauauuuggggcgugcaucacccugggacggacaaagaucagaucuuucucuacgcgcaagccgcuggacgcauuacaguuucuaccaagagaucccagcaggccgugaucccgaauauuggcagccggccccgcgucagaaacaucccuucccgggugucuaucuauuggacaauugugaaacccggggacauccugcugauuaauagcaccggaaaccucaucgcuccucgcggcuacuucaagauuagauccgggaaaagcucuaucaugcgguccgaugcccccaucggacgcuguaauagcgcgugcauuaccccgaacggcucuaucccuaaugacaagcccuuucagaacgucaauagaauuacauacggcgccuguccucgguauguuaagcaaaacacgcugaaacuugcuaccgggaugcgcaaugugcccgaaaagcagacaagaggaaucuucggcgccauugcuggguuuaucgagaacggaugggaaggcaugguggacgggugguacggauuccggcaccagaauagcgagggcagaggccaagccgccgaucugaaauccacccaggcugcgaucgaccagauuaacgggaagcucaaccgccugaucggaaaaacaaaugagaaguuccaucagauugaaaaagaguuuucugaagucgagggccggauccaagaucuugaaaaguauguggaggacaccaagauugaucuguggagcuacaacgccgagcuccugguugcucuggaaaaucagcacacgaucgaccucacagauuccgagaugaacaaacuguucgaaaagaccaaaaagcagcuuagagagaaugccgaagacauggggaacggaugcuuuaaaauuuaucauaagugugauaaugccugcaucggcagcauccgcaacgggaccuacgaccacgauguguaucgggacgaggcucugaauaacagauuccagauuaagggcgucgagcucaaaucuggauacaaggacuggauccuguggauuuccuuugccaucagcugcuuccuucuguguguggcgcuccugggcuuuauuaugugggcuugccaaaaagggaauauccgcuguaacaucugcauuuga

SEQ ID NO: 200417 - RNA, 1701 nt, Artificial Sequence
  derived and/or modified CDS sequence (opt5) from hemagglutinin__InfluenzaA__AFD64824
augaagaccaucauugcccugagcuacauccucugccugguguucgcucagaaacuucccggcaacgacaauuccacagccacgcugugucucgggcaccaugcggucccuaacggaaccauuguuaagacaaucaccaaugaucaaauugaggugacaaacgcuaccgaacuggugcagucuagcuccacaggcgagaucugcaauucuccgcaccagauccuugacggggaaaacuguacccugauugaugcccuccugggagacccccagugcgauggcuuucaaaauaaaaagugggaccuguucgucgagagaagcaaagcccauuccaacuguuauccuuacgaugugcccgacuaugcuucucuccggagccugguugccuccagcgggacgcuugaauuuaauaacgagucuuucaauuggaccggagugacacagaacggcaccuccagcgcuugcauccgcagaucuaauaacuccuuuuucagccggcugaauuggcucacacaccugaacuuuaaguacccugcccuuaacgucaccaugcccaauaacgagcaguucgauaagcuguauauuuggggcgugcaucacccugggacggacaaagaucagacauuucucuacgcgcaagccucuggacgcaucaccguuuccacaaagagaagccagcaggcugugauuccgaauaucggcucccggccccgcgucagaaacauuccuucucgggugagcaucuauuggaccaucgugaaacccggggacauucugcugaucaauuccaccggaaaccucauugccccucgcggcuacuucaagaucagaagcgggaaaucuuccauuaugcggagcgaugcucccaucggaaaguguaauucugccugcaucacaccgaacggcagcauuccuaaugacaagcccuuucagaacgucaaucgcaucacguacggcgcguguccuagauauguuaaacaaaacacccugaaacuugccacagggaugcggaaugugcccgaaaaacagacccgcggaauuuucggcgcuaucgccggguuuauugagaacggaugggaaggcaugguggacgggugguacggauucagacaccaaaauuccgagggccggggccaggcugccgaucugaagucuacacaggccgcuaucgaccagaucaacgggaaacucaacagacugauuggaaagaccaaugagaaauuccaucagaucgaaaaggaguuuagcgaagucgagggccgcauucaagaucuugaaaaguauguggaggacacgaaaaucgaucugugguccuacaacgcggagcuccugguugcccuggaaaaucagcacacaauugaccucaccgauagcgagaugaacaagcuguucgaaaagaccaagaaacagcuucgggagaaugcugaagacauggggaacggaugcuuuaagaucuaucauaagugugauaaugccugcauuggcucuaucagaaacgggacauacgaccacgauguguaucgcgacgaggcccugaauaaccgguuccagaucaaaggcgucgagcucaaguccggauacaaagacuggauucuguggaucagcuuugcuaccucuugcuuccuucuguguguggcccuccugggcuuuauuaugugggcgugccaaaaggggaauaucagauguaacauuugcaucuga

SEQ ID NO: 200418 - RNA, 1701 nt, Artificial Sequence; identical to SEQ ID NO: 200406
  derived and/or modified CDS sequence (opt5) from hemagglutinin__InfluenzaA__AFD64825

SEQ ID NO: 200419 - RNA, 1701 nt, Artificial Sequence; identical to SEQ ID NO: 200406
  derived and/or modified CDS sequence (opt5) from hemagglutinin__InfluenzaA__AFD64827

SEQ ID NO: 200420 - RNA, 1701 nt, Artificial Sequence
  derived and/or modified CDS sequence (opt5) from hemagglutinin__InfluenzaA__AFD64828
augaagaccaucauugcccugagcuacauccucugccugguguucgcucagaaacuucccggcaacgacaauuccacagccacgcugugucucgggcaccaugcggucccuaacggaaccauuguuaagacaaucaccaaugaucaaauugaggugacaaacgcuaccgaacuggugcagucuagcuccacaggcgagaucugcaauucuccgcaccagauccuugacggggaaaacuguacccugauugaugcccuccugggagacccccagugcgauggcuuucaaaauaaaaagugggaccuguucgucgagagaagcaaagcccauuccaacuguuauccuuacgaugugcccgacuaugcuucucuccggagccugguugccuccagcgggacgcuugaauuuaauaacgagucuuucaauuggaccggagugacacagaacggcaccuccagcgcuugcauccgcagaucuaauaacuccuuuuucagccggcugaauuggcucacacaccugaacuuuaaguacccugcccuuaacgucaccaugcccaauaacgagcaguucgauaagcuguauauuuggggcgugcaucacccugggacggacaaagaucagaucuuucucuacgcgcaagccucuggacgcauuacaguuuccaccaagagaagccagcaggcugugaucccgaauauuggcucccggccccgcgucagaaacaucccuucucgggugagcaucuauuggacaauugugaaacccggggacauccugcugauuaauuccaccggaaaccucaucgccccucgcggcuacuucaagauuagaagcgggaaaucuuccaucaugcggagcgaugcucccaucggaaaguguaauucugccugcauuaccccgaacggcagcaucccuaaugacaagcccuuucagaacgucaaucgcauuacauacggcgcguguccuagauauguuaaacaaaacacgcugaaacuugccaccgggaugcggaaugugcccgaaaaacagacacgcggaaucuucggcgcuauugccggguuuaucgagaacggaugggaaggcaugauggacgggugguacggauucagacaccaaaauuccgagggccggggccaggcugccgaucugaagucuacccaggccgcuaucgaccagauuaacgggaaacucaacagacugaucggaaagacaaaugagaaauuccaucagauugaaaaggaguuuagcgaaguggagggccgcauccaagaucuugaaaaguaugucgaggacaccaaaauugaucugugguccuacaacgcggagcuccugguggcccuggaaaaucagcacacgaucgaccucacagauagcgagaugaacaagcuguucgaaaagaccaagaaacagcuucgggagaaugcugaagacauggggaacggaugcuuuaagauuuaucauaagugugauaaugccugcaucggcucuaucagaaacgggaccuacgaccccgauguuuaucgcgacgaggcccugaauaaccgguuccagauuaaaggcguggagcucaaguccggauacaaagacuggauccuguggauuagcuuugcuaucucuugcuuccuucugugugucgcccuccugggcuuuauuaugugggcgugccaaaaggggaauaucagauguaacaucugcauuuga

SEQ ID NO: 200421 - RNA, 1701 nt, Artificial Sequence; identical to SEQ ID NO: 200415
  derived and/or modified CDS sequence (opt5) from hemagglutinin__InfluenzaA__AFD64830

SEQ ID NO: 200422 - RNA, 1701 nt, Artificial Sequence; identical to SEQ ID NO: 199054
  derived and/or modified CDS sequence (opt5) from hemagglutinin__InfluenzaA__AFD98095

SEQ ID NO: 200423 - RNA, 1701 nt, Artificial Sequence
  derived and/or modified CDS sequence (opt5) from hemagglutinin__InfluenzaA__AFD98106
augaagaccaucauugcccugagcuacauccucugccugguguucgcucagaaacuucccggcaacgacaauuccacagccacgcugugucucgggcaccaugcggucccuaacggaaccauuguuaagacaaucaccaaugaucaaauugaggugacaaacgcuaccgaacuggugcagucuagcuccgccggcgagaucugcgacucuccgcaccauauccuugauggggaaaauuguacacugauugacgcccuccugggagauccccagugcgacggcuuucagaacaaaaagugggaucuguucgucgagagaagccgggcuuauuccaauuguuacccuuaugacgugcccgauuacgccucucuccgcagccugguugcuuccagcgggacccuugaauuuaacaaugagucuuucaacuggacgggagugacccaaaauggcacauccagcgccugcaucagacggucuaacaauuccuuuuucagccgccugaacuggcucacccaccugaauuuuaaauauccugcgcuuaacgucacaaugcccaacaaugagcaguucgacaagcuguacauuuggggcgugcaucacccugggaccgauaaggaccagaucuuucucuaugcccaggcuucuggaagaauuacgguuuccacaaaacggagccaacaggccgugaucccgaacauuggcucccgccccagaguccggaauaucccuucucgcaucagcauuuacuggaccaucgugaagcccggggauauucugcugaucaacuccacaggaaaucucauugcuccuagaggcuacuucaaaauccggagcgggaagucuuccaucaugcgcagcgacgcccccauuggaaaauguaacucugaaugcaucaccccgaauggcagcauuccuaacgacaagcccuuucagaaugugaacagaaucaccuauggcgcguguccucgguacgucaagcaguccacacugaaacuugccacggggaugcgcaauguucccgagaagcaaaccagaggaauuuucggcgcuaucgccggguuuaucgaaaacggaugggagggcaugauggaugggugguauggauuccggcaccaaaauucugagggcagaggccaggcugccgaccugaaaagcacacaggccgcuauugaucagaucaacgggaagcucaaucgccugauuggaaaaaccaacgaaaaguuccaucagaucgagaaagaauuuuccgagguggaaggccggauucaggaccuugagaaguacguggaggauacaaagaucgaccuguggagcuauaacgcggaacuccuggucgcccuggagaaucaacacaccauugaucucacggacucugaaaugaacaaacuguucgagaagaccaaaaagcagcuuagagaaaaugcugaggauauggggaacggaugcuuuaaaaucuaccauaagugugacaaugccugcaucggcuccauucgcaacgggacauaugaucacgacguguaccgggacgaggcccugaauaacagauuccagaucaagggcguugaacucaaaagcggauacaaggauuggauucuguggaucucuuuugcuauuuccugcuuccuucuguguguggcccuccugggcuuuaucaugugggcgugccagaaagggaauauccgcuguaacauuugcaucuga

SEQ ID NO: 200424 - RNA, 1701 nt, Artificial Sequence
  derived and/or modified CDS sequence (opt5) from hemagglutinin__InfluenzaA__AFD98128
augaagaccaucauugcccugagcuacauccucugccugguguucgcucagaaacuucccggcaacgacaauuccacagccacgcugugucucgggcaccaugcggucccuaacggaaccauuguuaagacaaucaccaaugaucaaauugaggugacaaacgcuaccgaacuggugcaaaauucuagcacaggcgagaucugcaacuccccgcaccagauccuugacggggaaaauuguacccugauugaugcccuccugggagacccccagugcgauggcuuucagaacaaaaagugggaccuguucgucgagagaucuaaagcccauagcaauuguuauccuuacgaugugcccgacuaugcuucccuccggucucugguugccagcuccgggacgcuugaauuuaacaaugagagcuucaacuggaccggagugacacagaauggcaccucuuccgcuugcauccgcaagagcaacaauuccuuuuucucuagacugaacuggcucacacaccugaacuuuaaguacccugcccuuaaugucaccaugcccaacaaugagcaguucgauaaacuguauauuuggggcgugcaucacccugggacggacaaggaucagaucuuucucuacgcgcaagccgcuggacggauuacaguuagcaccaaacgcucucagcaggccgugaucccgaacauuggcuccagaccccggguccgcaauaucccuagcagaguguccaucuauuggacaauugugaagcccggggacauccugcugauuaacucuaccggaaaucucaucgcuccucggggcuacuucaaaauucgcagcgggaaguccagcaucaugagaucugaugcccccaucggaaaguguaacuccgcgugcauuaccccgaauggcagcaucccuaacgacaaacccuuucagaaugucaaccggauuacauacggcgccuguccucgcuauguuaagcaaaauacgcugaaacuugcuaccgggaugagaaacgugcccgaaaagcagacacggggaaucuucggcgccauugcuggguuuaucgagaauggaugggaaggcaugguggacgggugguacggauuccgccaccagaacucugagggcagaggccaagccgccgaucugaaaagcacccaggcugcgaucgaccagauuaacgggaagcucaaucggcugaucggaaaaacaaacgagaaguuccaucagauugaaaaggaguuuuccgaagucgagggcagaauccaagaucuugaaaaauauguggaggacaccaagauugaucuguggucuuacaaugccgagcuccugguugcucuggaaaaccagcacacgaucgaccucacagauagcgagaugaauaaacuguucgaaaagaccaaaaagcagcuucgcgagaacgccgaagacauggggaauggaugcuuuaagauuuaucauaaaugugauaacgccugcaucggcuccauccggaaugggaccuacgaccacgauguguauagagacgaggcucugaacaaucgcuuccagauuaagggcgucgagcucaaaagcggauacaaggacuggauccuguggauuucuuuugccaucuccugcuuccuucuguguguggcgcuccugggcuuuauuaugugggcuugccaaaaagggaacauccgguguaauaucugcauuuga

SEQ ID NO: 200425 - RNA, 1701 nt, Artificial Sequence; identical to SEQ ID NO: 199054
  derived and/or modified CDS sequence (opt5) from hemagglutinin__InfluenzaA__AFD98139

SEQ ID NO: 200426 - RNA, 1701 nt, Artificial Sequence
  derived and/or modified CDS sequence (opt5) from hemagglutinin__InfluenzaA__AFD98161
augaagaccaucauugcccugagcuacauccucugccugguguucgcucagaaacuucccggcaacgacaauuccacagccacgcugugucucgggcaccaugcggucccuaacggaaccauuguuaagacaaucaccaaugaucaaauugaggugacaaacgcuaccgaacuggugcaaaauucuagcgccggcgagaucugcgacuccccgcaccauauccuugauggggaaaacuguacacugauugacgcccuccugggagauccccagugcgacggcuuucagaauaaaaagugggaucuguucgucgagagaucucgggcuuauagcaacuguuacccuuaugacgugcccgauuacgccucccuccgcucucugguugcuagcuccgggacccuugaauuuaauaacgagagcuucaauuggacgggagugacccagaacggcacaucuuccgccugcaucagacggagcaauaacuccuuuuucucucgccugaauuggcucacccaccugaacuuuaaauauccugcgcuuaacgucacaaugcccaauaacgagcaguucgacaagcuguacauuuggggcgugcaucacccugggaccgauaaggaccagaucuuucucuaugcccaggcuagcggaagaauuacgguuucuacaaaacggucccaacaggccgugaucccgaauauuggcagccgccccagaguccggaacaucccuucccgcaucucuauuuacuggaccaucgugaagcccggggauauucugcugaucaauagcacaggaaaccucauugcuccuagaggcuacuucaaaauccgguccgggaaaagcucuaucaugcgcuccgacgcccccauuggaaaauguaauagcgaaugcaucaccccgaacggcucuauuccuaaugacaagcccuuucagaacgugaauagaaucaccuauggcgcguguccucgguacgucaagcagagcacacugaaacuugccacggggaugcgcaacguucccgagaagcaaaccagaggaauuuucggcgcuaucgccggguuuaucgaaaauggaugggagggcaugauggaugggugguauggauuccggcaccagaacuccgagggcagaggccaggcugccgaccugaaaucuacacaagccgcuauugaucagaucaaugggaagcucaaccgccugauuggaaaaaccaacgaaaaguuccaucagaucgagaaagaauuuagcgagguggaaggccggauucaggaccuugagaaguacguggaggauacaaagaucgaccugugguccuauaaugcggaacuccuggucgcccuggagaaccaacacaccauugaucucacggacagcgaaaugaauaaacuguucgagaagacaaagaagcagcuuagagaaaacgcugaggauauggggaauggaugcuuuaaaaucuaccauaagugugacaacgccugcaucggcucuauucgcaaugggaccuaugaucacgacguguaccgggacgaggcccugaacaauagauuccagaucaagggcguugaacucaaauccggauacaaggauuggauucuguggaucagcuuugcuauuucuugcuuccuucuguguguggcccuccugggcuuuaucaugugggcgugccagaaagggaacauccgcuguaauauuugcaucuga

SEQ ID NO: 200427 - RNA, 1701 nt, Artificial Sequence
  derived and/or modified CDS sequence (opt5) from hemagglutinin__InfluenzaA__AFD98172
augaagaccaucauugcccugagcuacauccucugccugguguucgcucagaaacuucccggcaacgacaauuccacagccacgcugugucucgggcaccaugcggucccuaacggaaccauuguuaagacaaucaccaaugaucaaauugaggugacaaacgcuaccgaacuggugcagucuagcuccgccggcgagaucugcgacucuccgcaccauauccuugauggggaaaauuguacacugauugacgcccuccugggagauccccagugcgacggcuuucagaacaaaaagugggaucuguucgucgagagaagccgggcuuauuccaauuguuacccuuaugacgugcccgauuacgccucucuccgcagccugguugcuuccagcgggacccuugaauuuaacaaugagucuuucaacuggacgggagugacccaaaauggcacauccagcgccugcaucagacggucuaacaauuccuuuuucagccgccugaacuggcucacccaccugaauuuuaaauauccugcgcuuaacgucacaaugcccaacaaugagcaguucgacaagcuguacauuuggggcgugcaucacccugggaccgauaaggaccagaucuuucucuaugcccaggcuucuggaagaauuacgguuuccacaaaacggagccaacaggccgugaucccgaacauuggcucccgccccagaguccggaauaucccuucucgcaucagcauuuacuggaccaucgugaagcccggggauauucugcugaucaacuccacaggaaaucucauugcuccuagaggcuacuucaaaauccggagcgggaagucuuccaucaugcgcagcgacgcccccauuggaaaauguaacucugaaugcaucaccccgaauggcagcauuccuaacgacaagcccuuucagaaugugaacagaaucaccuauggcgcguguccucgguacgucaagcaguccacacugaaacuugccacggggaugcgcaauguucccgagaagcaaaccagaggaauuuucggcgcuaucgccggguuuaucgaaaacggaugggagggcaugauggaugggugguauggauuccggcaccaaaauucugagggcagaggccaggcugccgaccugaaaagcacacaggccgcuauugaucagaucaacgggaagcucaaucgccugauuggaaaaaccaacgaaaaguuccaucagaucgagaaagaauuuuccgagguggaaggccggauucaggaccuugagaaguacguggaggauacaaagaucgaccuguggagcuauaacgcggaacuccuggucgcccuggagaaucaacacaccauugaucucacggacucugaaaugaacaaacuguucgagaagaccaaaaagcagcuuagagaaaaugcugaggauauggggaacggaugcuuuaaaaucuaccauaagugugacaaugccugcaucggcuccauucgcaacgggacauaugaucacgacguguaccgggacgaggcccugaauaacagauuccagaucaagggcguugaacucaaaagcggauacaaggauugggugcuguggauuucuuuugcuaucuccugcuuccuucugugugucgcccuccugggcuuuauuaugugggcgugccagaaagggaauauccgcuguaacaucugcauuuga

SEQ ID NO: 200428 - RNA, 1701 nt, Artificial Sequence
  derived and/or modified CDS sequence (opt5) from hemagglutinin__InfluenzaA__AFD98183
augaagaccaucauugcccugagcuacauccucugccugguguucgcucagaaacuucccggcaacgacaauuccacagccacgcugugucucgggcaccaugcggucccuaacggaaccauuguuaagacaaucaccaaugaucaaauugaggugacaaacgcuaccgaacuggugcagucuagcuccacaggcgagaucugcaauucuccgcaccagauccuugacggggaaaacuguacccugauugaugcccuccugggagacccccagugcgauggcuuucaaaauaaaaagugggaccuguucgucgagagaagcaaagcccauuccaacuguuauccuuacgaugugcccgacuaugcuucucuccggagccugguugccuccagcgggacgcuugaauuuaauaacgagucuuucaauuggaccggagugacacagaacggcaccuccagcgcuugcauccgcagaucuaauaacuccuuuuucagccggcugaauuggcucacacaccugaacuuuaaguacccugcccuuaacgucaccaugcccaauaacgagcaguucgauaagcuguauauuuggggcgugcaucacccugggacggacaaagaucagaucuuucucuacgcgcaagccucuggacgcauuacaguuuccaccaagagaagccagcaggcugugcugccgaauaucggcucccggccccgcgucagaaacauuccuucucgggugagcaucuauuggacaaucgugaaacccggggacauucugcucaucaauuccaccggaaaccugauugccccucgcggcuacuucaagaucagaagcgggaaaucuuccauuaugcggagcgaugcucccaucggaaaguguaauucuaccugcaucacaccgaacggcagcauuccuaaugacaagcccuuucagaacgucaaucgcaucacguacggcgccuguccuagauauguuaaacaaaacacccuuaagcuggcgacagggaugcggaaugugcccgaaaaacagacccgcggaauuuucggcgccaucgcuggguuuauugagaacggaugggaaggcaugguggacgggugguacggauucagacaccaaaauuccgagggccggggccaggccgcugaucucaagucuacacaggccgccaucgaccagaucaacgggaaacugaacagacuuauuggaaagaccaaugagaaauuccaucagaucgaaaaggaguuuagcgaagucgagggccgcauucaagaucuggaaaaguauguggaggacacgaaaaucgaucucugguccuacaacgcugagcugcugguugcgcucgaaaaucagcacacaauugaccugaccgauagcgagaugaacaaacuuuucgaaaagaccaagaaacagcugcgggagaaugccgaagacauggggaacggaugcuuuaagaucuaucauaagugugauaaugcuugcauuggcucuaucagaaacgggacauacgaccacgauguguaucgcgacgaggcccucaauaaccgguuccagaucaaaggcgucgagcugaaguccggauacaaagacuggauucuuuggaucagcuuugccauuucuugcuuccugcucuguguggcucugcugggcuuuaucaugugggccugccaaaaggggaauauuagauguaacaucugcaucuga

SEQ ID NO: 200429 - RNA, 1701 nt, Artificial Sequence; identical to SEQ ID NO: 198927
  derived and/or modified CDS sequence (opt5) from hemagglutinin__InfluenzaA__AFD98194

SEQ ID NO: 200430 - RNA, 1701 nt, Artificial Sequence; identical to SEQ ID NO: 198981
  derived and/or modified CDS sequence (opt5) from hemagglutinin__InfluenzaA__AFD98205

SEQ ID NO: 200431 - RNA, 1701 nt, Artificial Sequence; identical to SEQ ID NO: 200423
  derived and/or modified CDS sequence (opt5) from hemagglutinin__InfluenzaA__AFD98215

SEQ ID NO: 200432 - RNA, 1701 nt, Artificial Sequence; identical to SEQ ID NO: 199054
  derived and/or modified CDS sequence (opt5) from hemagglutinin__InfluenzaA__AFD98226

SEQ ID NO: 200433 - RNA, 1701 nt, Artificial Sequence
  derived and/or modified CDS sequence (opt5) from hemagglutinin__InfluenzaA__AFD98237
augaagaccaucauugcccugagcuacauccucugccugguguccgcucagaaacuucccggcaacgacaauucuacagccacgcugugucucgggcaccaugcggucccuaacggaaccauuguuaagacaaucaccaaugaucaaauugaggugacaaacgcuaccgaacuggugcagagcuccucuacaggcgagaucugcaauagcccgcaccagauccuugacggggaaaacuguacccugauugaugcccuccugggagacccccagugcgauggcuuccaaaauaaaaagugggaccuguuugucgagagauccaaagcccauucuaacuguuauccuuacgaugugcccgacuaugcuagccuccggucccugguugccagcucugggacgcuugaguucaauaacgaauccuuuaauuggaccggagugacacagaacggcaccagcucugcuugcauccgcagauccaauaacagcuucuuuucucggcugaauuggcucacacaccugaacuucaaguacccugcccuuaacgucaccaugcccaauaacgagcaguuugauaagcuguauauuuggggcgugcaucacccugggacggacaaagaucagaucuuccucuacgcgcaagccuccggacgcauuacaguuagcaccaagagaucccagcaggcugugaucccgaauauuggcucucggccccgcgucagaaacaucccuagccggguguccaucuauuggacaauugugaaacccggggacauccugcugauuaauagcaccggaaaccucaucgccccucgcggcuacuuuaagauuagaucugggaaauccagcaucaugcggucugaugcucccaucggaaaguguaauagcgccugcauuaccccgaacggcuccaucccuaaugacaagcccuuccagaacgucaaucgcauuacauacggcgcguguccuagauauguuaaacaaaacacgcugaaacuugccaccgggaugcggaaugugcccgaaaaacagacacgcggaaucuuuggcgcuauugccggguucaucgagaacggaugggaaggcaugguggacgggugguacggauuuagacaccagaauagcgagggccggggccaagcugccgaucugaagucuacccaggccgcuaucgaccagauuaacgggaaacucaacagacugaucggaaagacaaaugagaaauuccaucagauugaaaaggaguucuccgaagucgagggccgcauccaagaucuugaaaaguauguggaggacaccaaaauugaucuguggagcuacaacgcggagcuccugguugcccuggaaaaucagcacacgaucgaccucacagauucugagaugaacaagcuguuugaaaagaccaagaaacagcuucgggagaaugcugaagacauggggaacggaugcuucaagauuuaucauaagugugauaaugccugcaucggcuccaucagaaacgggaccuacgaccacgauguguaucgcgacgaggcccugaauaaccgguuucagauuaaaggcgucgagcucaagagcggauacaaagacuggauccuguggauuucuuucgcuaucuccugcuuucuucuguguguggcccuccugggcuucauuaugugggcgugccaaaaggggaauaucagauguaacaucugcauuuga

SEQ ID NO: 200434 - RNA, 1701 nt, Artificial Sequence; identical to SEQ ID NO: 200426
  derived and/or modified CDS sequence (opt5) from hemagglutinin__InfluenzaA__AFD98248

SEQ ID NO: 200435 - RNA, 1701 nt, Artificial Sequence
  derived and/or modified CDS sequence (opt5) from hemagglutinin__InfluenzaA__AFD98259
augaagaccaucauugcccugagcuacauccucugccugguguucgcucagaaacuucccggcaacgacaauuccacagccacgcugugucucgggcaccaugcggucccuaacggaaccauuguuaagacaaucaccaaugaucaaauugaggugacaaacgcuaccgaacuggugcagucuagcuccgccggcgagaucugcgacucuccgcaccauauccuugauggggaaaauuguacacugauugacgcccuccugggagauccccagugcgacggcuuucagaacaaaaagugggaucuguucgucgagagaagcaaggcuuauuccaauuguuacccuuaugacgugcaagauuacgccucucuccggagccugguugcuuccagcgggacccuugaauuuaacaaugagucuuucaacuggacgggagugacccagaauggcacauccagcgccugcauccgcagaucuaacaauuccuuuuucagccggcugaacuggcucacccaccugaauuuuaaguaucccgcgcuuaacgucacaaugccuaacaaugagcaguucgacaagcuguacauuuggggcgugcaucaccccgggaccgauaaagaccagaucuuucucuaugcccaggcuucuggacgcauuacgguuuccacaaagagaagccagcaggccgugaucccuaacauuggcucccggccgcgcgucagaaauauccccucucggaucagcauuuacuggaccaucgugaaaccuggggauauucugcugaucaacuccacaggaaaucucauugcuccccgcggcuacuucaagaucagaagcgggaaaucuuccaucaugcggagcgacgccccuauuggaaaguguaacucugaaugcaucacccccaauggcagcauuccgaacgacaagccuuuucagaaugugaaccgcaucaccuauggcgcgugucccagauacgucaaacaauccacacugaaacuugccacggggaugcggaauguuccugagaaacagacccgcggaauuuucggcgcuaucgccggguuuaucgaaaacggaugggagggcaugauggaugggugguauggauucagacaccaaaauucugagggccggggccaagcugccgaccucaagagcacacaggccgcuauugaucagaucaacgggaaacugaauagacugauuggaaagaccaacgaaaaauuccaucagaucgagaaggaauuuuccgagguggaaggccgcauucaagaccuugagaaguacguggaggauacaaaaaucgaccuguggagcuauaacgcggaacuccuggucgcccuggagaaucagcacaccauugaucucacggacucugaaaugaacaagcuguucgagaaaacaaagaaacagcuucgggaaaaugcugaggauauggggaacggaugcuuuaagaucuaccauaagugugacaaugccugcaucggcuccauuagaaacgggaccuaugaucacgacguguaccgcgacgaggcccugaauaaccgguuccagaucaaaggcguugaacucaagagcggauacaaagauuggauucuguggaucucuuuugcuauuuccugcuuccuucuguguguggcccuccugggcuuuaucaugugggcgugccaaaaggggaauaucagauguaacauuugcaucuga

SEQ ID NO: 200436 - RNA, 1701 nt, Artificial Sequence
  derived and/or modified CDS sequence (opt5) from hemagglutinin__InfluenzaA__AFD98270
augaaggccauccuggugguccuccuguacaccuucguuacagcuaacgccgacacgcuuugcauuggcuaucacgcgaauaacagcaccgauacaguggacaccgugcuggagaagaaugucacagugacccauuccguuaaccuccuggaagauaagcacaaugggaaacuuuguaagcugagaggagugacaccccuccaucugggcaaaugcaacaucgcuggguggauucugggaaauccugagugugaaucucucagcaccgccuccucuuggagcuacaucgucgagacguccucuagcgacaacgggaccugcuauccgggcgauuuuauuaauuacgaagaacugcgggagcagcuuuccagcgugucuuccuucgaacgcuuugagaucuuccccaacacaagcucuuggccuaaucacgacuccaacaagggaguuaccgccgcuuguccccaugccggcgcuaagagcuuuuauaaaaaucugaucuggcucgugaagaaaggcaacucuuacccuaagcuguccaaaagcuauauuaaugauaaggggaaggaaguccuugugcuguggggaauccaccaccccuccacaaccgccgaccaacagucucucuaccagaacgcggaugccuacguguucgucggcacgagcagauauuccaaaaaguuuaaaccugagauugcuauccggccgaagguucgcgaccaggaggggagaaugaacuacuauuggacacugguggaacccggagauaaaauuaccuucgaggccacaggcaaucugguggucccucgguacgcuuuugccauggaacgcaacgcggggagcggaaucauuaucucugacacccccgugcaugauugcaauaccacaugucaaacgccuaagggcgccaucaacaccucccuccccuuccagaauauucacccgaucacaauuggcaaaugcccuaaguauguuaagagcaccaaacugagacuugcuacagggcugcggaacgugcccucuauccagagccgcggacucuuuggcgccauugcuggguucaucgagggaggcuggaccgggauggucgacggaugguacggcuaucaucaccagaaugaacaaggcuccggguacgccgccgaccugaagucuacgcagaacgcuaucgauaaaauuacaaauaaggugaacagcguuaucgagaaaaugaauacccaguuuaccgcggugggaaaggaguucaaccaccuugaaaagagaauugagaaucugaacaaaaaggucgacgauggcuuccucgacaucuggacauacaaugccgaacugcuggugcuccuggagaacgaacggacccuugauuaucaugacuccaacgucaaaaaucuguacgagaaggugcgcaaccagcucaaaaauaacgcuaaggagauugggaauggauguuuugaguucuaucacaagugcgauaacacauguauggagagcguuaaaaauggcacguacgacuauccuaaguacucugaagaggccaaacugaacagagaagagaucgauggggugaaacuugaguccacccggaucuaucaaauucuggccaucuacagcacagucgcuucuucccucgugcugguugugagccugggcgccauuuccuuuuggaugugcucuaauggaagccuccagugccgcaucuguauuuga

SEQ ID NO: 200437 - RNA, 1701 nt, Artificial Sequence
  derived and/or modified CDS sequence (opt5) from hemagglutinin__InfluenzaA__AFD98280
augaaggccauccuggugguccuccuguacaccuucgcuacagccaacgcggacacgcuuugcauuggcuaucacgcuaauaacagcaccgauacaguugacaccgugcuggagaaaaaugugacagucacccauuccgugaaccuccuggaagauaagcacaaugggaaacuuuguaagcugagaggaguugcuccccuccaucugggcaaaugcaacaucgccggguggauucugggaaauccugagugugacucucucagcacagcccgguccuggucuuacaucguggaaaccagcuccucugauaacggcacgugcuauccgggggacuuuauugauuacgaggaacugcgcgagcagcuuagcuccgucagcucuuucgagagauuugaaaucuuccccaagaccuccagcuggccuaaucacgacucuaacaagggagugacagccgcuuguccccaugccggcgcgaaaggcuuuuauaagaaucugaucuggcucguuaaaaaggggaacuccuacccuaaacugagcaagucuuauauuaaugauaagggaaaagaggugcuuguccuguggggcauccaccaccccuccaccacagccgaccaacagagccucuaccagaacgcugauaccuacguguucguggggacgucccgguauucuaagaaauuuaagccugaaauugccauccgcccgaaagucagagaccaggagggacggaugaauuacuauuggacacugguugagcccggcgauaagauuaccuucgaagcuacagggaaccugguggugccucgcuacgccuuugcgauggagagaaacgccggaagcggcaucauuaucuccgacacccccguccaugacugcaauaccacaugucaaacgccuaaaggcgcuaucaacaccagccuccccuuccagaauauucacccgaucacaauugggaagugcccuaaguaugugaaaucuaccaagcugcggcuugccacaggacugcgcaacguucccuccauccagagcagaggccucuuuggggcuauugccggauucaucgaaggcggguggaccggaaugguggauggcugguacggcuaucaucaccagaaugagcaagggucuggauacgccgcugaccugaaaagcacgcagaacgcgaucgauaagauuacaaauaaagucaacuccgugaucgaaaagaugaauacccaguuuaccgccguuggcaaggaguucaaccaccuugagaaacggauugaaaaucugaacaagaaaguggacgauggguuccucgacaucuggacauacaaugcugagcugcugguccuccuggaaaacgagcgcacccuugauuaucaugacucuaaugugaagaaccuguacgaaaaagucagaaaccagcucaagaauaacgccaaggagauuggaaauggcuguuuugaguucuaucacaaaugcgauaacacauguauggaaagcgugaagaaugggacguacgacuauccuaaauacuccgaggaagccaagcugaaccgggaggaaaucgauggcguuaaacuugagagcacccgcaucuaucaaauucuggcuaucuacucuacaguggccuccagccucguccuggugguuucucugggagcgauuuccuuuuggaugugcagcaauggcucccuccagugcagaaucuguauuuga

SEQ ID NO: 200438 - RNA, 1701 nt, Artificial Sequence; identical to SEQ ID NO: 200415
  derived and/or modified CDS sequence (opt5) from hemagglutinin__InfluenzaA__AFD98290

SEQ ID NO: 200439 - RNA, 1701 nt, Artificial Sequence; identical to SEQ ID NO: 199158
  derived and/or modified CDS sequence (opt5) from hemagglutinin__InfluenzaA__AFD98310

SEQ ID NO: 200440 - RNA, 1701 nt, Artificial Sequence; identical to SEQ ID NO: 198526
  derived and/or modified CDS sequence (opt5) from hemagglutinin__InfluenzaA__AFD98320

SEQ ID NO: 200441 - RNA, 1701 nt, Artificial Sequence; identical to SEQ ID NO: 200426
  derived and/or modified CDS sequence (opt5) from hemagglutinin__InfluenzaA__AFD98340

SEQ ID NO: 200442 - RNA, 1701 nt, Artificial Sequence
  derived and/or modified CDS sequence (opt5) from hemagglutinin__InfluenzaA__AFD98351
augaagaccaucauugcccugagcuacauccucugccugguguucgcucagaaacuucccggcaacgacaauuccacagccacgcugugucucgggcaccaugcggucccuaacggaaccauuguuaagacaaucaccaaugaucaaauugaggugacaaacgcuaccgaacuggugcagucuagcuccgccggcgagaucugcgacucuccgcaccauauccuugauggggaaaauuguacacugauugacgcccuccugggagauccccagugcgacggcuuucagaacaaaaagugggaucuguucgucgagagaagccgggcuuauuccaauuguuacccuuaugacgugcccgauuacgccucucuccgcagccugguugcuuccagcgggacccuugaauuuaacaaugagucuuucaacuggacgggagugacccaaaauggcacauccagcgccugcaucagacggucuaacaauuccuuuuucagccgccugaacuggcucacccaccugaauuuuaaauauccugcgcuuaacgucacaaugcccaacaaugagcaguucgacaagcuguacauuuggggcgugcaucacccugggaccgauaaggaccagaucuuucucuaugcccaggcuucuggaagaauuacgguuuccacaaaacggagccaacaggccgugaucccgaacauuggcucccgccccagaguccggaauaucccuucucgcaucagcauuuacuggaccaucgugaagcccggggauauucugcugaucaacuccacaggaaaucucauugcuccuagaggcuacuucaaaauccggagcgggaagucuuccaucaugcgcagcgacgcccccauuggaaaauguaacucugaaugcaucaccccgaauggcagcauuccuaacgacaagcccuuucagaaugugaacagaaucaccuauggcgcguguccucgguacgucaagcaguccacacugaaacuugccacggggaugcgcaauguucccgagaagcaaaccagaggaauuuucggcgcuaucgccggguuuaucgaaaacggaugggagggcaugauggaugggugguauggauuccggcaccaaaauucugagggcagaggccaggcugccgaccugaaaagcacacaggccgcuauugaucagaucaacgggaagcucaaucgccugauuggaaaaaccaacgaaaaguuccaucagaucgagaaagaauuuuccgagguggaaggccggauucaggaccuugagaaguacguggaggauacaaagaucgaccuguggagcuauaacgcggaacuccuggucgcccuggagaaucaacacaccauugaucucacggacucugaaaugaacaaacuguucgagaagaccaaaaagcagcuuagagaaaaugcugaggauauggggaacggaugcuuuaaaaucuaccauaagugugacaaugccugcaucggcacaauucgcaacgggaccuaugaucacgacguguaccgggacgaggcccugaauaacagauuccagaucaagggcguugaacucaaauccggauacaaggauuggauucuguggaucagcuuugcuauuucuugcuuccuucuguguguggcccuccugggcuuuaucaugugggcgugccagaaagggaauauccgcuguaacauuugcaucuga

SEQ ID NO: 200443 - RNA, 1701 nt, Artificial Sequence
  derived and/or modified CDS sequence (opt5) from hemagglutinin__InfluenzaA__AFD98362
augaagaccaucauugcccugagcuacauccucugccugguguucgcucagaaacuucccggcaacgacaauuccauggccacacugugucucgggcaccaugcggucccuaacggaacgauuguuaagaccaucacaaaugaucaaauugaggugaccaacgcuacagaacuggugcaaaauucuagcaccggcgagaucugcgacuccccgcaccagauccuugauggggaaaacuguacacugauugacgcccuccugggagauccccagugcgacggcuuucagaauaaaaagugggaucuguucgucgagagaucuaaagccuauagcaacuguuacccuuaugacgugcccgauuacgcuucccuccggucucugguugccagcuccgggacccuugaauuuaauaacgagagcuucaauuggacgggagugacccagaacggcacaucuuccgcuugcauccgcagaagcaauaacuccuuuuucucucggcugaauuggcucacccaucugaacuuuaaguauccugcccuuaacgucacaaugcccaauaacgagcaguucgacaagcuguacauuuggggcgugcaccauccugggaccgauaaagaccagaucuuucucuaugcgcaagccagcggacgcauuacgguuucuacaaagagaggccagcaggcugugaucccgaauauugggucccggccccgcgucagaaacaucccuagccggaucuccauuuacuggaccaucgugaaacccggagauauucugcugaucaauucuacaggcaaccucauugccccucgcggguacuucaagaucagaagcggaaaauccagcaucaugcggucugacgcucccauuggcaaguguaauuccgaaugcaucaccccgaacggcagcauuccuaaugacaagcccuuucagaacgugaaucgcaucaccuauggggccuguccuagauacgucaaacaaaacacacugaagcuggcgacgggaaugcggaauguucccgagaaacagacccgcggcauuuucggggccaucgcuggauuuaucgaaaacggcugggaggggaugguggauggaugguauggcuucagacaccaaaauucugagggccgggggcaggccgcugaccuuaagagcacacaggccgccauugaucagaucaacggaaaacucaacagacuggugggcaagaccaaugaaaaauuccaccagauugagaaggaauuuuccgaggucgaagggcgcauccaagaccuugagaaguacguggaggauacaaaaauugaccuguggucuuauaacgcugaacuccugguugcgcuggagaaucagcauaccaucgaucucacggacagcgaaaugaacaagcuguucgagaaaacaaagaaacagcuucgggaaaaugccgaggauaugggaaacggcugcuuuaagauuuaccacaagugugacaaugcuugcaucggguccaucagaaacggcaccuaugaucaugacguguaccgcgacgaggcccugaauaaccgguuccagauuaaaggagucgaacucaagagcggcuacaaagauuggauccuguggauuucuuuugccaucuccugcuuccuucuguguguggcucuccugggguuuauuaugugggccugccaaaagggaaauaucagauguaacaucugcauuuga

SEQ ID NO: 200444 - RNA, 1701 nt, Artificial Sequence; identical to SEQ ID NO: 200423
  derived and/or modified CDS sequence (opt5) from hemagglutinin__InfluenzaA__AFD98373

SEQ ID NO: 200445 - RNA, 1701 nt, Artificial Sequence; identical to SEQ ID NO: 199054
  derived and/or modified CDS sequence (opt5) from hemagglutinin__InfluenzaA__AFD98384

SEQ ID NO: 200446 - RNA, 1701 nt, Artificial Sequence
  derived and/or modified CDS sequence (opt5) from hemagglutinin__InfluenzaA__AFD98395
augaagaccaucauugcccugagcuacauccucugccugguguucgcucagaaacuucccggcgacgauaacuccacagccacgcugugucucgggcaccaugcggucccuaauggaaccauuguuaagacaaucaccaacgaccaaauugaggugacaaaugcuaccgaacuggugcagaacucuagcgccggcgagaucugcgauuccccgcaccauauccuugacggggaaaauuguacacugauugaugcccuccugggagacccccagugcgauggcuuucagaacaaaaagugggaccuguucgucgagagaucucgggcuuauagcaauuguuacccuuaugaugugcccgacuacgccucccuccgcucucugguugcuagcuccgggacccuugaauuuaacaaugagagcuucaacuggacgggagugacccaaaauggcacaucuuccgccugcaucagacggagcaacaauuccuuuuucucucgccugaacuggcucacccaccugaauuuuaaauauccugcgcuuaacgucacaaugcccaacaaugagcaguucgauaagcuguacauuuggggcgugcaucacccugggaccgacaaggaucagaucuuucucuaugcccaggcuagcggaagaauuacgguuucuacaaaacggucccaacaggccgugaucccgaacauuggcagccgccccagaguccggaauaucccuucccgcaucucuauuuacuggaccaucgugaagcccggggacauucugcugaucaacagcacaggaaaucucauugcuccuagaggcuacuucaaaauccgguccgggaaaagcucuaucaugcgcuccgacgcccccauuggaaaauguaacagcgaaugcaucaccccgaauggcucuauuccuaacgauaagcccuuucagaaugugaacagaaucaccuauggcgcguguccucgguacgucaagcagagcacacugaaacuugccacggggaugcgcaauguucccgagaagcaaaccagaggaauuuucggcgcuaucgccggguuuaucgaaaacggaugggagggcaugauggacgggugguauggauuccggcaccaaaauuccgagggcagaggccaggcugccgaucugaaaucuacacaggccgcuauugaccagaucaacgggaagcucaaucgccugauuggaaaaaccaacgaaaaguuccaucagaucgagaaagaauuuagcgagguggaaggccggauucaggaucuugagaaguacguggaggacacaaagaucgaucugugguccuauaacgcggaacuccuggucgcccuggagaaucaacacaccauugaccucacggauagcgaaaugaacaaacuguucgagaagacaaagaagcagcuuagagaaaaugcugaggacauggggaacggaugcuuuaaaaucuaccauaagugugauaaugccugcaucggcucuauucgcaacgggaccuaugaccacgacguguaccgggaugaggcccugaauaacagauuccagaucaagggcguugaacucaaauccggauacaaggacuggauucuguggaucagcuuugcuauuucuugcuuccuucuguguguggcccuccugggcuuuaucaugugggcgugccagaaagggaauauccgcuguaacauuugcaucuga

SEQ ID NO: 200447 - RNA, 1701 nt, Artificial Sequence; identical to SEQ ID NO: 200423
  derived and/or modified CDS sequence (opt5) from hemagglutinin__InfluenzaA__AFD98406

SEQ ID NO: 200448 - RNA, 1701 nt, Artificial Sequence; identical to SEQ ID NO: 200426
  derived and/or modified CDS sequence (opt5) from hemagglutinin__InfluenzaA__AFD98417

SEQ ID NO: 200449 - RNA, 1701 nt, Artificial Sequence
  derived and/or modified CDS sequence (opt5) from hemagglutinin__InfluenzaA__AFD98428
augaagaccaucauugcccugagcuacauccucugccugguguucgcucagaaacuucccggcaacgacaauuccacagccacgcugugucucgggcaccaugcggucccuaacggaaccauuguuaagacaaucaccaaugaucaaauugaggugacaaacgcuaccgaacuggugcagucuagcuccacaggcgagaucugcaauucuccgcaccagauccuugacggggaaaacuguacccugauugaugcccuccugggagacccccagugcgauggcuuucaaaauaaaaagugggaccuguucgucgagagaagcaaagcccauuccaacuguuauccuuacgaugugcccgacuaugcuucucuccggagccugguugccuccagcgggacgcuugaauuuaauaacgagucuuucaauuggaccggagugacacagaacggcaccuccagcgcuugcauccgcagaucuaauaacuccuuuuucagccggcugaauuggcucacacaccugaacuuuaaguacccugcccuuaacgucaccaugcccaauaacgagcaguucgauaagcuguauauuuggggcgugcaucacccugggacggacaaagaucagacauuucucuacgcgcaagccucuggacgcaucaccguuuccacaaagagaagccagcaggcugugauuccgaauaucggcucccggccccgcgucagaaacauuccuucucgggugagcaucuauuggaccaucgugaaacccggggacauucugcugaucaauuccaccggaaaccucauugccccucgcggcuacuucaagaucagaagcgggaaaucuuccauuaugcggagcgaugcucccaucggaaaguguaauucugccugcaucacaccgaacggcagcauuccuaaugacaagcccuuucagaacgucaaucgcaucacguacggcgcguguccuagauauguuaaacaaaacacccugaaacuugccacagggaugcggaaugugcccgaaaaacagacccgcggaauuuucggcgcuaucgccggguuuauugagaacggaugggaaggcaugguggacgggugguacggauucagacaccaaaauuccgagggccggggccaggcugccgaucugaagucuacacaggccgcuaucgaccagaucaacgggaaacucaacagacugauuggaaagaccaaugagaaauuccaucagaucgaaaaggaguuuagcgaagucgagggccgcauucaagaucuugaaaaguauguggaggacacgaaaaucgaucugugguccuacaacgcggagcuccugguugcccuggaaaaucagcacacaauugaccucaccgauagcgagaugaacaagcuguucgaaaagaccaagaaacagcuucgggagaaugcugaagacauggggaacggaugcuuuaagaucuaucauaagugugauaaugccugcauuggcucuaucagaaacgggacauacgaccacgauguguaucgcgacgaggcccugaauaaccgguuccagaucaaaggcgucgagcucaaguccggauacaaagacuggauucuguggaucagcuuuaccauuucuugcuuccuucuguguguggcucuccugggcuuuaucaugugggccugccaaaaggggaauauuagauguaacaucugcaucuga

SEQ ID NO: 200450 - RNA, 1701 nt, Artificial Sequence; identical to SEQ ID NO: 198939
  derived and/or modified CDS sequence (opt5) from hemagglutinin__InfluenzaA__AFD98439

SEQ ID NO: 200451 - RNA, 1701 nt, Artificial Sequence
  derived and/or modified CDS sequence (opt5) from hemagglutinin__InfluenzaA__AFD98449
augaagaccaucauugcccugagcuacauccucugccugguguucgcucagaaacuucccggcaacgacaauuccacagccacgcugugucucgggcaccaugcggucccuaacggaaccauuguuaagacaaucaccaaugaucaaauugaggugacaaacgcuaccgaacuggugcagucuagcuccacaggcgagaucugcgacucuccgcaccagauccuugaugggaaaaauuguacccugauugacgcccuccugggagauccccagugcgacggcuuucaaaacaagaaaugggaucuguucgucgaaagaagcaaggccuauuccaauuguuacccuuaugacgugcccgauuacgcuucucuccggagccugguugccuccagcgggacgcuugaguuuaacaaugaaaacuucaauuggaccggagugacacagaacggcaccucuuccgcuugcauccgcagaagcaagaauagcuuuuucucccggcugaacuggcucacacaucugaauuuuaaauucccugcccuuaacgucaccaugcccaacaaugagcaguuugacaagcuguauauuuggggcgugcaccauccugggacggauaaagaccagaucuuccucuacgcgcaagccagcggacgcauuacaguuucuaccaagagaucccagcagacagcuaucccgaacauuggcagccggccccgcgugagaaauaucccuucccggaucucuauuuauuggaccaucgucaaacccggggauauucugcugaucaacagcaccggaaaucucauugccccucgcggcuacuuuaagaucagauccgggaagucuucuaucaugcgguccgacgcucccauuggaaaauguaacagcgagugcaucacaccgaauggcucuauuccuaacgacaagcccuuccagaaugugaaccgcaucacguacggcgccuguccuagauaugugaaacaaaauacccugaaacuugcgacagggaugcggaacguccccgaaaaacagacccgcggaauuuuuggcgccaucgcuggguucaucgagaauggaugggaaggcaugguugaugggugguacggauucagacaccagaacagcgagggccggggccaagccgcugaccugaaguccacacaggccgccauugaucagaucaaugggaaacucaacagacugauuggaaagaccaacgagaaguuucaccagaucgaaaaagaguucucugaaguggagggccgcauucaagaccuugaaaaguauguggaggauacgaaaaucgaccuguggagcuacaaugcugagcuccuggucgcgcuggaaaaccagcauacaauugaucucaccgacuccgagaugaauaagcuguuugaaaagaccaagaagcagcuucgggagaacgccgaagauauggggaauggaugcuucaaaaucuaucacaagugugacaacgcuugcaucggcagcauuagaaaugggacauacaaccaugauguguaucgcgacgaggcccugaauaaccgguuucagaucaaaggcguugagcucaagucuggauacaaagacuggauucuguggaucuccuucgccauuagcugcuuucuucuguguguggcucuccugggcuucaucaugugggccugccaaaaggggaauaucagauguaacauuugcaucuga

SEQ ID NO: 200452 - RNA, 1701 nt, Artificial Sequence
  derived and/or modified CDS sequence (opt5) from hemagglutinin__InfluenzaA__AFD98460
augaagaccaucauugcccugagcuacauccucugccugguguucgcucagaaacuucccggcaacgacaauuccacagccacgcugugucucgggcaccaugcggucccuaacggaaccauuguuaagacaaucaccaaugaucaaauugaggugacaaacgcuaccgaacuggugcagucuagcuccgccggcgagaucugcgacucuccgcaccauauccuugauggggaaaauuguacacugauugacgcccuccugggagauccccagugcgacggcuuucagaacaaaaagugggaucuguucgucgagagaagccgggcuuauuccaauuguuacccuuaugacgugcccgauuacgccucucuccgcagccugguugcuuccagcgggacccuugaauuuaacaaugagucuuucaacuggacgggagugacccaaaauggcacauccagcgccugcaucagacggucuaacaauuccuuuuucagcaaacugaacuggcucacccaccugaauuuuaaguauccugcgcuuaacgucacaaugcccaacaaugagcaguucgacaagcuguacauuuggggcgugcaucacccugggaccgauaaagaccagaucuuucucuaugcccaggcuucuggacgcauuacgguuuccacaaagagaagccaacaggccgugaucccgaacauuggcucccggccccgcgucagaaauaucccuucucggaucagcauuuacuggaccaucgugaaacccggggauauucugcugaucaacuccacaggaaaucucauugcuccucgcggcuacuucaagaucagaagcgggaaaucuuccaucaugcggagcgacgcccccauuggaaaguguaacucugaaugcaucaccccgaauggcagcauuccuaacgacaagcccuuucagaaugugaaccgcaucaccuauggcgcguguccuagauacgucaaacaguccacacugaagcuggccacggggaugcggaauguucccgagaaacaaacccgcggaauuuucggcgcuaucgccggguuuaucgaaaacggaugggagggcaugauggaugggugguauggauucagacaccaaaauucugagggccggggccaggcugccgaccuuaagagcacacaggccgcuauugaucagaucaacgggaaacucaauagacugauuggaaagaccaacgaaaaauuccaucagaucgagaaggaauuuuccgagguggaaggccgcauucaggaccuugagaaguacguggaggauacaaaaaucgaccuguggagcuauaacgcggaacuccuggucgcccuggagaaucaacacaccauugaucucacggacucugaaaugaacaagcuguucgagaaaacaaagaaacagcuucgggaaaaugcugaggauauggggaacggaugcuuuaagaucuaccauaagugugacaaugccugcaucggcuccauuagaaacgggaccuaugaucacgacguguaccgcgacgaggcccugagcaaucgguuccagaucaaaggcguugaacucaagucuggauacaaagauuggauucuguggaucuccuuugcuauuagcugcuuccuucuguguguggcccuccugggcuuuaucaugugggcgugccagaaggggaacaucagauguaauauuugcaucuga

SEQ ID NO: 200453 - RNA, 1701 nt, Artificial Sequence; identical to SEQ ID NO: 198939
  derived and/or modified CDS sequence (opt5) from hemagglutinin__InfluenzaA__AFD98471

SEQ ID NO: 200454 - RNA, 1701 nt, Artificial Sequence
  derived and/or modified CDS sequence (opt5) from hemagglutinin__InfluenzaA__AFD98481
augaagaccaucauugcccugagcuacauccucugccugguguucgcucagaaacuucccggcaacgacaauuccacagccacgcugugucucgggcaccaugcggucccuaacggaaccauuguuaagacaaucaccaaugaucaaauugaggugacaaacgcuaccgaacuggugcaaaauucuagcacaggcgagaucugcaacuccccgcaccagauccuugacggggaaaauuguacccugauugaugcccuccugggagacccccagugcgauggcuuucagaacaaaaagugggaccuguucgucgagagaucuaaagcccauagcaauuguuauccuuacgaugugcccgacuaugcuucccuccggucucugguugccagcuccgggacgcuugaauuuaacaaugagagcuucaacuggaccggagugacacagaauggcaccucuuccgcuugcauccgcagaagcaacaauagcuuuuucucccggcugaacuggcucacacaccugaacuuuaaguacccugcccuuaaugucaccaugcccaacaaugagcaguucgauaagcuguauauuuggggcgugcaucacccugggacggacaaagaucagaucuuucucuacgcgcaagccgcuggacgcauuacaguuagcaccaagagaucucagcaggccgugaucccgaacauuggcucccggccccgcgucagaaauaucccuagccggguguccaucuauuggacaauugugaaacccggggacauccugcugauuaacucuaccggaaaucucaucgcuccucgcggcuacuucaagauuagaagcgggaaauccagcgucaugcggucugaugcccccaucggaaaguguaacuccgcgugcaucaccccgaauggcagcauuccuaacgacaagcccuuucagaauguuaaccgcaucacauacggcgccuguccuagauaugugaaacaaaauacgcugaaacuugcuaccgggaugcggaacgugcccgaaaaacagacacgcggaauuuucggcgccaucgcuggguuuauugagaauggaugggaaggcauggucgacgggugguacggauucagacaccagaacucugagggccggggccaagccgccgaucugaagucuacccaggcugcgaucgaccagaucaacgggaaacucaauagacugauuggaaagacaaacgagaaauuccaucagaucgaaaaggaguuuuccgaaguggagggccgcauucaagaucuugaaaaguauguugaggacaccaaaaucgaucuguggucuuacaaugccgagcuccugguggcucuggaaaaccagcacacgauugaccucacagauagcgagaugaauaagcuguucgaaaagaccaagaaacagcuucgggagaacgccgaagacauggggaauggaugcuuuaagaucuaucauaagugugauaacgccugcauuggcuccaucagaaaugggaccuacgaccacgaugucuaucgcgacgaggcucugaacaaucgguuccagaucaaaggcguggagcucaagagcggauacaaagacuggauucuguggaucucuuuugccauuuccugcuuccuucuguguguugcgcuccugggcuuuaucaugugggcuugccaaaaggggaacauuagauguaauaucugcaucuga

SEQ ID NO: 200455 - RNA, 1701 nt, Artificial Sequence; identical to SEQ ID NO: 199054
  derived and/or modified CDS sequence (opt5) from hemagglutinin__InfluenzaA__AFD98492

SEQ ID NO: 200456 - RNA, 1701 nt, Artificial Sequence
  derived and/or modified CDS sequence (opt5) from hemagglutinin__InfluenzaA__AFD98503
augaagaccaucauugcccugagcuacauccucugccugguguucgcucagaaacuucccggcaacgacaauuccacagccacgcugugucucgggcaccaugcggucccuaacggaaccauuguuaagacaaucaccaaugaucaaauugaggugacaaacgcuaccgaacuggugcagucuagcuccgccggcgagaucugcgacucuccgcaccauauccuugauggggaaaauuguacacugauugacgcccuccugggagauccccagugcgacggcuuucagaacaaaaagugggaucuguucgucgagagaagccgggcuuauuccaauuguuacccuuaugacgugcccgauuacgccucucuccgcagccugguugcuuccagcgggacccuugaauuuaacaaugagucuuucaacuggacgggagugacccaaaauggcacauccagcgccugcaucagacggucuaacaauuccuuuuucagccgccugaacuggcucacccaccugaauuuuaaauauccugcgcuuaacgucacaaugcccaacaaugagcaguucgacaagcuguacauuuggggcgugcaucacccugggaccgauaaggaccagaucuuucucuaugcccaggcuucuggaagaauuacgguuuccacaaaacggagccaacaggccgugaucccgaacauuggcucccgccccagaguccggaauaucccuucucgcaucagcauuuacuggaccaucgugaagcccggggauauucugcugaucaacuccacaggaaaucucauugcuccuagaggcuacuucaaaauccggagcgggaagucuuccaucaugcgcagcgacgcccccauuggaaaauguaacucugaaugcaucaccccgaauggcagcauuccuaacgacaagcccuuucagaaugugaacagaaucaccuauggcgcguguccucgguacgucaagcaguccacacugaaacuugccacggggaugcgcaauguucccgagaagcaaaccaaaggaauuuucggcgcuaucgccggguuuaucgaaaacggaugggagggcaugauggaugggugguauggauucagacaccagaauagcgagggccggggccaggcugccgaccugaagucuacacaagccgcuauugaucagaucaacgggaaacucaauagacugauuggaaagaccaacgaaaaauuccaucagaucgagaaggaauuuuccgagguggaaggccgcauucaggaccuugagaaguacguggaggauacaaaaaucgaccuguggagcuauaacgcggaacuccuggucgcccuggagaaucaacacaccauugaucucacggacucugaaaugaacaagcuguucgagaaaacaaagaaacagcuucgggaaaaugcugaggauauggggaacggaugcuuuaagaucuaccauaagugugacaaugccugcaucggcuccauuagaaacgggaccuaugaucacgacguguaccgcgacgaggcccugaauaaccgguuccagaucaaaggcguugaacucaagagcggauacaaagauuggauucuguggaucucuuuugcuauuuccugcuuccuucuguguguggcccuccugggcuuuaucaugugggcgugccagaaggggaauaucagauguaacauuugcaucuga

SEQ ID NO: 200457 - RNA, 1701 nt, Artificial Sequence; identical to SEQ ID NO: 199054
  derived and/or modified CDS sequence (opt5) from hemagglutinin__InfluenzaA__AFD98514

SEQ ID NO: 200458 - RNA, 1701 nt, Artificial Sequence; identical to SEQ ID NO: 200406
  derived and/or modified CDS sequence (opt5) from hemagglutinin__InfluenzaA__AFD98525

SEQ ID NO: 200459 - RNA, 1701 nt, Artificial Sequence; identical to SEQ ID NO: 198927
  derived and/or modified CDS sequence (opt5) from hemagglutinin__InfluenzaA__AFD98558

SEQ ID NO: 200460 - RNA, 1701 nt, Artificial Sequence
  derived and/or modified CDS sequence (opt5) from hemagglutinin__InfluenzaA__AFD98569
augaagaccaucauugcccugagcuacauccucugccugguguucgcucagaaacuucccggcaacgacaauuccacagccacgcugugucucgggcaccaugcggucccuaacggaaccauuguuaagacaaucaccaaugaucaaauugaggugacaaacgcuaccgaacuggugcagucuagcuccacaggcgagaucugcaauucuccgcaccagauccuugacggggaaaacuguacccugauugaugcccuccugggagacccccagugcgauggcuuucaaaauaaaaagugggaccuguucgucgagagaagcaaagcccauuccaacuguuauccuuacgaugugcccgacuaugcuucucuccggagccugguugccuccagcgggacgcuugaauuuaauaacgagucuuucaauuggaccggagugacacagaacggcaccuccagcgcuugcauccgcagaucuaauaacuccuuuuucagccggcugaauuggcucacacaccugaacuuuaaguacccugcccuuaacgucaccaugcccaauaacgagcaguucgauaagcuguauauuuggggcgugcaucacccugggacggacaaagaucagacauuucucuacgcgcaagccucuggacgcaucaccguuuccacaaagagaagccagcaggcugugauuccgaauaucggcucccggccccgcgucagaaacauuccuucucgggugagcaucuauuggaccaucgugaaacccggggacauucugcugaucaauuccaccggaaaccucauugccccucgcggcuacuucaagaucagaagcgggaaaucuuccauuaugcggagcgaugcucccaucggaaaguguaauucugccugcaucacaccgaacggcagcauuccuaaugacaagcccuuucagaacgucaaucgcaucacguacggcgcguguccuagauauguuaaacaaaacacccugaaacuugccacagggaugcggaaugugcccgaaaaacagacccgcggaauuuucggcgcuaucgccggguuuauugagaacggaugggaaggcaugguggacgggugguacggauucagacaccaaaauuccgagggccggggccaggcugccgaucugaagucuacacaggccgcuaucgaccagaucaacgggaaacucaacagacugauuggaaagaccaaugagaaauuccaucagaucgaaaaggaguuuagcgaagucgagggccgcauucaagaucuugaaaaguauguggaggacacgaaaaucgaucugugguccuacaacgcggagcuccugguugcccuggaaaaucagcacacaauugaccucaccgauagcgagaugaacaagcuguucgaaaagaccaagaaacagcuucgggagaaugcugaagacauggggaacggaugcuuuaagaucuaucaugagugugauaaugccugcauuggcucuaucagaaacgggacauacgaccacgauguguaucgcgacgaggcccugaauaaccgguuccagaucaagggcgucgaacucaaauccggauacaaggacuggauucuguggaucagcuuugcuauuucuugcuuccuucuguguguggcccuccugggcuuuaucaugugggcgugccaaaaagggaauauuagauguaacaucugcaucuga

SEQ ID NO: 200461 - RNA, 1701 nt, Artificial Sequence; identical to SEQ ID NO: 198927
  derived and/or modified CDS sequence (opt5) from hemagglutinin__InfluenzaA__AFD98580

SEQ ID NO: 200462 - RNA, 1701 nt, Artificial Sequence
  derived and/or modified CDS sequence (opt5) from hemagglutinin__InfluenzaA__AFE02942
augaaggccauccuggugguccuccuguacaccuucgcuacagccaacgcggacacgcuuugcauuggcuaucacgcuaauaacagcaccgauacaguugacacccugcucgagaaaaaugugacagugacccauuccgucaaccugcuugaagauaagcacaaugggaaacuguguaagcucagaggaguggcuccccugcaucugggcaaaugcaacaucgccggguggauucucggaaauccugagugugaaucucugagcacagccuccucuuggagcuacaucguugagaccuccaacucugacaauggcacgugcuauccgggggauuuuauugacuacgaagaacuucgggagcagcugagcuccgugagcucuuucgaacgcuuugagaucuuccccaagaccuccagcuggccuaaccacgauucuaauaagggagucacagccgcuuguccccaugccggcgcgaaauccuuuuauaagaaccucaucuggcuggugaaaaagggcaauagcuacccuaaacuuucuaaguccuauauuaacgacaaggggaaagaaguucuggugcucuggggaauccaccaccccagcaccuccgccgaucaacagucucuguaccagaaugcugacgccuacgucuucguguggacaagcagauauuccaagaaauuuaagccugagauugcuauccggccgaaagugcgcgaucaggagggcagaaugaacuacuauuggacccuggucgaacccggggacaagauuacguucgaggccacaggaaaccucguugugccucgguacgcguuugccauggaucgcaaugcuggcagcgggaucauuaucucugacacccccgugcaugacugcaacacaaccugucaaaccccuaaaggagccaucaauacaucccugcccuuccagaacauucacccgaucacgauuggcaagugcccuaaguaugucaaaagcaccaaacuuagacuggcuacaggccuccggaaugugcccucuauccagagccgcgggcuguuuggagccauugccggcuucaucgaagggggauggaccggcaugguugaugggugguacggauaucaucaccagaacgagcaaggcuccggcuacgcugcggaccuuaagucuacacagaaugccaucgaugaaauuaccaacaaggugaauagcgucaucgagaaaaugaacacgcaguuuacagcuguggggaaggaguucaaucaccuggaaaagagaauugagaaccucaauaaaaagguugacgauggauuccuggacaucuggaccuacaacgccgaacugcucgugcugcuugagaaugaacggacccuggauuaucaugacuccaacgucaaaaaccucuacgagaaggugcgcagccagcugaaaaauaacgccaaggagauuggcaauggguguuuugaguucuaucacaagugcgauaacacauguauggagucugucaaaaauggaaccuacgacuauccuaaguacuccgaagaggcuaaacuuaacagagaagagaucgauggcgugaagcuggagagcacacggaucuaucaaauucucgccaucuacucuacgguugcguccagccuggugcuggucgugucccucggggcuauuucuuuuuggaugugcagcaauggcucccugcagugccgcaucuguauuuga

SEQ ID NO: 200463 - RNA, 1701 nt, Artificial Sequence; identical to SEQ ID NO: 195905
  derived and/or modified CDS sequence (opt5) from hemagglutinin__InfluenzaA__AFE18688

SEQ ID NO: 200464 - RNA, 1701 nt, Artificial Sequence; identical to SEQ ID NO: 192722
  derived and/or modified CDS sequence (opt5) from hemagglutinin__InfluenzaA__AFE47624

SEQ ID NO: 200465 - RNA, 1701 nt, Artificial Sequence; identical to SEQ ID NO: 193472
  derived and/or modified CDS sequence (opt5) from hemagglutinin__InfluenzaA__AFE47635

SEQ ID NO: 200466 - RNA, 1701 nt, Artificial Sequence; identical to SEQ ID NO: 199054
  derived and/or modified CDS sequence (opt5) from hemagglutinin__InfluenzaA__AFF18506

SEQ ID NO: 200467 - RNA, 1701 nt, Artificial Sequence
  derived and/or modified CDS sequence (opt5) from hemagglutinin__InfluenzaA__AFF57124
augaaggccauccuggugguccuccuguacaccuucgcuacagccaacgcggacacgcuuugcauuggcuaucacgcuaauaacagcaccgauacaguugacaccgugcuggagaaaaaugugacagucacccauuccgugaaccuccuggaagauaagcacaaugggaaacuuuguaagcugagaggaguugcuccccuccaucugggcaaaugcaacaucgccggguggauucugggaaauccugagugugaaucucucagcacagccuccucuuggagcuacaucguggagaccuccucuagcgacaacggcacgugcuauccgggggauuuuauuaauuacgaagaacugcgggagcagcuuuccagcgucucuuccuucgaacgcuuugagaucuuccccaagaccagcucuuggccuaaccacgacuccaauaagggagugacagccgcuuguccccaugccggcgcgaaaucuuuuuauaagaaccugaucuggcucguuaaaaaggaaaauagcuacccuaaacuguccaagagcuauauuaacgauaagggcaaagaggugcuuguccugugggggauccaccaccccuccaccacagccgaccaacagagacucuaccagaaugcugaugccuacguguucgugggaaccucucgguauagcaagaaauuuaagccugagauugcuauccgcccgaaagucagagaccaggaaggccggaugaacuacuauuggacgcugguugagcccggggauaagauuacauucgaagccaccggaaaccugguggugccucgcuacgcguuugccauggagagaaaugcuggcuccgggaucauuaucagcgacacacccguccaugauugcaacaccaccugucaaacaccuaaaggagccaucaauacgucucuccccuuccagaacauucacccgaucaccauuggcaagugcccuaaguaugugaaauccacaaagcugcggcuugcuaccggccugcgcaauguucccagcauccagucuagagggcucuuuggagccauugccggcuucaucgaagggggauggacaggcaugguggacgggugguacggauaucaucaccagaacgagcaaggcagcggcuacgcugcggaccugaaauccacccagaaugccaucgauaagauuacgaacaaagucaauucugugaucgagaagaugaacacacaguuuaccgcuguugggaaggaguucaaucaccuugagaaacggauugaaaaccugaauaagaaaguggacgauggauuccucgacaucuggaccuacaacgccgagcugcugguccuccuggaaaaugagcgcacacuugauuaucaugacagcaacgugaagaaccuguacgagaaagucagaaaucagcucaagaacaaugccaaggaaauuggcaacggguguuuugaguucuaucacaaaugcgauaauaccuguauggaauccgugaagaacggaacauacgacuauccuaaauacagcgaggaagcuaagcugaaucgggaggagaucgauggcguuaaacuugaaucuacgcgcaucuaucaaauucuggccaucuacuccaccguggcgagcucucucguccuggugguuucccugggggcuauuagcuuuuggaugugcuccaacggcucucuccagugcagaaucuguauuuga

SEQ ID NO: 200468 - RNA, 1701 nt, Artificial Sequence
  derived and/or modified CDS sequence (opt5) from hemagglutinin__InfluenzaA__AFF57128
augaaggccauccuggugguccuccuguacaccuucgcuacagccaacgcggacacgcuuugcauuggcuaucacgcuaauaacagcaccgauacaguugacaccgugcuggagaaaaaugugacagucacccauuccgugaaccuccuggaagauaagcacaaugggaaacuuuguaagcugagaggaguugcuccccuccaucugggcaaaugcaacaucgccggguggauucugggaaauccugagugugaaucucucagcacagccuccucuuggagcuacaucguggagaccuccucuagcgacaacggcacgugcuauccgggggauuuuauuaauuacgaagaacugcgggagcagcuuuccagcgucucuuccuucgaacgcuuugagaucuuccccaagaccagcucuuggccuaaccacgacuccaauaagggagugacagccgcuuguccccaugccggcgcgaaaucuuuuuauaagaaccugaucuggcucguuaaaaagggcaauagcuacccuaaacuguccaagagcuauauuaacgauaaggggaaagaagugcuuguccuguggggaauccaccaccccuccaccacagccgaccaacagucuauuuaccagaaugcugaugccuacguguucgugggcaccagcagauauuccaagaaauuuaagccugagaucgcuauucggccgaaaguccgcgaccaggaggggagaaugaacuacuauuggacgcucguugaacccggagauaagaucacauucgaggccaccggcaaccugguggugccucgguacgcguuugccauggaacgcaaugcugggagcggaauuaucaucucugacacacccguccaugauugcaacaccaccugucaaacaccuaaaggcgccauuaauacgucccugcccuuccagaacauccacccgauuaccaucggcaagugcccuaaguaugugaaaagcacaaagcucagacuggcuaccgggcuucggaauguucccucuauucagagccgcggacuguuuggcgccaucgccggguucaucgagggaggcuggacagggaugguggacggaugguacggcuaucaucaccagaacgaacaaggcuccggguacgcugcggaccucaaaucuacccagaaugccauugauaagaucacgaacaaagucaauagcgugauugagaagaugaacacacaguuuaccgcuguuggaaaggaguucaaucaccuggagaaaagaaucgagaaccuuaauaagaaaguggacgauggcuuccuggacauuuggaccuacaacgccgaacuccugguccugcucgagaaugaacggacacuggauuaucaugacuccaacgugaagaaccuuuacgagaaaguccgcaaucagcugaagaacaaugccaaggagaucgggaacggauguuuugaguucuaucacaaaugcgauaauaccuguauggaaagcgugaagaacggcacauacgacuauccuaaauacucugaagaggcuaagcucaauagagaagagaucgaugggguuaaacuggaguccacgcggauuuaucaaauccuugccauuuacagcaccguggcgucuucccugguccucgugguuagccugggcgcuaucuccuuuuggaugugcucuaacggaagccugcagugccgcauuuguaucuga

SEQ ID NO: 200469 - RNA, 1701 nt, Artificial Sequence
  derived and/or modified CDS sequence (opt5) from hemagglutinin__InfluenzaA__AFF57132
augaaggccauccuggugguccuccuguacaccuucgcuacagccaacgcggacacgcuuugcauuggcuaucacgcuaauaacagcaccgauacaguugacaccgugcuggagaaaaaugugacagucacccauuccgugaaccuccuggaagauaagcacaaugggaaacuuuguaagcugagaggaguugcuccccuccaucugggcaaaugcaacaucgccggguggauucugggaaauccugagugugaaucucucagcacagccuccucuuggagcuacaucguggagaccuccucuagcgacaacggcacgugcuauccgggggauuuuauugacuacgaagaacugcgggagcagcuuuccagcgucucuuccuucgaacgcuuugagaucuuccccaagaccagcucuuggccuaaucacgauuccaacaagggagugacagccgcuuguccccaugccggcgcgaaaggcuuuuauaagaaucugaucuggcucguuaaaaaggggaacagcuacccuaaacugucuaaguccuauauuaaugacaagggaaaagaagugcuuguccuguggggcauccaccaccccagcaccacagccgaucaacaguccauuuaccagaacgcugacaccuacguguucguggggacgucuagauauagcaagaaauuuaagccugagaucgccauucggccgaaaguccgcgaucaggagggaagaaugaauuacuauuggacacucguugaacccggcgacaagaucaccuucgaggcuacagggaaccugguggugccucgguacgccuuugcgauggaacgcaacgccggauccggcauuaucaucagcgauacccccguccaugacugcaauaccacaugucaaacgccuaaaggcgcuauuaacaccucucugcccuuccagaauauccacccgauuacaaucgggaagugcccuaaguaugugaaauccaccaagcucagacuggccacaggacuucggaacguucccagcauucagucucgcggccuguuuggggcuaucgccggauucaucgagggcggguggaccggaaugguggacggcugguacggcuaucaucaccagaaugaacaagggagcggauacgccgcugaucucaaauccacgcagaacgcgauugacaagaucacaaauaaagucaacucugugauugagaagaugaauacccaguuuaccgccguuggcaaggaguucaaccaccuggagaaaagaaucgagaaucuuaacaagaaaguggaugacggguuccuggauauuuggacauacaaugcugaacuccugguccugcucgagaacgaacggacccuggacuaucaugauagcaaugugaagaaccuuuacgagaaaguccgcaaccagcugaagaauaacgccaaggagaucggaaauggcuguuuugaguucuaucacaaaugcgacaacacauguauggaauccgugaagaaugaaacguacgauuauccuaaauacagcgaggaagccaagcucaacagagaggagaucgacgggguuaaacuggaaucuacccggauuuaucaaauccuugcuauuuacuccacaguggccagcucucugguccucgugguuucccugggcgcgaucagcuuuuggaugugcuccaauggaucucugcagugccgcauuuguaucuga

SEQ ID NO: 200470 - RNA, 1701 nt, Artificial Sequence
  derived and/or modified CDS sequence (opt5) from hemagglutinin__InfluenzaA__AFF57136
augaaggccauccuggugguccuccuguacaccuucgcuacagccaacgcggacacgcuuugcauuggcuaucacgcuaauaacagcaccgauacaguugacaccgugcuggagaagaaugugacagucacccauuccgugaaccuccuggaagauaagcacaaugggaaacuuuguaagcugagaggaguugcuccccuccaucugggcaaaugcaacaucgccggguggauucugggaaauccugagugugaaucucucagcacagccuccucuuggagcuacaucguggagaccuccucuagcgacaacggcacgugcuauccgggggauuuuauugacuacgaagaacugcgggagcagcuuuccagcgucucuuccuucgaacgcuuugagaucuuccccaagaccagcucuuggccuaaucacgauuccaacaagggagugacagccgcuuguccccaugccggcgcgaaaucuuuuuauaagaaucugaucuggcucguuaaaaagggcaacagcuacccuaaacuguccaagagcuauauuaaugacaaggggaaagaagugcuuguccuguggggaauccaccaccccuccaccucugccgaucaacagagccucuaccagaacgcugacgccuacguguucgugggcuccagcagauauucuaagaaauuuaagccugagauugcuauccggccgaaaguccgcgauagagaggggcggaugaauuacuauuggacacugguugaacccggagacaagauuaccuucgaggccacgggcaaccugguggugccucgcuacgcguuugccauggaaagaaacgcuggguccggaaucauuaucagcgauacacccgucuaugacugcaauaccacaugucagaccccuaaaggcgccaucaacaccucucuccccuuccaaaauauucauccgaucacaauuggcaagugcccuaaguacgugaaaagcacgaagcugcggcuugcuaccgggcugcgcaacguucccuccauccagucuagaggacucuuuggcgccauugccggguucaucgagggaggcuggacagggaugguggacggaugguauggcuaccaccaucagaaugaacagggcagcggguacgcugcggaucugaaauccacccaaaacgccaucgacgagauuacaaauaaggucaacagcgugaucgagaaaaugaauacccaguuuacggcuguuggaaaggaguucaaccaccuugagaagcggauugaaaaucugaacaaaaagguggaugacggcuuccucgauaucuggacauauaaugccgagcugcugguccuccuggaaaacgagcgcacccuugacuaccacgauucuaaugugaaaaaccuguaugagaaggucagaucccagcucaaaaacaaugccaaggaaauugggaacggauguuuugaguucuaccauaagugcgacaauaccuguauggaaagcgugaaaaacggcacauaugauuacccuaaguauucugaggaagcuaaacugaaucgggaggagaucgacgggguuaaacuugaauccacccgcaucuaccagauucuggccaucuacagcacaguggcguccucucucguccuggugguuagccugggcgcuauuuccuuuuggaugugcucuaacggaagccuccaaugcagaaucuguauuuga

SEQ ID NO: 200471 - RNA, 1701 nt, Artificial Sequence
  derived and/or modified CDS sequence (opt5) from hemagglutinin__InfluenzaA__AFF57144
augaaggccauccuggugguccuccuguacaccuucgcuacagccaacgcggacacgcuuugcauuggcuaucacgcuaauaacagcaccgauacaguugacaccgugcuggagaaaaaugugacagucacccauuccgugaaccuccuggaagauaagcacaaugggaaacuuuguaagcugagaggaguugcuccccuccaucugggcaaaugcaacaucgccggguggauucugggaaauccugagugugaaucucucagcacagccuccucuuggagcuacaucguggagaccuccucuagcgacaacggcacgugcuauccgggggauuuuauugacuacgaagaacugcgggagcagcuuuccagcgucucuuccuucgaacgcuuugagaucuuccccaagaccagcucuuggccuaaucacgauuccaacaagggagugacagccgcuuguccccaugccggcgcgaaaucuuuuuauaagaaucugaucuggcucguuaaaaagggcaacagcuacccuaaacuguccaagagcuauauuaaugacaaggggaaagaagugcuuguccuguggggaauccaccaccccuccaccucugaugaccaacagagccucuaccagaacgaggaugccuacguguucgugggcuccagcagauauucuaagaaauuuaagccugagauugcuauccggccgaaaguccgcgacagagaagggcggaugaauuacuauuggacacugguugagcccggagauaagauuaccuucgaagccacgggcaaccugguggugccucgcuacgcuuuugccauggagagaaacgcgggguccggaaucauuaucagcgacacacccguccaugacugcaauaccacaugucagaccccuaaaggcgccaucaacaccucucuccccuuccaaaauauucacccgaucacaauuggcaagugcccuaaguaugugaaaagcacgaagcugcggcuugcuaccgggcugcgcaacguucccuccauccagucuagaggacucuuuggcgccauugcuggguucaucgaaggaggcuggacagggaugguggauggaugguacggcuaucaucaccagaaugagcagggcagcggguacgccgccgaccugaaauccacccaaaacgcuaucgaugagauuacaaauaaggucaacagcgugaucgaaaagaugaauacccaguuuacggcgguuggaaaggaguucaaccaccuugaaaagcggauugagaaucugaacaaaaagguggacgauggcuuccucgacaucuggacauacaaugccgaacugcugguccuccuggagaacgagcgcacccuugauuaucaugacucuaaugugaaaaaccuguacgaaaaggucagaucccagcucaaaaacaaugcuaaggagauugggaacggauguuuugaguucuaucacaagugcgauaauaccuguauggagagcgugaaaaacggcacauacgacuauccuaaguacucugaagaggccaaacugaaucgggaggaaaucgaugggguuaaacuugaguccacccgcaucuaucagauucuggccaucuacagcacaguggcuuccucucucguccuggugguuagccugggcgccauuuccuuuuggaugugcucuaacggaagccuccaaugcagaaucuguauuuga

SEQ ID NO: 200472 - RNA, 1701 nt, Artificial Sequence
  derived and/or modified CDS sequence (opt5) from hemagglutinin__InfluenzaA__AFF57148
augaaggccauccuggugguccuccuguacaccuucgcuacagccaacgcggacacgcuuugcauuggcuaucacgcuaauaacagcaccgauacaguugacacccugcucgagaaaaaugugacagugacccauuccgucaaccugcuugaagauaagcacaaugggaaacuguguaagcucagaggaguggcuccccugcaucugggcaaaugcaacaucgccggguggauucucggaaauccugagugugaaucucugagcacagccuccucuuggagcuacaucguugagaccuccucuagcgacaacggcacgugcuauccgggggauuuuauugacuacgaagaacuucgggagcagcuguccagcgugucuuccuucgaacgcuuugagaucuuccccaagaccagcucuuggccuaaucacgauuccaacaagggagucacagccgcuuguccccaugccggcgcgaaaucuuuuuauaagaaucucaucuggcuggugaaaaagggcaacagcuacccuaaacuuuccaagagcuauauuaaugacaaggggaaagaaguucuggugcucuggggaauccaccaccccuccaccucugaugaccaacagagccuguaccagaacgaggaugccuacgucuucgugggcuccagcagauauucuaagaaauuuaagccugagauugcuauccggccgaaagugcgcgacagagaagggcggaugaauuacuauuggacacuggucgagcccggagauaagauuaccuucgaagccacgggcaaccucguugugccucgcuacgcuuuugccauggagagaaacgcgggguccggaaucauuaucagcgacacacccgugcaugacugcaauaccacaugucagaccccuaaaggcgccaucaacaccucucugcccuuccaaaauauucacccgaucacaauuggcaagugcccuaaguaugucaaaagcacgaaacuucggcuggcuaccgggcuccgcaacgugcccuccauccagucuagaggacuguuuggcgccauugcuggguucaucgaaggaggcuggacagggaugguugauggaugguacggcuaucaucaccagaaugagcagggcagcggguacgccgccgaccuuaaauccacccaaaacgcuaucgaugagauuacaaauaaggugaacagcgucaucgaaaagaugaauacccaguuuacggcggugggaaaggaguucaaccaccuggaaaagcggauugagaaucucaacaaaaagguugacgauggcuuccuggacaucuggacauacaaugccgaacugcucgugcugcuugagaacgagcgcacccuggauuaucaugacucuaaugucaaaaaccucuacgaaaaggugagaucccagcugaaaaacaaugcuaaggagauugggaacggauguuuugaguucuaucacaagugcgauaauaccuguauggagagcgucaaaaacggcacauacgacuauccuaaguacucugaagaggccaaacuuaaucgggaggaaaucgauggggugaagcuggaguccacccgcaucuaucagauucucgccaucuacagcacaguugcuuccucucuggugcuggucgugagccucggcgccauuuccuuuuggaugugcucuaacggaagccugcaaugcagaaucuguauuuga

SEQ ID NO: 200473 - RNA, 1701 nt, Artificial Sequence
  derived and/or modified CDS sequence (opt5) from hemagglutinin__InfluenzaA__AFF57160
augaaggccauccuggugguccuccuguacaccuucgcuacagccaacgcggacacgcuuugcauuggcuaucacgcuaauaacagcaccgauacaguugacaccgugcuggagaaaaaugugacagucacccauuccgugaaccuccuggaagauaagcacaaugggaaacuuuguaagcugagaggaguugcuccccuccaucugggcaaaugcaacaucgccggguggauucugggaaauccugagugugaaucucucagcacagccuccucuuggagcuacaucguggagaccuccucuagcgacaacggcacgugcuauccgggggauuuuauugacuacgaagaacugcgggagcagcuuuccagcgucucuuccuucgaacgcuuugagaucuuccccaagaccagcucuuggccuaaucacgauuccaacaagggagugacagccgcuuguccccaugccggcgcgaaaucuuuuuauaagaaucugaucuggcucguuaaaaagggcaacagcuacccuaaacuguccgaaagcuauauuaaugacaaggggaaggaggugcuuguccuguggggaauccaccaccccuccaccucugccgaucaacagagccucuaccagaacgaggacgcuuacguguucgugggcuccagcagauauucuaaaaaguuuaaaccugaaauugccauccggccgaagguccgcgauagagaggggcggaugaauuacuauuggacacugguugaacccggagacaaaauuaccuucgaggcuacgggcaaccugguggugccucgcuacgccuuugcgauggaaagaaacgccggguccggaaucauuaucagcgauacacccguccaugacugcaauaccacaugucagaccccuaagggcgcuaucaacaccucucuccccuuccaaaauauucacccgaucacaauuggcaaaugcccuaaguauguuaagagcacgaaacugcggcuugccaccgggcugcgcaacgugcccuccauccagucuagaggacucuuuggcgcuauugccggguucaucgagggaggcuggacagggaugguggacggaugguacggcuaucaucaccagaaugagcagggcagcggguacgccgcugaucugaaguccacccaaaacgcgaucgacgaaauuacaaauaaagucaacagcgugaucgagaagaugaauacccaguuuacggccguuggaaaagaguucaaccaccuugagaagcggauugaaaaucugaacaagaaaguggaugacggcuuccucgauaucuggacauacaaugcugagcugcugguccuccuggagaacgaacgcacccuugacuaucaugauucuaaugugaagaaccuguacgagaaagucagaucccagcucaagaacaaugccaaagaaauugggaacggauguuuugaguucuaucacaagugcgacaauaccuguauggaaagcgugaagaacggcacauacgauuauccuaaauacucugaggaggccaagcugaaucgggaagagaucgacgggguuaaacuugaauccacccgcaucuaucagauucuggcuaucuacagcacaguggccuccucucucguccuggugguuagccugggcgcgauuuccuuuuggaugugcucuaacggaagccuccaaugcagaaucuguauuuga

SEQ ID NO: 200474 - RNA, 1701 nt, Artificial Sequence
  derived and/or modified CDS sequence (opt5) from hemagglutinin__InfluenzaA__AFF57164
augaaggccauccuggugguccuccuguacaccuucgcuacagccaacgcggacacgcuuugcauuggcuaucacgcuaauaacagcaccgauacaguugacaccgugcuggagaaaaaugugacagucacccauuccgugaaccuccuggaagauaagcacaaugagaaacuuuguaagcugagagggguugcuccccuccaucugggaaaaugcaacaucgccggcuggauucuggggaauccugaaugugagucucucagcacagccuccucuuggagcuacaucguggaaaccuccucuagcgacaacggaacgugcuauccgggcgauuuuauugacuacgaggagcugcgggaacagcuuuccagcgucucuuccuucgagcgcuuugaaaucuuccccaagaccagcucuuggccuaaucacgauuccaacaagggggugacagccgcuuguccccaugccggagcgaaaucuuuuuauaagaaucugaucuggcucguuaaaaagggcaacagcuacccuaaacuguccaagagcuauauuaaugacaagggcaaagaggugcuuguccugugggggauccaccaccccuccaccucugccgaucaacagagccucuaccagaacgcugacgccuacguguucgugggauccagcagauauucuaagaaauuuaagccugagauugcuauccggccgaaaguccgcgauagagaaggccggaugaauuacuauuggacacugguugagcccggggacaagauuaccuucgaagccacgggaaaccugguggugccucgcuacgcguuugccauggagagaaacgcuggcuccgggaucauuaucagcgauacacccguccaugacugcaauaccacaugucagaccccuaaaggagccaucaacaccucucuccccuuccaaaauauucacccgaucacaauuggcaagugcccuaaguaugugaaaagcacgaagcugcggcuugcuaccggccugcgcaacguucccuccauccagucuagagggcucuuuggagccauugccggcuucaucgaagggggauggacaggcaugguggacgggugguacggauaucaucaccagaaugagcagggcagcggcuacgcugcggaucugaaauccacccaaaacgccaucgacgagauuacaaauaaggucaacagcgugaucgaaaagaugaauacccaguuuacggcuguugggaaggaguucaaccaccuugaaaagcggauugagaaucugaacaaaaagguggaugacggauuccucgauaucuggacauacaaugccgaacugcugguccuccuggagaacgagcgcacccuugacuaucaugauucuaaugugaaaaaccuguacgaaaaggucagaucccagcucaaaaacaaugccaaggagauuggcaacggguguuuugaguucuaucacaagugcgacaauaccuguauggaaagcgugaaaaacggaacauacgauuauccuaaguacucugaagaggcuaaacugaaucgggaggaaaucgacggcguuaaacuugaguccacccgcaucuaucagauucuggccaucuacagcacaguggcguccucucucguccuggugguuagccugggggcuauuuccuuuuggaugugcucuaacggcagccuccaaugcagaaucuguauuuga

SEQ ID NO: 200475 - RNA, 1701 nt, Artificial Sequence; identical to SEQ ID NO: 200474
  derived and/or modified CDS sequence (opt5) from hemagglutinin__InfluenzaA__AFF57168

SEQ ID NO: 200476 - RNA, 1701 nt, Artificial Sequence
  derived and/or modified CDS sequence (opt5) from hemagglutinin__InfluenzaA__AFF57172
augaaggccauccuggugguccuccuguacaccuucgcuacagccaacgcggacacgcuuugcauuggcuaucacgcuaauaacagcaccgauacaguugacaccgugcuggagaaaaaugugacagucacccauuccgugaaccuccuggaagauaagcacaaugggaaacuuuguaagcugagaggaguugcuccccuccaucugggcaaaugcaacaucgccggguggauucugggaaauccugagugugaaucucucagcacagccuccucuuggagcuacaucguggagaccuccucuagcgacaacggcacgugcuauccgggggauuuuauugacuacgaagaacugcgggagcagcuuuccagcgucucuuccuucgaacgcuuugagaucuuccccaagaccagcucuuggccuaaucacgauuccaacaagggagugacagccgcuuguccccaugccggcgcgaaaucuuuuuauaagaaucugaucuggcucguuaaaaagggcaacagcuacccuaaacuguccaagagcuauauuaaugacaaggggaaagaagugcuuguccuguggggaauccaccaccccuccaccucugccgaucaacagagccucuaccagaacgaggacgcuuacguguucgugggcuccagcagauauucuaagaaauuuaagccugagauugccauccggccgaaaguccgcgauagagaagggcggaugaauuacuauuggacacugguugagcccggagacaagauuaccuucgaagcuacgggcaaccugguggugccucgcuacgccuuugcgauggagagaaacgccggguccggaaucauuaucagcgauacacccguccaugacugcaauaccacaugucagaccccuaaaggcgcuaucaacaccucucuccccuuccaaaauauucacccgaucacaauuggcaagugcccuaaguaugugaaaagcacgaagcugcggcuugccaccgggcugcgcaacguucccuccauccagucuagaggacucuuuggcgcuauugccggguucaucgaaggaggcuggacagggaugguggacggaugguacggcuaucaucaccagaaugagcagggcagcggguacgccgcugaucugaaauccacccaaaacgcgaucgacgagauuacaaauaaggucaacagcgugaucgaaaagaugaauacccaguuuacggccguuggaaaggaguucaaccaccuugaaaagcggauugagaaucugaacaaaaagguggaugacggcuuccucgauaucuggacauacaaugcugaacugcugguccuccuggagaacgagcgcacccuugacuaucaugauucuaaugugaaaaaccuguacgaaaaggucagaucccagcucaaaaacaaugccaaggagauugggaacggauguuuugaguucuaucacaagugcgacaauaccuguauggagagcgugaaaaacggcacauacgauuauccuaaguacucugaagaggccaaacugaaucgggaggaaaucgacgggguuaaacuugaguccacccgcaucuaucagauucuggcuaucuacagcacaguggccuccucucucguccuggugguuagccugggcgcgauuuccuuuuggaugugcucuaacggaagccuccaaugcagaaucuguauuuga

SEQ ID NO: 200477 - RNA, 1701 nt, Artificial Sequence
  derived and/or modified CDS sequence (opt5) from hemagglutinin__InfluenzaA__AFF57176
augaaggccauccuggugguccuccuguacaccuucgcuacagccaacgcggacacgcuuugcauuggcuaucacgcuaauaacagcaccgauacaguugacaccgugcuggagaaaaaugugacagucacccauuccgugaaccuccuggaagauaagcacaaugggaaacuuuguaagcugagaggaguugcuccccuccaucugggcaaaugcaacaucgccggguggauucugggaaauccugagugugaaucucucagcacagccuccucuuggagcuacaucguggagaccuccucuagcgacaacggcacgugcuauccgggggauuuuauugacuacgaagaacugcgggagcagcuuuccagcgucucuuccuucgaacgcuuugagaucuuccccaagaccagcucuuggccuaaucacgauuccaacaagggagugacagccgcuuguccccaugccggcgcgaaaucuuuuuauaagaaucugaucuggcucguuaaaaaggaaaacagcuacccuaaacuguccaagagcuauauuaaugacaagggcaaagaggugcuuguccugugggggauccaccaccccuccaccucugccgaucaacagagccucuaccagaacgcugacgccuacguguucgugggauccagcagauauucuaagaaauuuaagccugagauugcuauccggccgaaaguccgcgauagagaaggccggaugaauuacuauuggacacugguugagcccggggacaagauuaccuucgaagccacgggaaaccugguggugccucgcuacgcguuugccauggagagaaacgcuggcuccgggaucauuaucagcgauacacccguccaugacugcaauaccacaugucagaccccuaaaggagccaucaacaccucucuccccuuccaaaauauucacccgaucacaauuggcaagugcccuaaguaugugaaaagcacgaagcugcggcuugcuaccggccugcgcaacguucccuccauccagucuagagggcucuuuggagccauugccggcuucaucgaagggggauggacaggcaugguggacgggugguacggauaucaucaccagaaugagcagggcagcggcuacgcugcggaucugaaauccacccaaaacgccaucgacgagauuacaaauaaggucaacagcgugaucgaaaagaugaauacccaguuuacggcuguugggaaggaguucaaccaccuugaaaagcggauugagaaucugaacaaaaagguggaugacggauuccucgauaucuggacauacaaugccgaacugcugguccuccuggagaacgagcgcacccuugacuaucaugauucuaaugugaaaaaccuguacgaaaaggucagaucccagcucaaaaacaaugccaaggagauuggcaacggguguuuugaguucuaucacaagugcgacaauaccuguauggagagcgugaaaaacggaacauacgauuauccuaaguacucugaagaggcuaaacugaaucgggaggaaaucgacggcguuaaacuugaguccacccgcaucuaucagauucuggccaucuacagcacaguggcguccucucucguccuggugguuagccugggggcuauuuccuuuuggaugugcucuaacggcagccuccaaugcagaaucuguauuuga

SEQ ID NO: 200478 - RNA, 1701 nt, Artificial Sequence
  derived and/or modified CDS sequence (opt5) from hemagglutinin__InfluenzaA__AFF57184
augaaggccauccuggugguccuccuguacaccuucgcuacagccaacgcggacacgcuuugcauuggcuaucacgcuaauaacagcaccgauacaguugacaccgugcuggagaaaaaugugacagucacccauuccgugaaccuccuggaagauaagcacaaugggaaacuuuguaagcugagaggaguugcuccccuccaucugggcaaaugcaacaucgccggguggauucugggaaauccugagugugaaucucucagcacagccuccucuuggagcuacaucguggagaccuccucuagcgacaacggcacgugcuauccgggggauuuuauugacuacgaagaacugcgggagcagcuuuccagcgucucuuccuucgaacgcuuugagaucuuccccaagaccagcucuuggccuaaucacgauuccaacaagggagugacagccgcuuguccccaugccggcgcgaaaucuuuuuauaagaaucugaucuggcucguuaaaaaggaaaacagcuaccaaaaacuguccaagagcuauauuaaugacaagggcaaagaggugcuuguccugugggggauccaccacccuuccaccucugccgaucagcagagccucuaccagaacgcugacgccuacguguucgugggauccagcagauauucuaagaaauuuaagcccgagauugcuauccggccuaaaguccgcgauagagaaggccggaugaauuacuauuggacacugguugagccgggggacaagauuaccuucgaagccacgggaaaccugguggugccccgcuacgcguuugccauggagagaaacgcuggcuccgggaucauuaucagcgauacaccuguccaugacugcaauaccacaugucaaacccccaaaggagccaucaacaccucucucccuuuccagaauauucaccccaucacaauuggcaagugcccgaaguaugugaaaagcacgaagcugcggcuugcuaccggccugcgcaacguuccuuccauccagucuagagggcucuuuggagccauugccggcuucaucgaagggggauggacaggcaugguggacgggugguacggauaucaucaccagaaugagcaaggcagcggcuacgcugcggaucugaaauccacccagaacgccaucgacgagauuacaaauaaggucaacagcgugaucgaaaagaugaauacccaguuuacggcuguugggaaggaguucaaccaccuugaaaagcggauugagaaucugaacaaaaagguggaugacggauuccucgauaucuggacauacaaugccgaacugcugguccuccuggagaacgagcgcacccuugacuaucaugauucuaaugugaaaaaccuguacgaaaaggucagaucccagcucaaaaacaaugccaaggagauuggcaacggguguuuugaguucuaucacaagugcgacaauaccuguauggagagcgugaaaaacggaacauacgauuaucccaaguacucugaagaggcuaaacugaaucgggaggaaaucgacggcguuaaacuugaguccacccgcaucuaucaaauucuggccaucuacagcacaguggcguccucucucguccuggugguuagccugggggcuauuuccuuuuggaugugcucuaacggcagccuccagugcagaaucuguauuuga

SEQ ID NO: 200479 - RNA, 1701 nt, Artificial Sequence; identical to SEQ ID NO: 200471
  derived and/or modified CDS sequence (opt5) from hemagglutinin__InfluenzaA__AFF57188

SEQ ID NO: 200480 - RNA, 1707 nt, Artificial Sequence
  derived and/or modified CDS sequence (opt5) from hemagglutinin__InfluenzaA__AFF60787
auggagaagaucgugcuccuguucgccauugucagccugguuaaauccgaccagaucugcauuggcuaccacgcuaacaauucuaccgaacaaguggauacaaucauggagaagaacgugacggucacccaugcccaggacauucuugagaaaacacacaaugggaagcugugugaucucgacggagugaaaccccugauccuuagagauugcagcguugcgggcuggcugcucgggaacccuaugugugacgaguuuaucaaugugccggaaugguccuauauugucgagaaggcuaaccccgugaaugaucugugcuacccuggagacuucaacgauuaugaggaacugaagcaucuccugucucggaucaaucacuuugagaaaauucagaucauucccaagagcuccuggucuagccaugaagccucccuuggcguuagcucugccuguccuuaccaggggaaauccagcuucuuucgcaacguggucuggcugaucaagaaaaauucuaccuaucccacaauuaagagauccuacaacaauaccaaccaagaggaccuccuggugcuuuggggaauccaccacccuaaugaugcugccgagcagacaaagcuguaucagaacccgaccacguacaucagcgugggcaccucuacacucaaccagcggcuggucccccgcauugcuaccagauccgaaguuaauggccaaagcgggcggauggaguucuuuuggacaauccugaaaccuaacgacgccauuaauuucgaauccaacggaaauuuuaucgcgcccgaguacgccuauaagauugugaaaaagggcgauucuaccaucaugaaaagcgaacucgaguacgggaacugcaauacgaagugucagacaccuaugggagcuaucaacuccagcaugcccuuccauaauauucacccgcugaccaucggcgagugcccuaaauaugugaagucuaaccgccuuguccuggccacagggcucagaaauagcccccagcgggaacgcagacggaagaaacgcggacuguuuggcgcuauugccggcuucaucgaagggggauggcagggcaugguggacgggugguacggauaucaucacuccaacgaacaaggcucuggguacgcggccgacaaggagagcacccagaaagcuauugauggaguuaccaauaaggugaacuccaucaucgacaaaaugaauacacaguuugaagccgucggcagagaguucaacaaccuugagcggcgcauugaaaaucugaacaagaagauggaggauggcuuccucgacguguggacguauaaugcugaacugcugguucucauggagaacgaaagaacccuggauuuucacgacucuaaugugaaaaaccuuuacgauaagguccggcugcaacucagagacaaugccaaagagcuggggaacggauguuucgaguuuuaccauaagugcgauaaugaauguauggagagcgugcgcaacggcacauaugacuacccucaguauuccgaagaggcccggcuuaaaagagaggaaaucagcggggucaagcuggagucuauuggaaucuaccagauucucuccaucuauagcaccguggcuucuucccuggcgcuggccauuaugguugcuggccucagccuguggaugugcuccaaugggucucuucagugccgcaucuguaucuga

SEQ ID NO: 200481 - RNA, 1701 nt, Artificial Sequence
  derived and/or modified CDS sequence (opt5) from hemagglutinin__InfluenzaA__AFG29042
augaaggccauccuggugguccuccuguacaccuucgcuacagccaacgcggacacgcuuugcauuggcuaucacgcuaauaacagcaccgauacaguugacaccgugcuggagaagaaugugacagucacccauuccgugaaccuccuggaagauaagcacaaugggaaacuuuguaagcugagaggaguugcuccccuccaucugggcaaaugcaacaucgccggguggauucugggaaauccugagugugaaucucucagcacagccuccucuuggagcuacaucguggagaccuuuuccucugacaacggcacgugcuauccgggggauuucauugacuacgaagaacugcgggagcagcuuagcuccgucagcucuuuugaacgcuucgagaucuuucccaagaccuccagcuggccuaaucacgauucuaacaagggagugacagccgcuuguccccaugccggcgcgaaauccuucuauaagaaucugaucuggcucguuaaaaagggcaacagcuacccuaaacugucuaaguccuauauuaaugacaaggggaaagaagugcuuguccuguggggaauccaccaccccagcaccuccgccgaucaacagucucucuaccagaacgcugacgccuacguguuugugggcacaagcagauauuccaagaaauucaagccugagauugcuauccggccgaaaguccgcgaucaggaggggagaaugaauuacuauuggacccugauugaacccggagacaagaucacguuugaggccacaggcaaccugguugugccucgguacgcguucgccauggaacgcaacgcugggagcggaauuaucaucucugauacccccgugcaugacugcaauacaaccugucaaaccccuaaaggcgccauuaacacaucccuccccuuucagaauauccacccgauuacgaucggcaagugcccuaaguaugucaaaagcaccaagcugagacuugcuacagggcugcggaacgugcccucuauucagagccgcggacucuucggcgccaucgccggguuuaucgagggaggcuggaccgggaugguugacggaugguacggcuaucaucaccagaaugaacaaggcuccggguacgcugcggaucugaaaucuacacagaacgccauugacgagaucaccaauaaggugaacagcgucauugagaaaaugaauacgcaguucacagcugugggaaaggaguucaaccaccuugagaagagaaucgaaaaucugaacaaaaagguugaugacggcuuucucgauauuuggaccuacaaugccgagcugcuggugcuccuggaaaacgagcggacccuugacuaucaugauuccaaugucaaaaaccuguacgagaaggugcgcagccagcucaaaaacaaugccaaggaaaucgggaacggauguuucgaguuuuaucacaagugcgacaauacauguauggaaucugucaaaaacggcaccuacgauuauccuaaguacuccgaggaagcuaaacugaauagagaggagaucgacggggugaaacuugaaagcacacggauuuaucaaauccuggccauuuacucuacgguugcguccagccucgugcuggucgugucccugggcgcuaucucuuucuggaugugcagcaacggaucccuccagugccgcauuuguaucuga

SEQ ID NO: 200482 - RNA, 1701 nt, Artificial Sequence
  derived and/or modified CDS sequence (opt5) from hemagglutinin__InfluenzaA__AFG29044
augaaggccauccuggugguccuccuguacaccuucgcuacagccaacgcggacacgcuuugcauuggcuaucacgcuaauaacagcaccgauacaguugacaccgugcuggagaaaaaugugacagucacccauuccgugaaccuccuggaagauaagcacaaugggaaacuuuguaagcugagaggaguugcuccccuccaucugggcaaaugcaacaucgccggguggauucugggaaauccugagugugaaucucucagcacagccuccucuuggagcuacaucguggagaccccgaacuccgacaauggcacgugcuaucccggggauuuuauugacuacgaagaacugcgggagcagcuuucuagcgucuccagcuucgaacgcuuugagaucuucccuaagaccucuuccuggcccaaccacgauagcaauaagggagugacagccgcuuguccucaugccggcgcgaaaucuuuuuauaagaaccugaucuggcucguuaaaaagggcaauuccuaccccaaacugagcaagucuuauauuaacgacaaggggaaagaagugcuuguccuguggggaauccaccacccuccgaccuccacagaucaacagagccucuaccagaaugccgacgcuuacguguucgugggcaccuccagauauucuaagaaauuuaagcccgagauugccauccggccuaaaguccgcgggcaggagggaagaaugaacuacuauuggacgcugguugaacccggcgauaagauuacauucgaggcuaccgggaaccugguggugccucgguacgccuuugcgauggaacgcaaugccggaagcggcaucauuaucuccgacacacccguccaugauugcaacaccaccugucaaacaccgaaaggcgcuaucaauacgagccucccuuuccagaacauucaccccaucaccauugggaagugcccuaaguaugugaaaucuacaaagcugagacuugccaccggacugcggaauguucccuccauccagagccgcggccucuuuggggcuauugccggauucaucgagggcggguggacaggaaugguggacggcugguacggcuaucaucaccagaacgaacaagggucuggauacgccgcugaccugaaaagcacccagaaugcgaucgauaagauuacgaacaaagucaauuccgugaucgagaagaugaacacacaguuuaccgccguuggcaaggaguucaaucaccuugagaaaagaauugagaaccugaauaagaaaguggacgauggguuccucgacaucuggaccuacaacgcugaacugcugguccuccuggagaaugaacggacacuugauuaucaugacucuaacgugaagaaccuguacgagaaaguccgcagccagcucaagaauaacgccaaggagauuggaaauggcuguuuugaguucuaucacaaaugcgauaacaccuguauggaauccgugaagaaugggacauacgacuaucccaaauacagcgaagaggccaagcugaacagagaagagaucgauggcguuaaacuugagucuacgcggaucuaucaaauucuggcuaucuacuccaccguggccagcucucucguccuggugguuucccugggagcgauuagcuuuuggaugugcuccaauggcucucuccagugccgcaucuguauuuga

SEQ ID NO: 200483 - RNA, 1701 nt, Artificial Sequence; identical to SEQ ID NO: 194741
  derived and/or modified CDS sequence (opt5) from hemagglutinin__InfluenzaA__AFG31060

SEQ ID NO: 200484 - RNA, 1701 nt, Artificial Sequence; identical to SEQ ID NO: 197296
  derived and/or modified CDS sequence (opt5) from hemagglutinin__InfluenzaA__AFG31070

SEQ ID NO: 200485 - RNA, 1701 nt, Artificial Sequence; identical to SEQ ID NO: 194728
  derived and/or modified CDS sequence (opt5) from hemagglutinin__InfluenzaA__AFG31080

SEQ ID NO: 200486 - RNA, 1701 nt, Artificial Sequence
  derived and/or modified CDS sequence (opt5) from hemagglutinin__InfluenzaA__AFG31100
augaaggccauccuggugguccuccuguacaccuucgcuacagccaacgcggacacgcuuugcauuggcuaucacgcuaauaacagcaccgauacaguugacaccgugcuggagaaaaaugugacagucacccauuccgugaaccuccuggaagauaagcacaaugggaaacuuuguaagcugagaggaguugcuccccuccaucugggcaaaugcaacaucgccggguggauucugggaaauccugagugugaaucucucagcacagccuccucuuggagcuacaucguggagaccuccucuagcgacaacggcacgugcuauccgggggauuuuauugacuacgaagaacugcgggagcagcuuuccagcgucucuuccuucgaacgcuuugagaucuuccccaagaccagcucuuggccuaaucacgaucugaacaagggagugacagccgcuuguccccaugccggcgcgaaauccuuuuauaagaaucucaucuggcugguuaaaaagggcaacagcuacccuaaacuuucuaaguccuauauuaaugacaaggggaaagaagugcugguccucuggggaauccaccaccccagcaccuccgccgaucaacagucucuguaccagaacgcugacgccuacguguucgugggcacaagcagauauuccaagaaauuuaagccugagauugcuauccggccgaaaguccgcgaucaggaggggagaaugaauuacuauuggacccugguugaacccggagacaagauuacguucgaggccacaggcaaccucguggugccucgguacgcguuugccauggaacgcaacgcugggagcggaaucauuaucucugauacccccguccaugacugcaauacaaccugucaaaccccuaaaggcgccaucaacacaucccugcccuuccagaauauucacccgaucacgauuggcaagugcccuaaguaugugaaaagcaccaaacuuagacuggcuacagggcuccggaacguucccucuauccagagccgcggacuguuuggcgccauugccggguucaucgagggaggcuggaccgggaugguggacggaugguacggcuaucaucaccagaaugaacaaggcuccggguacgcugcggaucuuaagucuacacagaacgccaucgacgagauuaccaauaaggucaacagcgugaucgagaaaaugaauacgcaguuuacagcuguuggaaaggaguucaaccaccuggagaagagaauugaaaaucucaacaaaaagguggaugacggcuuccuggauaucuggaccuacaaugccgagcugcucguccugcuugaaaacgagcggacccuggacuaucaugauuccaaugugaaaaaccucuacgagaagguccgcagccagcugaaaaacaaugccaaggaaauugggaacggauguuuugaguucuaucacaagugcgacaauacauguauggaaucugugaaaaacggcaccuacgauuauccuaaguacuccgaggaagcuaaacuuaauagagaggagaucgacgggguuaagcuggaaagcacacggaucuaucaaauucucgccaucuacucuacgguggcguccagccugguccugauugugucccucggcgcuaucucuuuuuggaugugcagcaacggaucccugcagugccgcauuuguaucuga

SEQ ID NO: 200487 - RNA, 1701 nt, Artificial Sequence; identical to SEQ ID NO: 194741
  derived and/or modified CDS sequence (opt5) from hemagglutinin__InfluenzaA__AFG31110

SEQ ID NO: 200488 - RNA, 1701 nt, Artificial Sequence; identical to SEQ ID NO: 194983
  derived and/or modified CDS sequence (opt5) from hemagglutinin__InfluenzaA__AFG31120

SEQ ID NO: 200489 - RNA, 1701 nt, Artificial Sequence; identical to SEQ ID NO: 194983
  derived and/or modified CDS sequence (opt5) from hemagglutinin__InfluenzaA__AFG31130

SEQ ID NO: 200490 - RNA, 1701 nt, Artificial Sequence; identical to SEQ ID NO: 194983
  derived and/or modified CDS sequence (opt5) from hemagglutinin__InfluenzaA__AFG31140

SEQ ID NO: 200491 - RNA, 1701 nt, Artificial Sequence; identical to SEQ ID NO: 195843
  derived and/or modified CDS sequence (opt5) from hemagglutinin__InfluenzaA__AFG31150

SEQ ID NO: 200492 - RNA, 1701 nt, Artificial Sequence; identical to SEQ ID NO: 195843
  derived and/or modified CDS sequence (opt5) from hemagglutinin__InfluenzaA__AFG31160

SEQ ID NO: 200493 - RNA, 1701 nt, Artificial Sequence; identical to SEQ ID NO: 194741
  derived and/or modified CDS sequence (opt5) from hemagglutinin__InfluenzaA__AFG31170

SEQ ID NO: 200494 - RNA, 1701 nt, Artificial Sequence; identical to SEQ ID NO: 194741
  derived and/or modified CDS sequence (opt5) from hemagglutinin__InfluenzaA__AFG31180

SEQ ID NO: 200495 - RNA, 1701 nt, Artificial Sequence; identical to SEQ ID NO: 194741
  derived and/or modified CDS sequence (opt5) from hemagglutinin__InfluenzaA__AFG31190

SEQ ID NO: 200496 - RNA, 1701 nt, Artificial Sequence; identical to SEQ ID NO: 194741
  derived and/or modified CDS sequence (opt5) from hemagglutinin__InfluenzaA__AFG31200

SEQ ID NO: 200497 - RNA, 1701 nt, Artificial Sequence; identical to SEQ ID NO: 194741
  derived and/or modified CDS sequence (opt5) from hemagglutinin__InfluenzaA__AFG31210

SEQ ID NO: 200498 - RNA, 1701 nt, Artificial Sequence; identical to SEQ ID NO: 194741
  derived and/or modified CDS sequence (opt5) from hemagglutinin__InfluenzaA__AFG31220

SEQ ID NO: 200499 - RNA, 1701 nt, Artificial Sequence; identical to SEQ ID NO: 197296
  derived and/or modified CDS sequence (opt5) from hemagglutinin__InfluenzaA__AFG31230

SEQ ID NO: 200500 - RNA, 1701 nt, Artificial Sequence; identical to SEQ ID NO: 194741
  derived and/or modified CDS sequence (opt5) from hemagglutinin__InfluenzaA__AFG31240

SEQ ID NO: 200501 - RNA, 1701 nt, Artificial Sequence; identical to SEQ ID NO: 194741
  derived and/or modified CDS sequence (opt5) from hemagglutinin__InfluenzaA__AFG31250

SEQ ID NO: 200502 - RNA, 1701 nt, Artificial Sequence; identical to SEQ ID NO: 194741
  derived and/or modified CDS sequence (opt5) from hemagglutinin__InfluenzaA__AFG31260

SEQ ID NO: 200503 - RNA, 1701 nt, Artificial Sequence; identical to SEQ ID NO: 194741
  derived and/or modified CDS sequence (opt5) from hemagglutinin__InfluenzaA__AFG31270

SEQ ID NO: 200504 - RNA, 1701 nt, Artificial Sequence; identical to SEQ ID NO: 194741
  derived and/or modified CDS sequence (opt5) from hemagglutinin__InfluenzaA__AFG31280

SEQ ID NO: 200505 - RNA, 1701 nt, Artificial Sequence; identical to SEQ ID NO: 194741
  derived and/or modified CDS sequence (opt5) from hemagglutinin__InfluenzaA__AFG31290

SEQ ID NO: 200506 - RNA, 1701 nt, Artificial Sequence
  derived and/or modified CDS sequence (opt5) from hemagglutinin__InfluenzaA__AFG31300
augaaggccauccuggugguccuccuguacaccuucgcuacagccaacgcggacacgcuuugcauuggcuaucacgcuaauaacagcaccgauacaguugacaccgugcuggagaagaaugugacagucacccauuccgugaaccuccuggaagauaagcacaaugggaaacuuuguaagcugagaggaguugcuccccuccaucugggcaaaugcaacaucgccggguggauucugggaaauccugagugugaaucucucagcacagccuccucuuggagcuacaucguggagaccuccucuagcgacaacggcacgugcuauccgggggauuuuauugacuacgaagaacugcgggagcagcuuuccagcgucucuuccuucgaacgcuuugagaucuuccccaagaccagcucuuggccuaaucacgauuccaacaagggagugacagccgcuuguccccaugccggcgcgaaaucuuuuuauaagaaucugaucuggcucguuaaaaagggcaacagcuacccuaaacuguccaagagcuauauuaaugacaaggggaaagaagugcuuguccuguggggaauccaccaccccuccaccucugccgaucaacagagccucuaccagaacgcugacgccuacguguucgugggcacauccagauauagcaagaaauuuaagccugagauugcuauccggccgaaaguccgcgaucaggaggggagaaugaauuacuauuggacccugguugaacccggagacaagauuacguucgaggccacaggcaaccugguggugccucgguacgcguuugccauggaacgcaacgcugggucuggaaucauuaucuccgauacccccguccaugacugcaauacaaccugucaaaccccuaaaggcgccaucaacacaagccuccccuuccagaauauuaacccgaucacgauuggcaagugcccuaaguaugugaaaucuaccaagcugagacuugcuacagggcugcggaauguucccagcauccagucccgcggacucuuuggcgccauugccggguucaucgagggaggcuggaccgggaugguggacggaugguacggcuaucaccaucagaacgaacaaggcucuggguacgcugcggaucugaaaagcacacagaaugccaucgacgagauuaccaacaaggucaauuccgugaucgagaaaaugaacacgcaguuuacagcuguuggaaaggaguucaaucaccuugagaagagaauugaaaaccugaauaaaaagguggaugacggcuuccucgauaucuggaccuacaacgccgagcugcugguccuccuggaaaaugagcggacccuugacuaucacgauagcaacgugaaaaaccuguacgagaagguccgcucucagcucaaaaauaacgccaaggaaauugggaauggauguuuugaguucuaucauaagugcgacaacacauguauggaauccgugaaaaauggcaccuacgauuauccuaaguacagcgaggaagcuaaacugaacagagaggagaucgacgggguuaaacuugaaucuacacggaucuaucaaauucuggccaucuacuccacgguggcgagcucccucguccuggugguuucucugggcgcuauuagcuuuuggaugugcuccaauggaucucuccagugccgcaucuguauuuga

SEQ ID NO: 200507 - RNA, 1701 nt, Artificial Sequence; identical to SEQ ID NO: 197296
  derived and/or modified CDS sequence (opt5) from hemagglutinin__InfluenzaA__AFG31310

SEQ ID NO: 200508 - RNA, 1701 nt, Artificial Sequence; identical to SEQ ID NO: 194741
  derived and/or modified CDS sequence (opt5) from hemagglutinin__InfluenzaA__AFG31323

SEQ ID NO: 200509 - RNA, 1701 nt, Artificial Sequence; identical to SEQ ID NO: 194741
  derived and/or modified CDS sequence (opt5) from hemagglutinin__InfluenzaA__AFG31333

SEQ ID NO: 200510 - RNA, 1701 nt, Artificial Sequence; identical to SEQ ID NO: 194741
  derived and/or modified CDS sequence (opt5) from hemagglutinin__InfluenzaA__AFG31343

SEQ ID NO: 200511 - RNA, 1701 nt, Artificial Sequence; identical to SEQ ID NO: 194741
  derived and/or modified CDS sequence (opt5) from hemagglutinin__InfluenzaA__AFG31353

SEQ ID NO: 200512 - RNA, 1701 nt, Artificial Sequence; identical to SEQ ID NO: 194741
  derived and/or modified CDS sequence (opt5) from hemagglutinin__InfluenzaA__AFG31363

SEQ ID NO: 200513 - RNA, 1701 nt, Artificial Sequence; identical to SEQ ID NO: 194741
  derived and/or modified CDS sequence (opt5) from hemagglutinin__InfluenzaA__AFG31376

SEQ ID NO: 200514 - RNA, 1701 nt, Artificial Sequence; identical to SEQ ID NO: 194741
  derived and/or modified CDS sequence (opt5) from hemagglutinin__InfluenzaA__AFG31386

SEQ ID NO: 200515 - RNA, 1701 nt, Artificial Sequence; identical to SEQ ID NO: 194741
  derived and/or modified CDS sequence (opt5) from hemagglutinin__InfluenzaA__AFG31396

SEQ ID NO: 200516 - RNA, 1701 nt, Artificial Sequence; identical to SEQ ID NO: 194741
  derived and/or modified CDS sequence (opt5) from hemagglutinin__InfluenzaA__AFG31406

SEQ ID NO: 200517 - RNA, 1701 nt, Artificial Sequence; identical to SEQ ID NO: 194741
  derived and/or modified CDS sequence (opt5) from hemagglutinin__InfluenzaA__AFG31416

SEQ ID NO: 200518 - RNA, 1701 nt, Artificial Sequence; identical to SEQ ID NO: 194741
  derived and/or modified CDS sequence (opt5) from hemagglutinin__InfluenzaA__AFG31426

SEQ ID NO: 200519 - RNA, 1701 nt, Artificial Sequence; identical to SEQ ID NO: 194741
  derived and/or modified CDS sequence (opt5) from hemagglutinin__InfluenzaA__AFG31436

SEQ ID NO: 200520 - RNA, 1701 nt, Artificial Sequence; identical to SEQ ID NO: 194741
  derived and/or modified CDS sequence (opt5) from hemagglutinin__InfluenzaA__AFG31446

SEQ ID NO: 200521 - RNA, 1701 nt, Artificial Sequence; identical to SEQ ID NO: 194741
  derived and/or modified CDS sequence (opt5) from hemagglutinin__InfluenzaA__AFG31456

SEQ ID NO: 200522 - RNA, 1701 nt, Artificial Sequence; identical to SEQ ID NO: 194741
  derived and/or modified CDS sequence (opt5) from hemagglutinin__InfluenzaA__AFG31466

SEQ ID NO: 200523 - RNA, 1701 nt, Artificial Sequence; identical to SEQ ID NO: 195843
  derived and/or modified CDS sequence (opt5) from hemagglutinin__InfluenzaA__AFG31486

SEQ ID NO: 200524 - RNA, 1701 nt, Artificial Sequence; identical to SEQ ID NO: 194741
  derived and/or modified CDS sequence (opt5) from hemagglutinin__InfluenzaA__AFG31496

SEQ ID NO: 200525 - RNA, 1701 nt, Artificial Sequence; identical to SEQ ID NO: 194741
  derived and/or modified CDS sequence (opt5) from hemagglutinin__InfluenzaA__AFG31506

SEQ ID NO: 200526 - RNA, 1701 nt, Artificial Sequence; identical to SEQ ID NO: 194741
  derived and/or modified CDS sequence (opt5) from hemagglutinin__InfluenzaA__AFG31516

SEQ ID NO: 200527 - RNA, 1701 nt, Artificial Sequence; identical to SEQ ID NO: 194832
  derived and/or modified CDS sequence (opt5) from hemagglutinin__InfluenzaA__AFG31526

SEQ ID NO: 200528 - RNA, 1701 nt, Artificial Sequence; identical to SEQ ID NO: 194741
  derived and/or modified CDS sequence (opt5) from hemagglutinin__InfluenzaA__AFG31536

SEQ ID NO: 200529 - RNA, 1701 nt, Artificial Sequence; identical to SEQ ID NO: 197296
  derived and/or modified CDS sequence (opt5) from hemagglutinin__InfluenzaA__AFG31546

SEQ ID NO: 200530 - RNA, 1701 nt, Artificial Sequence; identical to SEQ ID NO: 197296
  derived and/or modified CDS sequence (opt5) from hemagglutinin__InfluenzaA__AFG31556

SEQ ID NO: 200531 - RNA, 1701 nt, Artificial Sequence; identical to SEQ ID NO: 194741
  derived and/or modified CDS sequence (opt5) from hemagglutinin__InfluenzaA__AFG31566

SEQ ID NO: 200532 - RNA, 1701 nt, Artificial Sequence; identical to SEQ ID NO: 194983
  derived and/or modified CDS sequence (opt5) from hemagglutinin__InfluenzaA__AFG31586

SEQ ID NO: 200533 - RNA, 1701 nt, Artificial Sequence; identical to SEQ ID NO: 194983
  derived and/or modified CDS sequence (opt5) from hemagglutinin__InfluenzaA__AFG31596

SEQ ID NO: 200534 - RNA, 1701 nt, Artificial Sequence; identical to SEQ ID NO: 194983
  derived and/or modified CDS sequence (opt5) from hemagglutinin__InfluenzaA__AFG31606

SEQ ID NO: 200535 - RNA, 1701 nt, Artificial Sequence; identical to SEQ ID NO: 194983
  derived and/or modified CDS sequence (opt5) from hemagglutinin__InfluenzaA__AFG31616

SEQ ID NO: 200536 - RNA, 1701 nt, Artificial Sequence; identical to SEQ ID NO: 194983
  derived and/or modified CDS sequence (opt5) from hemagglutinin__InfluenzaA__AFG31626

SEQ ID NO: 200537 - RNA, 1701 nt, Artificial Sequence; identical to SEQ ID NO: 194741
  derived and/or modified CDS sequence (opt5) from hemagglutinin__InfluenzaA__AFG31636

SEQ ID NO: 200538 - RNA, 1701 nt, Artificial Sequence; identical to SEQ ID NO: 194741
  derived and/or modified CDS sequence (opt5) from hemagglutinin__InfluenzaA__AFG31646

SEQ ID NO: 200539 - RNA, 1701 nt, Artificial Sequence; identical to SEQ ID NO: 195905
  derived and/or modified CDS sequence (opt5) from hemagglutinin__InfluenzaA__AFG31656

SEQ ID NO: 200540 - RNA, 1701 nt, Artificial Sequence; identical to SEQ ID NO: 195905
  derived and/or modified CDS sequence (opt5) from hemagglutinin__InfluenzaA__AFG31666

SEQ ID NO: 200541 - RNA, 1701 nt, Artificial Sequence
  derived and/or modified CDS sequence (opt5) from hemagglutinin__InfluenzaA__AFG71865
augaagaccaucauugcccugagcuacaucuucugccucgcucugggccaggaccuucccgggaacgauaauuccacagccacgcugugucucggacaccaugcggugccuaacggcacccuggucaaaacaauuaccaaugaccaaaucgagguuacaaacgcuaccgaacuugugcagucuagcuccacagggaagauuugcaauaacccgcacagaauccuggauggaaucgacuguacccucauugaugcccugcugggcgacccccauugcgauguguuucagaaugagacgugggaccucuucgucgaacggucuaaagccuuuagcaacuguuauccuuacgaugugcccgacuaugcuucccugcgcucucuuguugccagcuccgggacccuggaguucaucacagaaggauuuaccuggacaggcgugacccagaauggcgggagcaacgcuugcaagagaggaccuggcauuggguucuuuucucggcucaauuggcugacgaaauccggaagcacauaccccguccuuaacgugaccaugccuaauaacgauaauuucgacaagcuguauaucuggggcguucaccauccgucuacaaaccaagagcagaccucccucuacgugcaggccagcgggcgcgucaccgugucuacaagacggucccagcaaacgauuauccccaacauuggaagccgcccuugggugagaggccuguccucucggaucagcaucuauuggaccauugucaagcccggcgauguucuggugaucaauuccaacgggaaucucauugcgccucgcggauacuuuaaaaugagaacaggcaagagcucuaucaugcgguccgacgcccccauugacaccuguaucagcgagugcaucacaccgaacgggucuauuccuaaugauaaacccuuccagaacgugaauaagaucaccuacggagcuuguccuaaauaugucaagcagaacacgcugaaacuugccacaggcaugcgcaaugugcccgaaaagcagaccagagggcuguuuggagcuauugccggcuucaucgagaacggcugggaagggaugauugacggaugguacggcuuucggcaccaaaauagcgaggggaccggacaggcggccgaucucaaguccacacaggcugccaucgaccaaaucaacggcaaacugaaucgcguuauugagaagaccaacgaaaaauuccaccagaucgagaaggaguucucugaaguggaagggcggauucaggaucuugagaaauaugucgaggacacaaagaucgaucuguggagcuacaaugcugaacuccugguggcccuggagaaccagcauacgauugaccucaccgauuccgaaaugaacaagcuguuugagaaaacaagaagacaacuucgcgaaaaugccgaggacaugggcaacggaugcuucaagaucuaucacaaaugugauaaugcuugcauugagagcauccggaacggcaccuacgaccaugacguuuauagagaugaagcgcugaauaaccgcuuucagaucaaggggguggagcucaaaucuggauacaaggacuggauucuguggaucuccuucgccauuagcugcuuucuucugugugucgugcuccugggcuucaucaugugggcuugccagcgggggaauauuagauguaacaucugcaucuga

SEQ ID NO: 200542 - RNA, 1701 nt, Artificial Sequence; identical to SEQ ID NO: 193628
  derived and/or modified CDS sequence (opt5) from hemagglutinin__InfluenzaA__AFG71876

SEQ ID NO: 200543 - RNA, 1701 nt, Artificial Sequence
  derived and/or modified CDS sequence (opt5) from hemagglutinin__InfluenzaA__AFG71898
augaagaccaucauugcccugagcuaccucuucugccuggcuuuuggccaggaccuucccgggaacgauaauuccacagccacgcugugucucggacaccaugcggugccuaacggcacccuggucaaaacaaucaccgacgaucaaauugagguuacaaaugcuaccgaacuugugcagucuagcuccacagggaagaucugcaacaauccgcaccggauucuggacggaaucgauuguacccucaucgacgcccugcugggcgauccccauugcgacguguuccagaacgagacgugggaucucuuugucgaaagaucuaaagccuucagcaauuguuauccuuacgacgugcccgauuaugcuucccugcgcucucuuguugccagcuccgggacccuggaguuuacaaccgaaggauucacauggaccggcgugacgcagaacggcgggagcaaugcuugcaagagaggaccuggcucuggguuuuucucccggcucaacuggcugacaaaaagcggaucuaccuaccccguccuuaaugugacaauguccaacaaugacaacuuugauaagcuguauauuuggggcguucaccauccuagcaccaaucaagagcagaccucucucuacgugcaggccuccgggcgcgucacagugagcacgagacggucccagcaaaccaucauuccgaacaucggaucucgccccugggugagaggccugagcucccggauuagcaucuauuggacaauugucaagccuggcgacguucuggugaucaacucuaaugggaaccucaucgcgccccgcggauacuucaaaaugagaaccggcaaguccagcauuaugcggucugacgccccuaucgauacaugugugagcgagugcauuacccccaauggguccaucccgaacgacaaaccuuuucagaaugucaacaagauuacguacggagcuugucccaaauaugugaagcagaauacacugaaacuugccaccggcaugcgcaacguuccugaaaagcagaccagagggcuguucggagcuaucgccggcuuuaucgagaauggcugggaagggaugauugauggaugguacggcuuccggcaccaaaacucugaggggacaggacaggcggccgaccucaagagcacccaggcugccaucgaucaaauuaauggcaaacugaaccgcgugaucgagaagacaaaugaaaaauuccaccagauugagaaggaauuuuccgaggucgaagggagaauccaggaccuugagaaauauguggaggauacgaagaucgaccuguggagcuacaacgcugaacuccugguugcccuggagaaucagcauaccauugaucucacagacucugaaaugaacaagcuguucgagaaaacccggagacaacuucgcgaaaacgccgaggauaugggcaauggaugcuuuaagaucuaucacaaaugugacaacgcuugcauugaguccauccggaauggcacauacgaccaugauguguauagagacgaagcgcugaacaaucgcuuccagauuaagggggucgagcucaaaagcggauacaaggauuggauccuguggauuucuuuugccaucuccugcuuccuucugugugugguccuccugggcuuuaucaugugggcuugccagcgggggaacauuagauguaauaucugcauuuga

SEQ ID NO: 200544 - RNA, 1701 nt, Artificial Sequence
  derived and/or modified CDS sequence (opt5) from hemagglutinin__InfluenzaA__AFG71920
augaagaccaucauugcccugagcuacaucuucugccucgcucugggccaggaccuucccgggaacgauaauuccacagccacgcugugucucggacaccaugcggugccuaacggcacccuggucaaaacaauuaccaaugaccaaaucgagguuacaaacgcuaccgaacuugugcagucuagcuccacagggaagauuugcaauaacccgcacagaauccuggauggaaucaauuguacccucauugacgcccugcugggcgauccccauugcgacguguuucaggaugagacgugggaccucuucgucgaacggucuaaagccuuuagcaacuguuauccuuacgaugugcccgacuaugcuucccugcgcucucuuaucgccagcuccgggacccuggaguucauuacagaaggauuuaccuggacaggcguuacccagaauggcgggagcaacgcuugcaagagaggaccuggcucuggguucuuuucccggcucaauuggcugacgaaaagcggaucuacauaccccgugcuuaacgucaccaugccuaauaacgauaauuucgacaagcuguauaucuggggcgugcaccauccguccacaaaccaagagcagaccagccucuacguucaggccucugggcgcgugaccgucuccacaagacggagccagcaaacgauuauccccaacauuggaucccgcccuugggugagaggccugucuagccggaucuccaucuauuggaccauugugaagcccggcgauguccugguuaucaauagcaacgggaaucucauugcgccucgcggauacuuuaaaaugagaacaggcaagucuuccaucaugcggagcgacgcccccauugacaccuguaucucugagugcaucacaccgaacgggagcauuccuaaugauaaacccuuccagaacgugaauaagaucaccuacggagcuuguccuaaauaugugaagcagaacacgcugaaacuugccacaggcaugcgcaauguccccgaaaagcagaccagagggcuguuuggagcuauugccggcuucaucgagaacggcugggaagggaugauugacggaugguacggcuuucggcaccaaaauuccgaggggaccggacaggcggccgaucucaagucuacacaggcugccaucgaccaaaucaacggcaaacugaaucgcgugauugagaagaccaacgaaaaauuccaccagaucgagaaggaguucagcgaaguugaagggcggauucaggaucuugagaaauauguggaggacacaaagaucgaucugugguccuacaaugcugaacuccuggucgcccuggagaaccagcauacgauugaccucaccgauagcgaaaugaacaagcuguuugagaaaacaagaagacaacuucgcgaaaaugccgaggacaugggcaacggaugcuucaagaucuaucacaaaugugauaaugcuugcauugagucuauccggaacggcaccuacgaccaugacguguauagagaugaagcgcugaauaaccgcuuucagaucaaggggguugagcucaaauccggauacaaggacuggauucuguggaucagcuucgccauuucuugcuuucuucugugugugguccuccugggcuucaucaugugggcuugccagcgggggaauauuagauguaacaucugcaucuga

SEQ ID NO: 200545 - RNA, 1701 nt, Artificial Sequence
  derived and/or modified CDS sequence (opt5) from hemagglutinin__InfluenzaA__AFG71931
augaagaccaucauugcccugagcuacaucuucugccucgugauuggccaggaccugcccgggaacgaaaauuccacagcuacgcuuugucugggacaccaugccgucccuaacggcacccucguuaaaacaaucaccaaugaucaaauugaagugacaaacgcgaccgagcuggugcagucuagcuccacagggaagaucugcaauaacccgcacagaauccuugacggaauugauuguacccugaucgacgcucuccugggcgauccccauugcgacggguuucagaaugaaacgugggaucuguucgucgagcggucuaaagccuuuagcaacuguuauccuuacgacgugcccgauuaugccucccuccgcucucugguugcuagcuccggaacccuugaguucauuacagagggcuuuaccuggacaggcgugacccagaaugggggaagcaacgccugcaagagaggcccugggaucggauucuuuucucggcugaauuggcucacgaaauccggcagcacauaccccguccugaacgugaccaugccuaauaacgacaauuucgauaaacuuuauauuuggggaguucaccauccgucuacaaaccaagagcagaccucccuguacgugcaggcuagcgggcgcgucaccgugucuacaagacggucccagcaaacgaucauucccaacaucggcagccgcccuugggugagaggccucuccucucggaucagcauuuauuggaccaucgucaagcccggggacguucuggugauuaauuccaacggaaaucugaucgccccucgcggcuacuuuaaaaugagaacaggaaagagcucuauuaugcgguccgaugcgcccaucgacaccuguaucagcgaaugcauuacaccgaacgggucuaucccuaaugacaaacccuuccagaacgugaauaagauuaccuacggcgccuguccuaaauaugucaagcagaacacgcucaagcuggcuacagggaugcgcaaugugcccgagaaacagaccagaggacuuuuuggcgccaucgcuggcuucauugaaaacgggugggagggaaugaucgauggcugguacggguuucggcaccaaaauagcgagggaaccggccaggccgcggaccugaaguccacacaggccgcuaucgaucaaauuaacgggaaacucaaucgcguuaucgaaaagaccaacgagaaauuccaccagauugaaaaggaguucucugaaguggagggcagaauccaggaccuggagaaauaugucgaagauacaaagauugaccuuuggagcuacaaugccgagcugcucguggcucuggaaaaccagcauacgaucgaucugaccgacuccgagaugaacaagcucuuugaaaagacacggagacaacugcgcgagaaugccgaggauaugggaaacggcugcuucaagauuuaucacaaaugugacaaugccugcaucgaaagcauccggaacgggaccuacgaucaugacguuuauagagacgaggcucuuaauaaccgcuuucagauuaagggaguggaacugaaaucuggcuacaaggauuggauccucuggauuuccuucgcgaucagcugcuuucugcuuugugucgugcugcucggguucauuaugugggccugccagcggggaaauaucagauguaacaucugcauuuga

SEQ ID NO: 200546 - RNA, 1701 nt, Artificial Sequence
  derived and/or modified CDS sequence (opt5) from hemagglutinin__InfluenzaA__AFG71942
augaagaccaucauugcccugagcuacaucuucuaucucgcucugucccaggaccuucccggcaacgauaauucuaaagccacacugugccucgggcaccaugcggugccuaacggaacgcuggucaagaccauuacagacgaucaaaccgagguuacaaaugcuaccgaacuugugcagagcuccucuacaggcaaaaucuguaacaauccgcaccggauucuggacgggauggauugcacccucaucgacgcccugcugggagauccccauugugacguguuucagaacgagacgugggaucucuucgucgaaagaagcaaggccuuuuccaauugcuacccuuaugacgugcccgauuacgcuucucugcgcagccuuguugccuccagcggcacccuggaguucaucacagaaggguuuaccuggacagaggugacccagaacggaggcucuauugcuuguaaaagaggcccugacuccggguucuuuagccggcucaauuggcugacgaagucuggacgcacauaucccguccuuaacgugaccaugccuaauaacgauaauuucgacaagcuguacaucuggggcguucaccauccguccacagaccaagagcagaccaaccucuaugugcagaccagcgggagagucacagugucuacgcggcgcucccagcaaaccauuauccccaauauuggaagcagaccuugggugcggggccuguccucucgcaucagcauuuacuggacaaucgucaaacccggggauguucuggugaucaacuccaacggaaaucucauugccccuagaggcuacuuuaagaugcggaccggcaaaagcucuaucaugcgcuccgacgcgcccauugauacaugcaucagcgaauguauuaccccgaacgggucuaucccuaaugacaagcccuuccagaacgugaauaaaaucacguauggagccugcccuaaguacgucaagcagaacacacugaaacuugcuaccggcaugagaaaugugcccgagaagcagacccgggggcuguuuggagccauugcuggcuucaucgaaaacgggugggagggaaugauugauggcugguauggcuuucgccaccaaaauagcgaggggacaggacaggccgcggaccucaaauccacccaggccgcuaucgaucaaauuaacggcaagcugaauagaaucaucgagaaaacaaacgaaaaguuccaccagauugaaaaagaguucucugaaguugaggggcggauccaggaccuugagaaguacguggaagauacgaagauugaccuguggagcuauaaugccgagcuccuggucgcucuggaaaaccagcauaccaucgaucucacagacuccgagaugaauaaacuguuugaaaagaccagacgccaacuucgggagaacgccgaggacaugggaaacggcuguuucaaaauuuaccacaagugcgauaaugccuguaucgaaagcauuagaaacgggacauaugaccaugauguguaccgcgacgaggcucugaauaaccgguuucagaucaaaggcguugaacucaagucuggauacaaggauuggauccuguggauuuccuucgcgaucagcugcuuucuucugugcgugguccuccugggcuucauuaugugggccugucagagagggaauauccgcugcaacauuuguaucuga

SEQ ID NO: 200547 - RNA, 1701 nt, Artificial Sequence
  derived and/or modified CDS sequence (opt5) from hemagglutinin__InfluenzaA__AFG71953
augaagaccaucauugcccugagcuacaucuucugccucgugcugggccaggaccuucccgggaacgauaaauccacagcuacgcugugucucggacaccaugccgucccuaauggcacccugguuaagacaauuaccaacgaccaaaucgaggugacaaaugcgaccgaacuugugcagucuagcuccacagggaaaauuugcaacaauccgcacagaauccuggauggaaucgacuguacccucauugaugcucugcugggcgacccccauugcgauggguuucagaacgagacgugggaccucuucgucgaacggucuaaggccuuuagcaauuguuauccuuacgaugugcccgacuaugccucccugcgcucucuuguugcuagcuccggaacccuggaguucaucacagaaggcuuuaccuggacaggcgugacccagaacgggggaagcaaugccugcaaaagaggcccugggucuggauucuuuucccggcucaacuggcugacaaagagcggcucuacguaccccguccuuaaugugaccaugccuaacaaugauaacuucgacaagcuguauauuuggggaguucaccauccguccacaaaucaagagcagaccagccucuacgugcaggcuucugggcgcgucaccguguccacaaaaagaagccagcaaacgaucauucccaacaucggcucccggccuugggugcgcggccccucuagcagaauuuccaucuauuggaccacagucaagccuggggauauccugauuaucaacagcaauggaaaccugauugcgccccggggcuacuuuaaaaugcgcaccgggaagucuuccaucaugagaagcgacgccccgauuggagccuguaucucugagugcaucacaccuaauggcagcauucccaacgacaaaccuuuccagaauguuaacaagaucaccuacggggcuugucccaaguaugugaaacagaauacgcucaagcuggccacaggaaugcggaacgugcccgaaaaacagacccgcggccuuuuuggcgcuauugccggguucaucgagaauggaugggaaggcaugauugaugggugguacggauuuagacaccaaaacuccgagggcaccgggcaggcggccgaccugaagucuacacaggcugccaucgaucaaaucaauggcaaacucaaccgggucauugagaagaccaaugaaaaauuccaccagaucgagaaggaguucagcgaaguggaaggacgcauucaggaccuggagaaguauguugaggauacaaaaaucgaccuuugguccuacaacgcugaacugcucguggcccuggagaaucagcauacgauugaucugaccgacagcgaaaugaacaagcucuuugagaaaacaagacggcaacugagagaaaacgccgaggauaugggcaaugggugcuucaagaucuaucacaaaugugacaacgcuugcauuggaucuauccgcaauggcaccuacgaucaugacgucuaucgggacgaggcgcuuaacaauagauuucagaucaaggggguggaacugaaguccggauacaaagauuggauucucuggaucagcuucgccauuucuugcuuucugcuuuguguugugcugcucggcgucaucaugugggcuugccagaaggggaacauucgcuguaauaucugcaucuga

SEQ ID NO: 200548 - RNA, 1701 nt, Artificial Sequence; identical to SEQ ID NO: 192377
  derived and/or modified CDS sequence (opt5) from hemagglutinin__InfluenzaA__AFG71975

SEQ ID NO: 200549 - RNA, 1701 nt, Artificial Sequence
  derived and/or modified CDS sequence (opt5) from hemagglutinin__InfluenzaA__AFG71996
augaagaccaucauugcccugagcuacaucuucugccucgugcugggccagaacuuucccgggaaugacaacuccacagcuacgcuuugucugggacaccaugccgucccuaauggcacccucguuaaaacaauuaccaacgaucaaaucgaggugacaaaugcgaccgaacuggugcagucuagcuccacagggaagauuugcaacaauccgcacagaauccuugacggaaucgauuguacccugauugacgcucuccugggcgauccccauugcgacggguuccagaacgagacgugggaucuguuugucgaacggucuaaagccuucagcaauuguuauccuuacgacgugcccgauuaugccucccuccgcucucugguugcuagcuccggaacccuugaguuuaucaacgaaggcuucacauggaccggcgugacacagaaugggggaagcaacgccugcaagagaggcccugacauuggguuuuucucucggcugaauuggcucuacaaauccggaaacaccuaucccguccugaaugugagcaugccuaacaacgauaauuuugacaaacuuuacaucuggggcguucaccauccgucuacggaucaagagcagacaucccuguaugugcaggcuagcgggcgcgucaccgugucuacaaagagaucccagcaaaccauuauccccaacauuggaagccggccuugggugcgcggccucuccucuagaaucagcaucuacuggaccauugucaagcccggcgacauccugguuauuaauuccaacgggaaucugaucgccccucggggauacuucaagaugcgcacaggcaaaagcucuauuaugagauccgacgcgagcaucgggacguguaucucugagugcauuacccccaacggaagcaucccgaaugauaagccuuuucagaacgugaauaaaauuacauauggcgccugucccaaguacgugaagcagaacacccucaaacuggcuacagggaugcggaaugucccugaaaagcagacccgcggaaucuucggcgccauugcuggcuuuaucgagaacgggugggaaggaaugaucgacggcugguauggguucagacaccaaaauuccgagggaacgggccaggccgcggaucuuaaaucuacacaggccgcuauugaccaaaucaacgggaagcugaaucggauuaucgagaaaaccaacgaaaaguuccaccagauugagaaagaauuuagcgagguggaaggccgcauccaggaucucgagaaguacguugaggacaccaagauugaucugugguccuauaacgccgaacuucugguggcucucgagaaucagcauacaaucgaccugaccgauagcgaaaugaacaaacuguucgagaagacaagacggcaacucagagaaaaugccgaggacaugggaaacggcugcuuuaaaaucuaccacaagugugauaaugccugcauugggucuauccgcaacggaacguaugaccaugacgucuaccgggaugaggcucugaauaacagauuccagauuaaaggcguggaacuuaaguccggguacaaggacuggauccuguggauuagcuuugcgaucucuugcuuccuccuguguguugugcuucugggauuuaucaugugggccugccagaaaggcaauauucgcuguaacaucugcauuuga

SEQ ID NO: 200550 - RNA, 1701 nt, Artificial Sequence
  derived and/or modified CDS sequence (opt5) from hemagglutinin__InfluenzaA__AFG72007
augaagaccaucauugcccugagcuacaucuucugccucgugcugggcagagacuuuccccggaacgauaauuccacagcuacgcuuugucuggggcaccaugccgucccuaacggaacccucguuaaaacaauuaccaaugaccagaucgaggugacaaacgcgaccgaacuggugcaaucuagcuccacaggcaagauuugcaauaacccgcaccgcauccuugaugggauggacuguacccugaucgaugcucuccugggagacccccauugcgauggccugcagaaugggacgugggaccucuucgucgagagaucuaaagccuuuagcaacuguuauccuuacgaugugcccgacuaugccucccugcggucucuuguugcuagcuccggaacccuggaguucauuaaugaaggcuuuacauggaccggcgugacacagaacgggggaagcaaugccugcaagcgcggcccugauucuggguucuuuuccagacucaacuggcuguacaaaagcggaaauaccuaucccguccuuaacgugacgaugccuaauaacgacaacuucgauaagcuguacaucuggggcguucaccauccgucuacagaccaggaccaaaccucccucuaugugcaggcuagcgggcgggucacagugucuaccaagcgcucccagcagaccgugauucccaauaucggaccuagacccuggguccggggccugagcucccgcauuucuaucuacuggacaauuguuaaaccuggcgauauccugcucaucaacagcaaugggaaccugauugcccccagaggauacuuuaagaugcggacgggcaaauccagcaucaugcgcucugacgcgccgauugggaccuguaucuccgaaugcauuacaccuaauggaagcauccccaacgauaagccuuuccaaaaugugaacaaaaucaccuauggcgccugucccaaguacgugaagcagaauacacuuaaacuggcuaccgggaugagaaacguccccgagaagcagacgcggggaauuuuuggcgccaucgcuggcuucauugagaaugggugggaaggaaugaucgacggcugguauggguuucgccaccagaacucugagggaacaggccaagccgcggaucucaaaagcacccaggccgcuauugaccagaucaaugggaagcugaacagagugaucgagaaaaccaaugaaaaguuccaccaaauugagaaagaguucuccgaaguugaaggccggauccaggaucuugagaaguacguggaagacacaaagauugaucuguggucuuauaacgccgagcuccuggucgcucuggagaaccagcauaccaucgaccucacagauagcgaaaugaauaaacuguuugagaagacgagacgccagcuucgggaaaacgccgaggacaugggaaauggcugcuucaaaauuuaccacagaugugacaacgccugcaucggguccauucgcaauggaaccuaugaucaugacguguaccgggaugaagcucugaacaauagauuucaaaucaagggcguugagcucaaaagcggguacaaggacuggauccuguggauuucuuucgcgaucuccugcuuucuucugugugugguccuccugggauucauuaugugggccugccagaagggcaacauccgcuguaauauuugcaucuga

SEQ ID NO: 200551 - RNA, 1701 nt, Artificial Sequence
  derived and/or modified CDS sequence (opt5) from hemagglutinin__InfluenzaA__AFG72029
augaagaccaucauugcccugagcuacaucuucugccucguguuuggccagaaccugcccgggaaugacaacuccacagcuacgcuuugucugggacaccaugccgucccuaauggcacccucguuaaaacaauuaccaacgaucaaaucgaggugacaaaugcgaccgaacuggugcagucuagcuccacagggagaauuugcgacucuccgcaccggauccuugauggaaagaacuguacccugaucgacgcucuccugggcgauccccauugcgacggguuccagaaugagaaaugggaucuguuugucgaacgcagcaaggccuucuccaacuguuauccuuacgacgugcccgauuaugccucucucagaagccugauugcuuccagcggaacgcuugaguuuaucaaugaaggcuucaacuggaccggcguuacacagucugggggauccuacgccugcaaacggggcagcgacaauuccuuuuucucucgccugaacuggcucuaugagagcgagucuaaguacccugugcugaaugucaccaugcccaacaaugggaacuuugauaaacuuuauauuuggggagugcaccauccuuccacagacaaggaacaaaccaaccuguacguuagagcuagcggccgggugacggucuccacaaagcgcucucagcagaccaucauuccgaauaucgggagcagacccugggugcggggacucuccagccgcauuucuaucuacuggacaaucgugaaaccuggcgauauucugcugaucaacuccaauggcaaccucauugcccccagaggguauuucaagauccggaccggaaaaagcucuauuaugcgcagcgacgcgccuaucggcaccuguuccucugagugcaucacacccaaugggagcauuccgaacgacaagccuuuucagaaugucaacaagaucacguacggagccugucccaaauauguuaagcaaaauacccugaaacuugcuacaggcaugagaaacgugccugaaaagcagacccgggggauuuucggagccaucgcuggcuuuauugagaauggcugggaggggaugguggauggaugguacggcuuccgccaccagaacuccgaagggacaggacaggccgcggaccugaaaagcacccaagccgcuaucgaucagaucaauggcaagcucaacagagucauugagaaaacgaaugaaaaguuccaccagaucgagaaggaauuuucugagguggaggggcggauucaagaccuggaaaaauauguugaggauacaaagaucgaccuuugguccuacaacgccgaacugcucguggcucuggagaaccagcauaccauugaucugaccgacagcgaaaugaauaaacucuucgagaagacaagacgccagcugcgggagaacgccgaagauaugggcaauggaugcuuuaaaaucuaucacaagugugacaacgccugcauuggcucuaucagaaaugggaccuacgaucaugacgucuaccgcgacgaggcucuuaacaaucgguuccagaucaagggaguggaacugaaauccggcuauaaggauuggauucucuggaucagcuuugcgauuuccugcuuccugcuuuguguugugcugcucggguuuaucaugugggccugccaaaaaggaaacauuagauguaauaucugcaucuga

SEQ ID NO: 200552 - RNA, 1701 nt, Artificial Sequence
  derived and/or modified CDS sequence (opt5) from hemagglutinin__InfluenzaA__AFG72040
augaagaccaucauugcccugagcuacaucuucugccucguguuugcucagaaccugcccggcaaugacaacuccacagccacgcuuugucuggggcaccaugcggucccuaauggaacccucguuaaaacaauuaccaacgaucaaaucgaggugacaaaugcuaccgaacuggugcagucuagcuccacaggcagaauuugcgacucuccgcaccggauccuugaugggaagaacuguacccuggucgacgcccuccugggagauccccauugcgacggcuuccagaaugagaaaugggaucuguuuguggaacgcagcaaggccuucuccaacuguuauccuuacgacguucccgauuaugcuucucucagaagccugguggccuccagcgggacgcuugaguuuaucaaugaaucuuucaacuggaccggagucacacaguccggcggcagcuacgcuugcaaacgggggucugacaauuccuuuuucagccgccugaacuggcucuaugagucugaguccaaguacccugugcugaauguuaccaugcccaacaauggaaacuuugauaaacuuuauauuuggggcgugcaccauccuagcacagacaaggaacaaaccaaccuguacgucagagccuccgggcgggugacggugucuacaaagcgcagccagcagaccaucauuccgaauaucggauccagacccuggguccggggccucagcucucgcauuuccaucuacuggacaauuguuaaaccuggggauauccugcugaucaacagcaauggaaaccucauugcgcccagaggcuauuucaagauccggaccggcaaaucuagcauuaugcgcuccgacgccccuaucgggaccuguucuagcgagugcauuacacccaauggauccaucccgaacgacaagccuuuucagaaugugaacaagaucacguacggcgcuugucccaaauaugugaagcaaaauacccugaaacuugccacagggaugagaaacgucccugaaaagcagacccggggaauuuucggcgcuaucgccggguuuauugagaauggaugggagggcaugguggauggcugguacggguuccgccaccagaacagcgaaggaacaggccaggcggccgaccugaaaucuacccaagcugccaucgaucagauuaaugggaagcucaacagaguuaucgagaaaacgaaugaaaaguuccaccagaucgagaaggaauuuuccgagguggagggacggauucaagaccuggaaaaauaugucgagaacacaaagaucgaucuuuggagcuacaacgcugaacugcucguggcccuggagaaucagcauaccauugaccugaccgauucugaaaugaacaaacucuucgagaagacaagacgccagcugcgggagaaugccgaagacaugggcaacgggugcuuuaaaaucuaucacaagugugauaaugcuugcauuggcuccaucagaaacggaaccuacgaccaugauguuuaccgcgacgaggcgcuuaauaaccgguuccagauuaagggcguggaacugaaaagcggguauaaggacuggauccucuggaucuccuuugccauuucuugcuuccugcuuugugucgugcugcucggauuuaucaugugggcuugccaaaaaggcaauauuagauguaacaucugcauuuga

SEQ ID NO: 200553 - RNA, 1701 nt, Artificial Sequence
  derived and/or modified CDS sequence (opt5) from hemagglutinin__InfluenzaA__AFG72051
augaagaccaucauugcccugagcuacaucuucugccucguguuugcucagaaccugcccggcaaugacaacuccacagccacgcuuugucuggggcaccaugcggucccuaauggaacccucguuaaaacaauuaccaacgaucaaaucgaggugacaaaugcuaccgaacuggugcagucuagcuccacaggcagaauuugcgacucuccgcaccggauccuugaugggaagaacuguacccuggucgacgcccuccugggagauccccauugcgacggcuuccagaaugagaaaugggaucuguuuguggaacgcagcaaggccuucuccaacuguuauccuuacgacguucccgauuaugcuucucucagaagccugguggccuccagcgggacgcuugaguuuaucaaugaaucuuucaacuggaccggagucacacaguccggcggcagcuacgcuugcaaacgggggucugacaauuccuuuuucagccgccugaacuggcucuaugagucugaguccaaguacccugugcugaauguuaccaugcccaacaauggaaacuuugauaaacuuuauauuuggggcgugcaccauccuagcacagacaaggaacaaaccaaccuguacgucagagccuccgggcgggugacggugucuacaaagcgcaaucagcagaccgucaucccgaacauuggaagcagacccuggguucggggccucuccagccgcaucucuauuuacuggacaaucgugaaaccuggggauauucugcugaucaauuccaacggaaaucucaucgcgcccagaggcuauuucaagauucacaacggcaaaagcucuaucaugcggagcgacgccccuauugggaccuguuccucugagugcaucacccccaauggaagcauuccgaacgacaagccuuuucagaaugugaacaagaucacauacggcgcuugucccaaauaugucaagcaaaauacgcugaaacuugccaccgggaugcgcaacgugccugaaaagcagacaagaggaaucuucggcgcuauugccggguuuaucgagaauggaugggagggcaugguugauggcugguacggguuccggcaccgcaacuccgaaggaaccggccaggcggccgaccugaaaagcacacaggcugccauugaucaaaucaaugggaagcucaacagagugauugagaaaaccaacgaaaaguuccaucagaucgagaaggaauuuucugaggucgagggacggauccaggaccuggaaaaauauguggaggauacgaagauugaccuuugguccuacaaugcugaacugcucguugcccuggagaaccaacacacaaucgaucugaccgacagcgaaaugaauaaacucuucgagaagaccagacgccagcugcgggagaacgccgaagauaugggcaaugggugcuuuaaaauuuaucauaagugugacaacgcuugcaucggcucuauuagaaauggaacauacgaucacgacguguaccgcgacgaggcgcuuaacaaucgguuccagaucaagggcgucgaacugaaauccggguauaaggauuggauucucuggaucagcuuugccaucuccugcuuccugcuuugugugguccugcucggauuuauuaugugggcuugccagaaaggcaacaucagauguaauauuugcaucuga

SEQ ID NO: 200554 - RNA, 1701 nt, Artificial Sequence
  derived and/or modified CDS sequence (opt5) from hemagglutinin__InfluenzaA__AFG72085
augaagaccaucauugcccugagcuacaucuucugccucguguuugcucagaaacugcccggcaacgacaauuccacagccacgcuuugucuggggcaccaugcggucccuaacggaacccucguuaagacaauuaccaaugaucaaaucgaggugacaaacgcuaccgaacuggugcagucuagcuccacaggcagaauuugcgacucuccgcaccggauccuugaugggaaaaauuguacccugaucgacgcccuccugggagauccccauugcgacggcuuccagaacgagaagugggaucuguuugucgaacgcagcaaagccuauuccaauuguuacccuuaugacgugcccgauuacgcuucucucagaagccugguugccuccagcgggacgcuugaguucauuaacgaagacuuuaauuggaucggagugacccagucuggcggcuccugcgcuuguaagcgggggagcgucaacucuuucuuuucccgccugaauuggcuccacgagagcgagcaaaaguauccugcccugaacgugacaaugcccaauaacggaaaauucgauaaacuuuacauuuggggcguucaucacccuucuaccgacagagaacagacaaaucuguaugugcgggcguccgggcgcgucaccgugagcacgaagagaucccagcagacagugaucccgaacauuggaucucggcccuggguccgcggccucagcuccagaaucagcauuuacuggaccaucguuaagccuggggauauccugcugauuaacucuaucggaaaucucauugcuccccggggcuacuuuaaaauccgcacaggcaaguccagcauuaugagaucugacgccccuaucgggaccugcagcuccgaguguaucacccccaacggaucuauuccgaaugacaagccuuuccaaaacgugaauaaaaucacauauggcgccugcccccgguacgugaagcagaacacgcugaaacuugcuaccgggaugcgcaaugucccugaaaagcagacaagaggaauuuuuggcgccaucgcgggguucauugagaacggaugggagggcaugguggauggcugguauggguuucggcaccagaauagcgaaggaaccggccaagccgcugaccugaaauccacacaggccgcuaucgaucagaucaacgggaagcucaauagacugauugagaaaaccaacgaaaaguuccaucaaaucgagaaggaguucagcgaaguugagggacgcauucaggaccuugaaaaauacguggaggauacgaagaucgaccuguggucuuauaaugccgaacuccuggucgcccuggagaaccagcacacaauugaucucaccgacuccgaaaugaauaaacuguuugagaagacccggaaacagcuuagagagaacgcugaagauaugggcaacggguguuucaagaucuaccauaagugcgacaaugcgugcauuggcagcauccgcaacggaacauaugaucacgacguguaccgggacgaggcccugaauaacagauuucaaaucaaaggcguugaacucaagucuggguacaaagauuggauucuguggaucuccuucgcuauuagcuguuuucuucugugcgugguccuccugggauucaucaugugggccugucagaagggcaauauucgcugcaacaucuguaucuga

SEQ ID NO: 200555 - RNA, 1701 nt, Artificial Sequence
  derived and/or modified CDS sequence (opt5) from hemagglutinin__InfluenzaA__AFG72107
augaagaccaucauugcccugagcuacaucuucugccucguguuugcucagaaacugcccggcaacgacaauuccacagccacgcuuugucuggggcaccaugcggucccuaacggaacccucguuaagacaauuaccaaugaucaaaucgaggugacaaacgcuaccgaacuggugcagucuagcuccacaggcagaauuugcgacucuccgcaccggauccuugaugggaaaaauuguacccugaucgacgcccuccugggagauccccauugcgacggcuuccagaacgagaagugggaucuguuugucgaacgcagcaaagccuucuccaauuguuauccuuacgacgugcccgauuaugcuucucucagaagccugauugccuccagcgggacgcuugaguuuaucaacgaagaguucaauuggaccggaguuacacagaacggcggcucuuacgcuugcaagcggggguccgugaauagcuuuuucucucgccugaacuggcuccacgaguccgaauauaaguacccugcccugaaugucaccaugcccaacaauggaagauuugacaaacuuuauauuuggggcgugcaucacccuagcacagaucgggagcaaaccaaccuguacguucgcgcgucugggagagugacggucuccacaaagcggagccagcagaccgugaucccgaacauuggaccccgcccuugggugagaggccucuccucucggaucagcauuuacuggacaaucgucaaacccggggacauccugcugauuaauuccaccggaaaccucaucgccccucgcggcuauuucaagauucacaccggcaaaagcucuaucaugagauccgaugcucccauugggacauguagcucugaaugcaucacgccgaauggaagcaucccuaacgacaagcccuuucagaauguuaacaagauuaccuacggcgccuguccucgguaugugaaacaaaauacacugaaacuugcuaccgggaugcgcaacgugcccgagaagcagacaagaggaaucuucggcgccauugcgggguuuaucgagaauggaugggaaggcauggucgacggcugguacggguuccggcaucagaacuccgagggaaccggccaggccgcugaucugaagucuacgcaagccgcuauugaccagaucaaugggaaacucaacagacugaucgaaaagacaaaugagaaauuccaccagauugaaaaggaguuuagcgagguggaaggacgcauccaagaucuugagaaguauguugaagacaccaaaauugaucugugguccuacaacgccgagcuccugguggcccuggaaaaucagcauaccaucgaccucacagauagcgagaugaacaagcuguucgagaaaacccggaagcagcuuagagaaaacgcugaggacaugggcaaugggugcuuuaaaauuuaucacaagugugauaacgcgugcaucggcucuauucgcaauggaacauacgaccacgaugucuaccgggacgaagccgugaacaauagauuccagaucaagggcguugagcugaaauccggguauaaggacuggauccucuggauuagcuuugcuaucucuugcuuccugcuuugugugauucugcucggauuuaucaugugggccugccaaaaaggcaacauucgcuguaauaucugcaucuga

SEQ ID NO: 200556 - RNA, 1701 nt, Artificial Sequence
  derived and/or modified CDS sequence (opt5) from hemagglutinin__InfluenzaA__AFG72118
augaagaccaucauugcccugagcuacaucuucugccucguguuugcucagaaacugcccggcaacgacaauuccacagccacgcuuugucuggggcaccaugcggucccuaacggaacccucguuaagacaauuaccaaugaucaaaucgaggugacaaacgcuaccgaacuggugcaaaauucuagcacaggcagaauuugcaacuccccgcaccggauccuugacgggaaaaauuguacccugaucgaugcccuccugggagacccccauugcgauggcuuccagaacaaggagugggaccuguuugucgaacgcucuaaagccuauagcaauuguuacccuuaugaugugcccgacuacgcuucccucagaucucugguugccagcuccgggacgcuugaguucauuaacgaagauuuuaauuggaccggaguggcucagagcggcggcucuuaugccugcaagcggggguccgucaacagcuucuuuucucgccugaauuggcuccacgaguccgaguacaaguauccugcgcugaacgugacaaugcccaauaacggaaaauucgacaaacuuuacaucuggggcguucaucacccuagcaccgauagagaacagacaaaccuguacgugcgggccucugggcgcgucaccguguccacgaagagaagccagcagacagugauuccgaauaucggaucccggcccuggguccgcggccucucuagcagaauuuccaucuauuggaccauuguuaagccuggggacauccugcugaucaacagcacaggaaaucucauugcuccccggggcuacuuuaaaauccgcaccggcaagucuuccauuaugagaagcgaugccccuaucgggaccuguucuagcgagugcauuacacccaacggauccaucccgaaugacaagccuuuccagaacgugaaucggaucacguauggcgcuuguccccgcuacgugaaacaaaacacccugaagcuggccacagggaugagaaaugucccugaacggcagaccagaggaauuuuuggcgcgaucgccggguucauugagaacggaugggagggcaugguggacggcugguauggguuucgccaccaaaauucugaaggaacaggccaggcugccgaucuuaaaagcacccaggcugccaucgaccagauuaacgggaagcucaaucggcugaucgagaaaacgaacgaaaaguuccaucagaucgagaaagaguucuccgaaguugagggacgcauucaagaucuugaaaaguacguggaggacacaaagaucgaucuguggagcuauaaugccgaacuccuggucgcucuggagaaccagcacaccauugaccucaccgauucugaaaugaacaaacuguuugagaagacaagaaaacagcuucgggagaaugcggaagacaugggcaacgggugcuucaagaucuaccauaaaugugauaaugccugcauuggcuccaucagaaacggaaccuacaaucacgacguguaucgcgaugaggcucugaacaaucgguuucagauuaagggcguugaacucaagagcggguacaaagacuggauccuguggaucucuuucgccauuuccugcuuucuucugugugugguccuccugggauucaucaugugggccugccaaaagggcaacauuagauguaauaucugcauuuga

SEQ ID NO: 200557 - RNA, 1701 nt, Artificial Sequence
  derived and/or modified CDS sequence (opt5) from hemagglutinin__InfluenzaA__AFG72129
augaagaccaucauugcccugagcuacaucuucugccucguguuugcucagaaacugcccggcaacgacaauuccacagccacgcuuugucuggggcaccaugcggucccuaacggaacccucguuaagacaauuaccaaugaucaaaucgaggugacaaacgcuaccgaacuggugcagucuagcuccacaggcagaauuugcgacucuccgcaccggauccuugaugggaaaaauuguacccugaucgacgcccuccugggagauccccauugcgacggcuuccagaacaaggagugggaucuguuugucgaacgcagcaaagccuauuccaauuguuacccuuaugacgugcccgauuacgcuucucucagaagccugguugccuccagcgggacgcuugaguucauuaacgaagacuuuaauuggaccggaguggcucagucuggcggcuccuaugccugcaagcgggggagcgucaacucuuucuuuucccgccugaauuggcuccacgagagcgaguacaaguauccugcgcugaacgugacaaugcccaauaacggaaaauucgauaaacuuuacaucuggggcguucaucacccuucuaccgacagagaacaaacaaaucuguacgugcgggccuccgggcgcgucaccgugagcacgaagagaucccagcagacagugauuccgaacaucggaucucggcccuggguccgcggccucagcuccgggauuagcaucuauuggaccauuguuaagccuggagauauccugcugaucaacucuacaggcaaucucauugcucccagaggcuacuuuaaaauccggaccgggaaguccagcauuaugcgcucugacgccccuaucggaaccuguagcuccgagugcauuacacccaacggcucuaucccgaaugacaagccuuuccagaacgugaauagaaucacguauggggcuuguccccgguacgugaaacaaaacacccugaaacuugccacaggaaugcgcaaugucccugaaaagcagaccagaggcauuuuuggggcgaucgccggauucauugagaacggcugggagggcaugguggaugggugguauggauuucggcaccagaauagcgaaggcacagggcaggcugccgaccugaaguccacccaagcugccaucaaccagauuaauggaaaacucaacagacugaucgagaagacgaaugaaaaauuccaucagaucgagaaggaguucagcgaaguugagggccgcauucaagaucuugaaaaguacguggaggacacaaaaaucgaucuguggucuuauaacgccgaacuccuggucgcucuggagaaucagcacaccauugaccucaccgauuccgaaaugaacaagcuguuugagaaaacacggaagcagcuuagagagaacgcggaagacauggggaauggcugcuucaaaaucuaccauaagugugauaacgccugcauuggaagcauccgcaauggcaccuacgaccacgauguguaucgggacgaggcucugaacaauagauuucagauuaaggggguugaacucaaaucuggauacaaggacuggauccuguggaucuccuucgccauuagcugcuuucuucugugugugguccuccugggcuucaucaugugggccugccaaaaagggaacauucgcuguaauaucugcauuuga

SEQ ID NO: 200558 - RNA, 1701 nt, Artificial Sequence
  derived and/or modified CDS sequence (opt5) from hemagglutinin__InfluenzaA__AFG72140
augaagaccaucauugcccugagcuacaucuucugccucguguuugcucagaaacugcccggcaacgacaauuccacagccacgcuuugucuggggcaccaugcggucccuaacggaacccucguuaagacaauuaccaaugaucaaaucgaggugacaaacgcuaccgaacuggugcagucuagcuccacaggcagaauuugcgacucuccgcaccggauccuugaugggaaaaauuguacccugaucgacgcccuccugggagauccccauugcgacggcuuccagaacaaggagugggaucuguuugucgaacgcagcaaagccuauuccaauuguuacccuuaugacgugcccgauuacgcuucucucagaagccugguugccuccagcgggacgcuugaguucauuaacgaagacuuuaauuggaccggaguggcucagucuggcggcuccuaugccugcaagcgggggagcgucaacucuuucuuuucccgccugaauuggcuccacgagagcgaguacaaguauccugcgcugaacgugacaaugcccaauaacggaaaauucgauaaacuuuacaucuggggcguucaucacccuucuaccgacagagaacaaacaaaucuguacgugcgggcccucgggcgcgucaccguguccacgaagagaagccagcagacagugauuccgaacaucggaucccggcccuggguccgcggccugucuagcagaauuuccaucuauuggaccauuguuaagccuggggauauccugcucaucaacagcacaggaaaucugauugcuccccggggcuacuuuaaaauccgcaccggcaagucuuccauuaugagaagcgacgccccuaucgggaccuguucuagcgagugcauuacacccaacggauccaucccgaauaacaagccuuuccagaaugugaaccggaucacguauggcgcuuguccccgcuacgugaaacaaaauacccuuaagcuggccacagggaugagaaacgucccugaaaaacagacccggggaauuuuuggcgcgaucgccggguucauugagaauggaugggagggcaugguggacggcugguauggguuuagacaccagaacucugaaggaacaggccaggcugccgaucucaagagcacccaagcugccaucgaccagauuaaugggaaacugaaccgccuuaucgagaagacgaaugaaaaauuccaucagaucgagaaggaguucuccgaaguugagggacggauucaagaucuggaaaaguacguggaggacacaaaaaucgaucucuggagcuauaacgccgaacugcuggucgcucucgagaaucagcacaccauugaccugaccgauucugaaaugaacaaacuuuuugagaagacaagaaagcagcugcgcgagaacgcggaagacaugggcaaugggugcuucaaaaucuaccauaagugugauaacgccugcauuggcuccauccggaauggaaccuacgaccacgauguguauagagacgaggcucucaacaaucgcuuucagauuaagggcguugaacugaaaagcggguacaaggacuggauccuuuggaucucuuucgccauuuccugcuuucugcucugugugguccugcugggauucaucaugugggccugccaaaaaggcaacauucgguguaauaucugcauuuga

SEQ ID NO: 200559 - RNA, 1701 nt, Artificial Sequence
  derived and/or modified CDS sequence (opt5) from hemagglutinin__InfluenzaA__AFG72151
augaagaccaucauugcccugagcuacauccucugccugguguucgcucagaaacuucccggcaacgacaauuccacagccacgcugugucucgggcaccaugcggucccuaacggaacccugguuaagacaauuaccaaugaucaaaucgaggugacaaacgcuaccgaacuugugcagucuagcuccacaggcagaauuugcgacucuccgcaccggauccuggaugggaaaaauuguacccucaucgacgcccugcugggagauccccauugcgacggcuuucagaacaaggagugggaucucuucgucgaacgcagcaaagccuauuccaauuguuacccuuaugacgugcccgauuacgcuucucugagaagccuuguugccuccagcgggacgcuggaguuuaccaacgaagacuucaauuggacaggaguggcucagucuggcgaguccuaugccugcaagcggggcagcgucaagucuuucuucucccgccucaacuggcugcacgagagcgauuacaaauauccugcgcuuaaugugaccaugcccaacaaugggaaguuugacaaacuguacauuuggggaguucaucacccuucuacagauagagaacaaaccucccucuacgugcgggccagcggccgcgucacgguguccacaaagagaucucagcagaccgugaucccgaacauugggagccggcccuggguccgcggacuguccagcagaaucucuauuuauuggacaaucguuaaaccuggcgacauucugcucaucaauuccaccgggaaccugaucgcuccccggggauacuucaagauucgcaccggcaagagcucuaucaugagaagcgacgccccuauuggcacauguuccucugagugcaucacgcccaacgggagcauuccgaaugauaaaccuuuucagaacgugaaucggaucaccuauggagcuuguccccgcuacgugaagcaaaacacacuuaaacuggccaccggcaugagaaaugucccugaaaagcagacacgggggaucuucggagcgauugccggcuuuaucgagaacgggugggagggaaugguggacggcugguauggcuucagacaccaaaauuccgaagggaccggacaggcugccgaucucaaaagcacgcaggcugccauugaccagaucaacggcaagcugaaucgccuuauugagaaaacaaacgaaaaguuucaucagaucgagaaggaauuuucugagguugaggggcggauccaagaucuggaaaaauacguggaggacaccaagauugaucucugguccuauaaugccgaacugcuggucgcucucgagaaccagcacaccaucgaccugacagauagcgaaaugaauaaacuuuucgagaagaccagaaaacagcugcgcgagaacgcggaagacaugggaaauggcugcuuuaagauuuaccauaagugugauaacgccugcaucgggucuauucggaacggcacauacgaccacgacguguauagagaugaggcucucaauaaccgcuuccagaucaaaggaguugaacugaaguccggcuacaaagacuggauucuuuggaucagcuuugccaucuccugcuuccugcucugugugguccugcugggguuuauuaugugggccugccaaaagggaaauauccgguguaacauuugcaucuga

SEQ ID NO: 200560 - RNA, 1701 nt, Artificial Sequence
  derived and/or modified CDS sequence (opt5) from hemagglutinin__InfluenzaA__AFG72184
augaagaccaucauugcccugagcuacauccucugccugguguucgcucagaaacuucccggcaacgacaauuccacagccacgcugugucucgggcaccaugcggucccuaacggaacccugguuaagacaauuaccaaugaucaaaucgaggugacaaacgcuaccgaacuugugcagucuagcuccacaggcagaauuugcgacucuccgcaccggauccuggaugggaaaaauuguacccucaucgacgcccugcugggagauccccauugcgacgauuuucagaacaaggagugggaccucuucgucgaacgcagcaaagccuauuccaauuguuacccuuaugaugugcccgacuacgcuucucugagaagccuuguugccuccagcggcacgcuggaguuuauuaacgaagauuucaauuggaccgggguggcucagucuggagaguccuaugccugcaagcggggcagcgucaagagcuuuuucucccgccucaacuggcugcacgagagcgaauacaaauauccugcgcuuaaugugacaaugcccaacaaugacaaguuugauaaacuguacaucuggggcguucaucacccuucuaccgagagagaacaaacaucccucuacauucgggccagcgggcgcgugaccgucuccacgaagagaucucagcagacagugaucccgaacauuggaagccggcccugggugcgcggccuguccagcagaaucucuauuuauuggaccaucgucaaaccuggggacauccugcucauuaauuccacaggaaaccugaucgcuccccggggcuacuucaagauucgcaccgggaagucuucuaucaugagaagcgacgccccuauuggaaccuguuccucugagugcaucacacccaacggcagcaucccgaaugauaaaccuuuucagaacguuaaucggauuacguauggcgcuuguccccgcuacgugaagcaaaacacccuuaaacuggccacagggaugagaaaugugccugagaagcagacccggggaaucuucggcgcgauugccggguuuaucgaaaacggaugggagggcauggucgacgggugguauggauucagacaccaaaauuccgaaggcacaggccaggcugccgaucucaaaagcacccaggcugccauugaccagaucaacgggaagcugaaucgccuuaucgagaaaacgaacgaaaaguuucaucagauugagaaggaguucucugaaguggagggacggauccaagaucuggaaaaauacguugaggacacaaagauugaucucugguccuauaaugccgaacugcugguggcucucgagaaccagcacaccaucgaccugaccgauagcgagaugaauaaacuuuucgaaaagacaagaaaacagcugcgcgagaacgcggaagacaugggcaaugggugcuuuaagauuuaccauaagugugauaacgccugcaucggaucuauucggaacggcaccuacgaccacgacgucuauagagaugaggcucucaauaaccgcuuccagaucaaagggguggaacugaaguccggcuacaaagacuggauccuuuggauuagcuuugccaucuccugcuuccugcucuguguugugcugcugggauuuauuaugugggccugccaaaagggcaauauccgguguaacauuugcaucuga

SEQ ID NO: 200561 - RNA, 1701 nt, Artificial Sequence; identical to SEQ ID NO: 200559
  derived and/or modified CDS sequence (opt5) from hemagglutinin__InfluenzaA__AFG72195

SEQ ID NO: 200562 - RNA, 1701 nt, Artificial Sequence
  derived and/or modified CDS sequence (opt5) from hemagglutinin__InfluenzaA__AFG72206
augaagaccaucauugcccugagcuacauccucugccugguguucgcucagaaacuucccggcaacgacaauuccacagccacgcugugucucgggcaccaugcggucccuaacggaacccugguuaagacaauuaccaaugaucaaaucgaggugacaaacgcuaccgaacuugugcagucuagcuccacaggcaaaauuugcgacucuccgcacagaauccuggaugggaagaauuguacccucaucgacgcccugcugggagauccccauugcgacggcuuucagaacaaagagugggaucucuucgucgaacggagcaaggccuauuccaauuguuacccuuaugacgugcccgauuacgcuucucugcgcagccuuguugccuccagcgggacgcuggaguuuauuaacgaagacuucaauuggaccggaguggcucagucuggcgaguccuaugccugcaagagaggcagcgucaaaucuuucuucucccggcucaacuggcugcacgagagcgauuacaaguauccugcgcuuaaugugacaaugcccaacaaugggaaauuugacaagcuguacaucuggggaguucaucacccuucuaccgaucgcgaacaaacaucccucuacauuagagccagcggccgggugaccgucuccacgaaacgcucucagcagacagugaucccgaacauugggagcagacccugggugcggggacuguccagccgcaucucuauuuauuggaccaucgucaagccuggcgacauccugcucauuaauuccacagggaaccugaucgcucccagaggauacuucaagauucggaccggcaaaagcucuaucaugcgcagcgacgccccuauuggcaccuguuccucugagugcaucacacccaacgggagcaucccgaaugauaagccuuuucagaacguuaauagaauuacguauggagcuuguccccgguacgugaaacaaaacacccuuaagcuggccacaggcaugcgcaaugugccugaaaaacagaccagagggaucuucggagcgauugccggcuuuaucgagaacgggugggagggaauggucgacggcugguauggcuuccggcaccaaaauuccgaagggacaggacaggcugccgaucucaagagcacccaggcugccauugaccagaucaacggcaaacugaauagacuuaucgagaagacgaacgaaaaguuucaucagauugagaaagaauuuucugagguggaggggcgcauccaagaucuggaaaaguacguugaggacacaaaaauugaucucugguccuauaaugccgaacugcugguggcucucgagaaccagcacaccaucgaccugaccgauagcgaaaugaauaaacuuuucgagaagacacggaagcagcugagagagaacgcggaagacaugggaaauggcugcuuuaagauuuaccauaaaugugauaacgccugcaucgggucuauucgcaacggcaccuacgaccacgacgucuaucgggaugaggcucucaauaacagauuccagaucaagggaguggaacugaaauccggcuacaaggacuggauccuuuggauuagcuuugccaucuccugcuuccugcucuguguugugcugcugggguuuauuaugugggccugccaaaaaggaaauauccgcuguaacauuugcaucuga

SEQ ID NO: 200563 - RNA, 1701 nt, Artificial Sequence
  derived and/or modified CDS sequence (opt5) from hemagglutinin__InfluenzaA__AFG72217
augaagaccaucauugcccugagcuacauccucugccugguguucgcucagaaacuucccggcaacgacaauuccacagccacgcugugucucgggcaccaugcggucccuaacggaacccugguuaagacaauuaccaaugaucaaaucgaggugacaaacgcuaccgaacuugugcagucuagcuccacaggcagaauuugcgacucuccgcaccggauccuggaugggaaaaauuguacccucaucgacgcccugcugggagauccccauugcgacggcuuucagaacaaggagugggaucucuucgucgaacgcagcaaagccuauuccaauuguuacccuuaugacgugcccgauuacgcuucucugagaagccuuguugccuccagcgggacgcuggaguuuauuaacgaagacuucaauuggaccggaguggcucaggauggcggcucuuaugccugcaagcggggguccgucaacagcuuuuucucucgccucaauuggcugcacaaacuugaguacaaguauccugcgcugaacgugacaaugcccaauaacggaaaguuugacaaacucuacaucuggggcguucaucacccuuccaccgauagcgaccaaacaucucuguacgugagagccuccgggcgggucaccgugagcacgaagcgcucccagcagacagugaccccgaauauuggaucuagacccuggguccggggccugagcucccgcaucagcauuuauuggacaaucguuaaaccuggggacauucuccugaucucuuccaccggaaaccuuaucgcucccagaggcuacuucaagauucggaacggcaagagcucuaucaugcgcagcgaugccccuauugggaauuguuccucugagugcaucacccccaacggaagcauuccgaaugacaaaccuuuucagaacgugaauagaaucacauauggcgcuuguccccgguacgugaagcaaaacacgcugaaacucgccaccgggaugcgcaaugucccugaaaagcagacaagaggaaucuucggcgcgauugccggguuuaucgagaacggaugggaaggcaugguggauggcugguauggguuccggcaccaaaauuccgagggaaccggccaggcugccgacauuaaaagcacacaggcugccaucgaucagauuaacgggaagcugaauagacuuaucgagaaaaccaacgaaaaguuucaucagaucgagaaggaguucucugaaguugaaggacgcauucaagaccuggagaaauacguggaggauacgaagaucgaccucugguccuauaaugccgaacugcuggucgcucucgagaaccagcacacaauugaucugaccgacagcgaaaugaauaaacuuuucgagaagacccggaaacagcugagagaaaacgcggaggauaugggcaacgggugcuuuaagaucuaccauaagugugacaaugccugcauuggcucuauccgcaacggaacauacgaccacgauguguaucgggacgaggcucucaauaacagauuccagauuaaaggcguugaacugaaguccggguacaaagaucuuauccuguggaucagcuuugccauuuccugcuuccuccugugugugguccugcucggauuuaucaugugggccugccaaaagggcaauauucgcuguaacaucugcauuuga

SEQ ID NO: 200564 - RNA, 1701 nt, Artificial Sequence
  derived and/or modified CDS sequence (opt5) from hemagglutinin__InfluenzaA__AFG72228
augaagaccaucauugcccugagcuacauccucugccugguguucgcucagaaacuucccggcaacgacaauuccacagccacgcugugucucgggcaccaugcggucccuaacggaacccugguuaagacaauuaccaaugaucaaaucgaggugacaaacgcuaccgaacuugugcagucuagcuccacaggcagaauuugcgacucuccgcaccggauccuggaugggaaaaauuguacccucaucgacgcccugcugggagauccccauugcgacggcuuucagaacaaggagugggaucucuucgucgaacgcagcaaagccuauuccaauuguuacccuuaugacgugcccgauuacgcuucucugagaagccuuguugccuccagcgggacgcuggaguuuaccaacgaagacuucaauuggacaggaguggcucagucuggcgaguccuaugccugcaagcggggcagcgucaaguccuuuuucucucgccucaacuggcugcacgagagcgauuacaaauauccugaacuuaaugugaccaugcccaacaaugggaaguuugacaaacuguacauuuggggaguucaucacccuucuacagauagagagcaaaccucccucuacgugcgggcgagcggccgcgucacgguguccacaaagagaucucagcagaccgugaucccgaacauugggagccggcccuggguccgcggacuguccagcagaaucucuauuuauuggacaaucguuaaaccuggcgacauucugcucaucaauuccaccgggaaccugaucgcuccccggggauacuucaagauucgcaccggcaagagcucuaucaugagaagcgacgccccuauuggcacauguuccucugaaugcaucacgcccaacgggagcauuccgaaugauaaaccuuuucagaacgugaaucggaucaccuauggagccuguccccgcuacgugaagcaaaacacacuuaaacuggcuaccggcaugagaaaugucccugagaagcagacacgggggaucuucggagccauugcgggcuuuaucgagaacgggugggaaggaaugguggacggcugguauggcuucagacaccaaaauuccgaggggaccggacaggccgcugaucucaaaagcacgcaggccgcuauugaccagaucaacggcaagcugaaucgccuuauugagaaaacaaacgaaaaguuucaucagaucgaaaaggaguucucugagguugaagggcggauccaagaucuggagaaauacguggaagacaccaagauugaucucugguccuauaaugccgagcugcuggucgcccucgaaaaccagcacaccaucgaccugacagauagcgagaugaauaaacuuuucgagaagaccagaaaacagcugcgcgaaaacgcugaggacaugggaaauggcugcuuuaagauuuaccauaagugugauaacgcgugcaucgggucuauucggaacggcacauacgaccacgacguguauagagaugaagcccucaauaaccgcuuccagaucaaaggaguugagcugaaguccggcuacaaagacuggauucuuuggaucagcuuugcuaucuccugcuuccugcucugugugguccugcugggguuuauuaugugggccugccaaaagggaaauauccgguguaacauuugcaucuga

SEQ ID NO: 200565 - RNA, 1701 nt, Artificial Sequence
  derived and/or modified CDS sequence (opt5) from hemagglutinin__InfluenzaA__AFG72239
augaagaccaucauugcccugagcuacauccucugccuggugcuugcucagaaacugcccggcuccgacaacucuacagccacgcucugucuggggcaccaugcggucccuaauggaacccuuguuaagacaauuaccaacgaucaaaucgaggugacaaaugcuaccgaacuggugcagagcuccacaaccggcagaauuugcgacucuccgcaccggauccucgaugggaaaaacuguacgcugaucgacgcccugcucggagauccccauugcgacggcuuccagaauaaggagugggaucuguuugucgaacgcagcaaagccuauuccaacuguuacccuuaugacgugcccgauuacgcuucucuuagaagccugguugccuccagcgggacccucgaguucacaaaugaagacuuuaacuggaccggaguggcucagucuggcgaguccuaugccugcaagcggggcagcgucaagucuuucuuuucccgccugaauuggcuucacgagagcgauuacaaauauccugcgcugaacgugacaaugcccaauaacgggaaguucgacaaacucuacauuuggggaguucaucacccuucuaccgauagagaacaaacgucccuguacgugcgggccagcggccgcgucacaguguccaccaagagaucucagcagacagugaucccgaauauugggagccggcccuggguccgcggacuguccagcagaaucucuauuuauuggaccaucguuaaaccuggcgacauucuccugaucaacuccaccgggaaucuuaucgcuccccggggauacuuuaagauucgcacaggcaagagcucuaucaugagaagcgacgccccuauuggcacguguuccucugagugcaucacccccaacgggagcauuccgaacgauaaaccuuuccagaaugugaaccggaucacauauggagcuuguccccgcuacgugaagcaaaauacccugaaacucgccacaggcaugagaaacgucccugaaaagcagacccgggggaucuuuggagcgauugccggcuucaucgagaaugggugggagggaaugguggacggcugguauggcuuuagacaccagaacuccgaagggacgggacaggcugccgaucugaaaagcacacaagcugccauugaccagaucaauggcaaacuuaaccgccugauugagaagaccaaugaaaaguuccaucagaucgagaaggaauuuucugagguugaggggcggauccaagaucucgaaaaauacguggaggacaccaagauugaucugugguccuauaacgccgaacugcucgucgcucuggagaaucagcacacaaucgaccuuaccgauagcgaaaugaacaaacuguucgagaagacaagaaaacagcuccgcgagaaugcggaagacaugggaaacggcugcuucaagauuuaccauaagugugauaaugccugcaucgggucuauucggaacggcacguacgaccacgacguguauagagaugaggcucugaacaaucgcuuucagaucaaaggaguugaacuuaaguccggcuacaaagacuggauucuguggaucagcuucgccaucuccugcuuucuccugugugugguccugcucggguucauuaugugggccugccaaaagggaaacauccgguguaauauuugcaucuga

SEQ ID NO: 200566 - RNA, 1701 nt, Artificial Sequence; identical to SEQ ID NO: 200559
  derived and/or modified CDS sequence (opt5) from hemagglutinin__InfluenzaA__AFG72272

SEQ ID NO: 200567 - RNA, 1701 nt, Artificial Sequence
  derived and/or modified CDS sequence (opt5) from hemagglutinin__InfluenzaA__AFG72316
augaagaccaucauugcccugagccacauccucugccugguguucgcucagaaacuucccggcaacgacaauuccacagccacgcugugucucgggcaucacgcggucccuaacggaacccugguuaagacaauuaccaaugaucaaaucgaggugacaaacgcuaccgaacuugugcagucuagcuccacaggcagaauuugcgacucuccgcaucggauccuggaugggaaaaauuguacccucaucgacgcccugcugggagauccccacugcgacggcuuucagaacaaggagugggaucucuucgucgaacgcagcaaagccuacuccaauuguuauccuuacgacgugcccgauuaugcuucucugagaagccuuguugccuccagcgggacgcuggaguuuauuaacgaagacuucaauuggaccggaguggcucaggauggcggcucuuacgccugcaagcggggguccgucaacagcuuuuucucucgccucaauuggcugcauaaacuugaguauaaguacccugcgcugaacgugacaaugcccaauaacggaaaguuugacaaacucuauaucuggggcguucaccacccuuccaccgauagcgaccaaacaucucuguacgugagagccuccgggcgggucaccgugagcacgaagcgcucccagcagacagugaccccgaauauuggaucuagacccuggguccggggccugagcucccgcaucagcauuuacuggacaaucguuaaaccuggggacauucuccugaucaacucuaccggaaaccuuaucgcucccagaggcuauuucaagauucggaauggcaaguccagcaucaugcgcucugaugugccuauugggaacuguagcuccgagugcaucacccccaauggaucuauuccgaacgacaaaccuuuucagaaugugaacagaaucacauacggcgccuguccccgguaugucaagcaaaauacgcugaaacucgcuaccgggaugcgcaacgugccugaaaagcagacaagaggaaucuucggcgccauugcgggguuuaucgagaauggaugggaaggcaugguugauggcugguacggguuccggcaucagaacagcgagggaaccggccaggccgcugaccugaaauccacacaagccgcuauugaucagaucaaugggaaacuuaacagacugauugagaagaccaaugaaaaguuucaccagaucgagaaggaguucagcgaaguggaaggacgcauccaagaccucgagaaauaugucgaggauacgaagauugaccuguggucuuacaacgccgaacugcucguggcccuggagaaucagcauacaaucgaucuuaccgacuccgaaaugaacaaacuguucgagaagacccggaaacagcucagagaaaacgcugaggauaugggcaaugggugcuuuaagauuuaucacaagugugacaacgcgugcaucggcagcauucgcaauggaacauacgaccacgauguuuaccgggacgaggcccugaacaauagauuccagaucaaaggcguggaacuuaagucuggguauaaagauuggauucuguggaucuccuuugcuaucagcugcuuccuccugugugucgugcugcucggauuuauuaugugggccugccaaaagggcaacauccgcuguaauauuugcaucuga

SEQ ID NO: 200568 - RNA, 1701 nt, Artificial Sequence
  derived and/or modified CDS sequence (opt5) from hemagglutinin__InfluenzaA__AFG72339
augaagaccaucauugcccugagcuacauccucugccugguguucgcucagaaacuucccggcaacgacaauuccacagccacgcugugucucgggcaccaugcggucccuaacggaacccugguuaagacaauuaccaaugaucaaaucgaggugacaaacgcuaccgaacuugugcagucuagcuccacaggcagaauuugcgacucuccgcaccggauccuggaugggaaaaauuguacccucaucgacgcccugcugggagauccccauugcgacggcuuucagaacaaggagugggaucucuucgucgaacgcagcaaagccuauuccaauuguuacccuuaugacgugcccgauuacguuucucugagaagccuuguggcuuccagcgggacgcuggaguuuauuaacgaagacuucaauuggaccggagucgcccaggauggcggcucuuauacaugcaagcggggguccgugaacagcuuuuucucucgccucaauuggcugcacaaguccgaguacaaauauccugcucuuaacguuaccaugcccaauaacggaaaguuugacaaacuguacaucuggggcgugcaucacccuagcacagauucugaccaaaccucccucuacgucagagccagcgggcgggugacgguguccacaaagcgcucucagcagaccgucacaccgaauauuggaagcagacccuggguucggggccuguccagccgcaucucuauuuauuggaccaucgugaaaccuggggacauucugcucaucaacuccaccggaaaccugaucgcgcccagaggcuacuucaagauucggaauggcaagagcucuaucaugcgcagcgaugccccuauugggacauguuccucugagugcaucacgcccaacggaagcauuccgaaugacaaaccuuuucagaacgugaauagaaucaccuauggcgcuuguccccgguacgucaagcaaaacacacuuaaacuggccaccgggaugcgcaaugugccugaaaagcagacaagaggaaucuucggcgcuauugccggguuuaucgagaacggaugggaaggcaugguugauggcugguauggguuccggcaccaaaauuccgagggaaccggccaggcggccgaccucaaaagcacgcaggcugccauugaucagaucaacgggaagcugaauagacuuauugagaaaacaaacgaaaaguuucaucagaucgagaaggaguucucugaaguggaaggacgcauccaagaccuggagaaauacgucgaggauaccaagauugaccucugguccuauaaugcugaacugcugguggcccucgagaaccagcacaccaucgaucugacagacagcgaaaugaauaaacuuuucgagaagacccggaaacagcugagagaaaacgccgaggauaugggcaacgggugcuuuaagauuuaccauaagugugacaaugcuugcaucggcucuauucgcaacggaacauacgaccacgauguuuaucgggacgaggcgcucaauaacagauuccagaucaaaggcguggaacugaaguccggguacaaagauuggauucuuuggaucagcuuugccaucuccugcuuccugcucugugucgugcugcugggauuuauuaugugggcuugccaaaagggcaauauccgcuguaacauuugcaucuga

SEQ ID NO: 200569 - RNA, 1701 nt, Artificial Sequence
  derived and/or modified CDS sequence (opt5) from hemagglutinin__InfluenzaA__AFG72350
augaagaccaucauugcccugagcuacauccucugccugguguucgcucagaaacuucccggcaacgacaauuccacagccacgcugugucucgggcaccaugcggucccuaacggaacccugguuaagacaauuaccaaugaucaaaucgaggugacaaacgcuaccgaacuugugcagucuagcuccacaggcagaauuugcgacucuccgcaccggauccuggaugggaaaaauuguacccucaucgacgcccugcugggagauccccauugcgacggcuuucagaacaaggagugggaucucuucgucgaacgcagcaaagccuauuccaauuguuacccuuaugacgugcccgauuacguuucucugagaagccuuguggcuuccagcgggacgcuggaguuuauuaacgaagacuucaauuggaccggagucgcccaggauggccggucuuaugcuugcaagcgcggcuccgugaacagcuuuuucucuagacucaauuggcugcacaaguccgaguacaaauauccugcccuuaacguuacaaugcccaauaacgggaaguuugacaaacuguacaucuggggagugcaucacccuagcaccgauucugaccaaacaucccucuacguccgggcgagcggccgcgugaccguguccacgaagagaucucagcagacagucaccccgaauauugggagccggcccuggguucgcggacuguccagcagaaucucuauuuauuggacaaucgugaaaccuggcgacauucugcucaucaacuccaccgggaaccugaucgcuccccggggauacuucaagauucgcaauggcaagagcucuaucaugagaagcgaugccccuauuggcaucuguuccucugagugcauuacccccaacgggagcaucccgaaugacaaaccuuuucagaacgugaaucggaucacauauggagccuguccccgcuacgucaagcaaaacacgcuuaaacuggcuaccggcaugagaaaugugccugaaaagcagacacgggggauuuucggagccaucgcgggcuuuauugagaacgggugggaaggaaugguugauggcugguauggcuucagacaccaaaauuccgaggggaccggacaggccgcugaccucaaaagcacacaggccgcuaucgaucagauuaacggcaagcugaaucgccuuaucgagaaaaccaacgaaaaguuucaucagaucgagaaggaguucucugaaguggaagggcggauucaagaccuggagaaauacgucgaggauacgaagaucgaccucugguccuauaaugccgaacugcugguggcccucgagaaccagcacacaauugaucugaccgacagcgaaaugaauaaacuuuucgagaagaccagaaaacagcugcgcgaaaacgcugaggauaugggaaacggcugcuuuaagaucuaccauaagugugacaaugcgugcauugggucuauccggaacggcacauacgaccacgauguuuauagagacgaggcccucaauaaccgcuuccagauuaaaggaguggaacugaaguccggcuacaaagauuggauccuuuggaucagcuuugcuauuuccugcuuccugcucugugucgugcugcugggguuuaucaugugggccugccaaaagggaaauauucgguguaacaucugcauuuga

SEQ ID NO: 200570 - RNA, 1701 nt, Artificial Sequence
  derived and/or modified CDS sequence (opt5) from hemagglutinin__InfluenzaA__AFG72372
augaagaccaucauugcccugagcuacauccucugccugguguucgcucagaaacuucccggcaacgacaauuccacagccacgcugugucucgggcaccaugcggucccuaacggaacccugguuaagacaauuaccaaugaucaaaucgaggugacaaacgcuaccgaacuugugcagucuagcuccacaggcagaauuugcgacucuccgcaccggauccuggaugggaaaaauuguacccucaucgacgcccugcugggagauccccauugcgacggcuuucagaacaaggagugggaucucuucgucgaacgcagcaaagccuauuccaauuguuacccuuaugacgugcccgauuacgcuucucugagaagccuuguugccuccagcgggacgcuggaguuuauuaacgaagacuucaauuggaccggaguggcucaggauggcaagucuuauacaugcaagcggggcuccgucaacagcuuuuucucucgccucaauuggcugcacaaacuugaguacaaguauccugcccugaacgugaccaugcccaauaacgggaaauuugacaagcucuacaucuggggaguucaucacccuuccacagauagcgaccaaaccucucuguacgugagagcguccggccgggucacggugagcacaaaacgcucccagcagaccgugauuccgaauaucgggucuagacccuggguccggggacugagcucccgcauuagcaucuauuggacaauuguuaagccuggcgacauccuccugaucaacucuaccgggaaccuuauugcccccagaggauacuucaagauccggaauggcaaauccagcauuaugcgcucugaugcuccuaucggcaacuguagcuccgagugcauuacccccaaugggucuaucccgaacgacaagccuuuucagaaugugaacagaaucacauauggagccuguccccgguacgugaaacaaaauacgcugaagcucgcuaccggcaugcgcaacgucccugaaaaacagacaagagggauuuucggagccaucgcgggcuuuauugagaaugggugggaaggaaugguggauggcugguauggcuuccggcaccagaacagcgaggggaccggacaggccgcugaccugaaguccacacaagccgcuaucgaucagauuaauggcaaacuuaacagacugaucgagaagaccaaugaaaaguuucaucagaucgagaaagaguucagcgaaguugaagggcgcauucaagaccucgagaaguacguggaggauacgaaaaucgaccuguggucuuauaacgccgaacugcucgucgcccuggagaaucagcacacaauugaucuuaccgacuccgaaaugaacaagcuguucgagcggaccagaaaacagcuccgcgaaaacgcugaggauaugggaaauggcugcuuuaagaucuaccauaagugugacaacgcgugcauugggagcauccggaauggcacauacgaccacgauguguauagagacgaggcccugaacaaucgcuuccagauuaaaggaguugaacuuaagucuggcuacaaagauuggauccuguggaucuccuuugcuauuagcugcuuccuccugugugugguccugcucggguuuaucaugugggccugccaaaagggaaacauucgguguaauaucugcauuuga

SEQ ID NO: 200571 - RNA, 1701 nt, Artificial Sequence; identical to SEQ ID NO: 193096
  derived and/or modified CDS sequence (opt5) from hemagglutinin__InfluenzaA__AFG72383

SEQ ID NO: 200572 - RNA, 1701 nt, Artificial Sequence
  derived and/or modified CDS sequence (opt5) from hemagglutinin__InfluenzaA__AFG72394
augaagaccaucauugcccugagcuacauccucugccugguguucgcucagaaacuucccggcaacgacaauuccacagccacgcugugucucgggcaccaugcggucccuaacggaacccugguuaagacaauuaccaaugaucaaaucgaggugacaaacgcuaccgaacuugugcagucuagcuccacaggcagaauuugcgacucuccgcaccggauccuggaugggaaaaauuguacccucaucgacgcccugcugggagauccccauugcgacggcuuucagaacaaggagugggaucucuucgucgaacgcagcaaagccuauuccaauuguuacccuuaugacgugcccgauuacgcuucucugagaagccuuguugccuccagcgggacgcuggaguuuauuaacgaagacuucaauuggaccggaguggcucaggauggcaagucuuaugccugcaagcggggcuccgucaacagcuuuuucucucgccucaauuggcugcacaaacuugaguacaaguauccugcgcugaacgugacaaugcccaauaacgggaaauuugacaagcucuacaucuggggaguucaucacccuuccaccgauagcgaccaaacaucucuguacgugagagccuccggccgggucaccguggcuacgaaacgcagccagcagacagugauuccgaauaucggguucagacccuggguccggggacaguccucuggcauuagcaucuauuggaccauuguuaagccuggggacauccugcucaucaacuccacaggaaaccugauugcccccagaggcuacuuuaagaucagaaauggcaaaagcucuauuaugcgguccgaugcuccuaucgggaacuguagcucugagugcauuacccccaauggaagcaucccgaacgacaagccuuuccaaaaugugaaccgcaucaccuauggcgccugucccagauacgugaaacagaauacacuuaagcuggcgacggggaugcggaacgucccugaaaaacagacccgcggaauuuuuggcgccaucgcuggguucauugagaauggaugggaaggcaugguggauggcugguauggguuuagacaccagaacuccgagggaacaggccaagccgcugaccucaagucuacccaggccgccaucgaucagauuaaugggaaacugaaccggcuuaucgagaagacaaaugaaaaguuccaucaaaucgagaaagaguucagcgaaguugaaggacgcauucaggaccuggagaaguacguggaggauaccaaaaucgaccucugguccuauaacgcuggccugcuggucgcgcucgaaaaucagcacacgauugaucugacagacagcgagaugaacaaacuuuuugaacgcacccggaagcagcugagagagaacgccgaagauauggggaauggcugcuucaagaucuaccauaagugugacaacgcuugcauuggaucuauccgcaauggcaccuacgaccacgauguguaucgggacgaggcccucaacaauagauuucaaauuaaagggguugagcugaaguccggauacaaagauuggauccuuuggaucagcuucgccauuucuugcuuucugcucugugugguccugcugggcuucaucaugugggcuugccagaaggggaacauucgcuguaauaucugcauuuga

SEQ ID NO: 200573 - RNA, 1701 nt, Artificial Sequence
  derived and/or modified CDS sequence (opt5) from hemagglutinin__InfluenzaA__AFG72405
augaagaccaucauugcccugagcuacauccucugccugguguucgcucagaaacuucccggcaacgacaauuccacagccacgcugugucucgggcaccaugcggucccuaacggaacccugguuaagacaauuaccaaugaucaaaucgaggugacaaacgcuaccgaacuugugcagucuagcuccacaggcagaauuugcgacucuccgcaccggauccuggaugggaaaaauuguacccucaucgacgcccugcugggagaucccaacugcgacggcuuucagaauaaggagugggaucucuucgucgaacgcagcaaagccuauuccaacuguuacccuuaugacgugcccgauuacgcuucucugagaagccuuguugccuccagcgggacgcuggaguuuaccaaugaagacuucaacuggacaggaguggcucaggauggcggcucuuaugccugcaagcggggguccgucaagagcuuuuucucucgccucaauuggcugcauaaacuugaguacaaguauccugcgcugaacgugaccaugcccaauaacggaaaauuugacaagcucuacauuuggggcguucaccauccuuccacagauagcgaccaaaccucucuguacgugagagccuccgggcgggucacggugagcacaaaacgcucccagcagaccgugacaccgaauaucggaucuagacccuggguccggggccugagcucccgcauuagcaucuauuggaccauuguuaagccuggggacauccuccugauuaacucuaccggaaaccuuaucgcucccagaggcuacuucaagauccggaauggcaaauccagcauuaugcgcucugaugccccuaucgggacauguagcuccgagugcauuacgcccaacggaucuaucccgaaugacaagccuuuucagaacgugaauagaauuaccuauggcgcuuguccccgguacgugaaacaaaacacacugaagcucgccaccgggaugcgcaaugucccugaaaaacagacaagaggaaucuucggcgcgaucgccggguuuauugagaacggaugggaaggcaugguggauggcugguauggguuccggcaccagaauagcgagggaaccggccaggcugccgaccugaaguccacgcaagcugccaucaaccagauuaaugggaaacuuaacagacugaucgagaagacaaaugaaaaguuucaccagauugagaaagaguucagcgaaguugaaggacgcauccaagaucucgagaaguacguggaggacaccaaaaucgaucuguggucuuauaacgccgaacugcucgucgcucuggagaaucagcauaccauugaccuuacagauuccgaaaugaacaagcuguucgagaaaacccggaagcagcucagagaaaacgcggaggacaugggcaaugggugcuuuaagaucuaccacaaaugugauaacgccugcauuggcagcauccgcaauggaacauacgaccaugacguguaucgggaugaggcucugaacaauagauuccagauuaagggcguugaacuuaaaucuggguacaaggacuggauccuguggauuuccuuugccaucagcugcuuccuccugugugugguccugcucggauuuaucaugugggccugccaaaaaggcaacauucgcuguaauaucugcauuuga

SEQ ID NO: 200574 - RNA, 1701 nt, Artificial Sequence
  derived and/or modified CDS sequence (opt5) from hemagglutinin__InfluenzaA__AFG72449
augaagaccaucauugcccugagcuacauccucugccugguguucgcucagaaacuucccggcaacgacaauuccacagccacgcugugucucgggcaccaugcggucccuaacggaacccugguuaagacaauuaccaaugaucaaaucgaggugacaaacgcuaccgaacuugugcagucuagcuccacaggcagaauuugcuauucuccgcaccggauccuggacgggaauaacuguacccucaucgaugcccugcugggagacccccauugcgauggcuuucagaauaaagagugggaccucuucgucgaacgcagcaaggccuacuccaacuguuauccuuacgaugugcccgacuaugcuucucugagaagccuuguugccuccagcgggacgcuggaguuuauuaaugaagauuucaacuggaccggaguggcucaggacggcaaaucuuacgccugcaagcggggcuccgucaagggguuuuucagccgccucaauuggcugcacaaacuugaguauaaguacccugcgcugaacgugacaaugcccaauaacggaaaauuugauaagcucuacaucuggggcguucaucacccuucuaccgacuccgaucaaacaagccuguaugugagagccucugggggagucaccguguccacgaaacggagccagcagacagugauuccguccaucggcucucgccccugggucagagggcugagcucccggauuagcaucuacuggaccauuguuaagccuggagacauccuccugaucaauucuacaggcaaccuuauugcuccccgcggcuauuucaagaucagaaacgggaaauccagcauuaugcggucugacgccccuaucggaaauuguagcuccgagugcauuacccccaacggcucuaucccgaaugauaagccuuuucagaacgugaaucgcaucaccuacggggcuugucccagauaugugaaacaaaacacacugaagcucgccacgggaaugcggaaugucccugaaaaacagacccgcggcauuuucggggcgaucgccggauuuauugagaacggcugggaaggcaugguggacgggugguacggauucagacaccagaauagcgagggcacagggcaggcugccgaucugaaguccacccaagcugccaucgaccagauuaacggaaaacuuaaucggcugaucgagaagacaaacgaaaaguuucaucagaucgagaaagaguucagcgaaguugaaggccgcauucaagaucucgagaaguauguggaggacaccaaaaucgaucuguggucuuacaaugccgaacugcucgucgcucuggagaaccagcacacgauugaccuuacagauuccgaaaugaauaagcuguucgagagaacccggaaacagcucagagaaaacgcggaggacauggggaacggcugcuuuaagaucuaccauaagugugauaaugccugcauuggaagcauccgcaacggcaccuaugaccacgacguguaccgggaugaggcucugaauaacagauuccagauuaaagggguugaacuuaagucuggauauaaagacuggauccuguggaucuccuuugccauuagcugcuuccuccugugugugguccugcucggcuuuaucaugugggccugccaaaaggggaauauucgcuguaacaucugcauuuga

SEQ ID NO: 200575 - RNA, 1701 nt, Artificial Sequence; identical to SEQ ID NO: 193125
  derived and/or modified CDS sequence (opt5) from hemagglutinin__InfluenzaA__AFG72460

SEQ ID NO: 200576 - RNA, 1701 nt, Artificial Sequence
  derived and/or modified CDS sequence (opt5) from hemagglutinin__InfluenzaA__AFG72504
augaagaccaucauugcccugagcuacauccucugccugguguucgcucagaaacuucccggcaacgacaauuccacagccacgcugugucucgggcaccaugcggucccuaacggaacccugguuaagacaauuaccaaugaucaaaucgaggugacaaacgcuaccgaacuugugcagucuagcuccacaggcagaauuugcgacucuccgcaccggauccuggaugggaaaaauuguacccucaucgacgcccugcugggagauccccauugcgacggcuuucagaacaaggagugggaucucuucgucgaacgcagcaaagccuauuccaauuguuacccuuaugacgugcccgauuacgcuucucugagaagccuuguugccuccagcgggacgcuggaguuuauuaacgaagacuucaauuggaccggaguggcucaggauggcaagucuuaugccugcaagcggggcuccgucaagagcuuuuucucucgccucaacuggcugcacaaacuugaguacaaauauccugcgcugaaugugacaaugcccaacaaugggaaguuugacaaacucuacaucuggggaguucaucacccuuccaccgauagcgaccaaacaucucuguacgugagagccuccggccgggucaccgugagcacgaagcgcucccagcagacagugauuccgaacaucggguucagacccuggguccggggacugucuagccgcauuuccaucuauuggaccauuguuaagccuggcgacauccuccugaucaauagcacagggaaccuuauugcucccagaggauacuuuaaaauccggaacggcaagucuuccauuauccgcagcgaugccccuauuggcaauuguucuagcgagugcaucacccccaacggguccaucccgaaugacaaaccuuuccagaacgugaauagaauuaccuauggagcuuguccccgguacgugaagcaaaacacacugaaacucgccacgggcaugcgcaaugucccugaaaagcagaccagagggaucuuuggagcgauugccggcuucaucgagaacgggugggaaggaaugguggauggcugguauggcuuucggcaccaaaauucugaggggacaggacaggcugccgaccugaaaagcacccaggcugccauugaucagaucaacggcaaacuuaauagacugaucgagaagacaaacgaaaaguuccaucagauugagaaggaguucuccgaaguugaagggcgcauccaagaccucgagaaauacguggaggauaccaagauugaccuguggagcuauaaugccggacugcucgucgcucuggaaaaccagcacacgaucgaucuuacagacucugagaugaauaaacuguuugaacggaccagaaagcagcuccgcgagaacgcggaagauaugggcaacgggugcuucaagauuuaccauaaaugugacaaugccugcaucggcuccauucggaacggaaccuacgaccacgauguguauagagacgaggcucugaauaaccgcuuucagaucaagggcguugagcuuaaaagcggguacaaggauuggauccuguggauuucuuucgccaucuccugcuuucuccugugugugguccugcucggauucauuaugugggccugccaaaaaggcaauauccgguguaacauuugcaucuga

SEQ ID NO: 200577 - RNA, 1701 nt, Artificial Sequence
  derived and/or modified CDS sequence (opt5) from hemagglutinin__InfluenzaA__AFG72515
augaagaccaucauugcccugagcuacauccucugccugguguucgcucagaaacuucccggcaacgacaauuccacagccacgcugugucucgggcaccaugcggucccuaacggaacccugguuaagacaauuaccaaugaucaaaucgaggugacaaacgcuaccgaacuugugcagucuagcccgacaggcagaauuugcgacucuccccaccggauccuggaugggaaaaauuguacccucaucgacgcccugcugggagauccucauugcgacggcuuucagaacaaggagugggaucucuucgucgaacgcuccaaagccuauagcaauuguuaccccuaugacgugccugauuacgcuucccugagaucucuuguugccagcuccgggacgcuggaguuuauuaacgaaaauuucaacuggaccggaguggcucaggacggcaagagcuaugccugcaagcggggcucugucaauuccuuuuucagccgccucaacuggcugcacaaacuugaguacaaguaucccgcgcugaaugugacaaugccuaacaaugggaaauuugauaagcucuacaucuggggaguucaucacccgucuaccgacuccgaucaaacaagccuguacgugagagccucuggccgggucaccguguccacgaaacgcagccagcagacagugauucccgacaucggguauagaccuuggguccggggacuguccucucgcauuagcaucuacuggaccauuguuaagcccggcgacauccuccugaucaacuccacagggaaccuuauugcuccuagaggauauuucaagauccggaauggcaaaagcucuauuaugcgcuccgaugcccccaucggcaacuguagcucugagugcauuaccccgaaugggagcaucccuaacgacaagcccuuucagaaugugaacagaaucaccuacggagcuuguccucgguaugugaaacaaaauacacugaagcucgccacgggcaugcgcaacguccccgaaaaacagaccagagggauuuucggagcgaucgccggcuuuauugagaaugggugggaaggaaugguggauggcugguacggcuuccggcaccagaacuccgaggggacaggacaggcugccgaccugaagucuacccaagcugccaucgaucagauuaauggcaaacuuaacagacugguugagaagacaaaugaaaaguuucaucagaucgagaaagaguucagcgaaguggaagggcgcauccaagaccucgagaaguaugucgaggauaccaaaauugaccugugguccuacaacgccgaacugcucguggcucuggagaaucagcacacgaucgaucuuacagacagcgaaaugaacaagcuguucgagcggaccagaaaacagcuccgcgaaaacgcggaggauaugggaaauggcugcuuuaagauuuaccauaagugugacaacgccugcaucgggucuauucggaauggcaccuaugaccacgauguuuacagagacgaggcucugaacaaucgcuuccagaucaaaggaguggaacuuaaguccggcuauaaagauuggauucuguggaucagcuuugccaucucuugcuuccuccugugugucgugcugcucggguuuauuaugugggccugccaaaagggaaacauccgguguaauauuugcaucuga

SEQ ID NO: 200578 - RNA, 1701 nt, Artificial Sequence
  derived and/or modified CDS sequence (opt5) from hemagglutinin__InfluenzaA__AFG72526
augaagaccaucauugcccugagcuacauccucugccugguguucgcucagaaacuucccggcaacgacaauuccacagccacgcugugucucgggcaccaugcggucccuaacggaacccugguuaagacaauuaccaaugaucaaaucgaggugacaaacgcuaccgaacuugugcagucuagcuccacaggcagaauuugcgacucuccgcaccggauccuggaugggaaaaauuguacccucaucgacgcccugcugggagauccccauugcgacggcuuucagaacaaggagugggaucucuucgucgaacgcagcaaagccuauuccucuuguuacccuuaugacgugcccgauuacgcuagccugagaucccuuguugccagcucugggacgcuggaguuuauuaaugaagacuucaacuggaccggaguggcucaggauggcaaguccuaugccugcaagcggggcagcgucaauucuuucuucucccgccucaacuggcugcacaaacuugaguacaaguauccugcgcugaaugugacaaugcccaacaaugggaaauuugacaagcucuacaucuggggaguucaucacccuagcaccgauucugaccaaacaucccuguacgugagagccagcggccgggucauuguguccaccaaacgcucucagcagacggugaucccgaacauugggagcagacccuggguccggggacuguccagccgcaucucuauuuauuggacaaucguuaagccuggcgacauccuccugauuaauuccaccgggaaccuuaucgcucccagaggauacuucaagauucggacaggcaaaagcucuaucaugcgcagcgaugccccuauuggcaacuguuccucugagugcaucacccccaaugggagcaucccgaacgacaagccuuuucagaaugugaacagaauuaccuauggagcuuguccccgguacgugaaacaaaauacacugaagcucgccacgggcaugcgcaacgucccugaaaaacagaccagagggaucuucggagcgauugccggcuuuaucgagaaugggugggaaggaaugguggauggcugguauggcuuccggcaccagaacuccgaggggacaggacaggcugccgaccuuaagagcacccaaacagcuauuaaucagaucaacggcaaacugaauagacugaucgagaagaccaacgaaaaguuucaucagauugagaaagaauuuucugagguugaagggcgcauccaagaucucgagaaguacguggaggacacgaaaauugaucugugguccuauaaugccgaacugcucgucgcccuggagaaccagcacacaaucgaccuuaccgauagcgaaaugaauaagcuguucgagcggaccagaaaacagcuccgcgaaaacgcugaggacaugggaaacggcugcuuuaagauuuaccauaagugugauaaugcgugcaucgggucuauucggaacggcacauacgaccacgacguguauagagaugaggcccugaauaaccgcuuccagaucaaaggaguugaacuuaaguccggcuacaaagacuggauccuguggauuagcuuugcuaucuccugcuuccuccugugugugguccugcucggguuuauuaugugggccugccaaaagggaaauauccgguguaacauuugcaucuga

SEQ ID NO: 200579 - RNA, 1701 nt, Artificial Sequence
  derived and/or modified CDS sequence (opt5) from hemagglutinin__InfluenzaA__AFG72581
augaagaccaucauugcccugagcuacauccucugccugguguucgcucagaaacuucccggcaacgacaauuccacagccacgcugugucucgggcaccaugcggucccuaacggaacccugguuaagacaauuaccaaugaucaaaucgaggugacaaacgcuaccgaacuugugcagucuagcuccacaggcagaauuugcgacucuccgcaccggauccuggaugggaaaaauuguacccucaucgacgcccugcugggagauccccauugcgacggcuuucagaacaaggagugggaucucuucgucgaacgcagcaaagccuauuccaauuguuacccuuaugacgugcccgauuacgcuucucugagaagccuuguugccuccagcgggacgcuggaguuuauuaacgaagacuucaauuggaccggaguggcucaggauggcaagucuuaugccugcaagcggggcuccgucaacagcuuuuucucucgccucaauuggcugcacaaacuugaguacaaguauccugcgcugaacgugacaaugcccaauaacgggaaauuugacaagcucuacaucuggggaguucaucacccuuccaccgauagcgaccaaacaucucuguacgugagagccuccggcggggucaccgugagcacgaaacggucccagcagacagugauuccgaauaucggauaucgccccugggucagaggccugucuagccggauuuccaucuacuggaccauuguuaagccuggggacauccuccugaucaacagcacaggaaaccuuauugcuccccgcggcuauuucaagaucagaaauggcaaaucuuccauuaugcggagcgaugccccuaucgggaacuguucuagcgagugcauuacccccaauggauccaucucuaacgacaagccguuucagaaugugaaccgcaucaccuacggcgcuuguccuagauaugugaaacaaaauacacugaagcucgccacggggaugcggaacguccccgaaaaacagacccgcggaauuuucggcgcgaucgccggguuuauugagaauggaugggaaggcaugguggauggcugguacggguucagacaccagaacagcgagggaacaggccaggcugccgaccugaaguccacccaagcugccaucgaucagauuaaugggaaacuuaaccggcugaucgagaagacaaaugaaaaguuucaucagaucgagaaagaguucagcgaaguugaaggacgcauucaagaccucgagaaguauguggaggauaccaaaaucgaccuguggucuuacaacgccgaacugcucgucgcucuggagaaucagcacacgauugaucuuacagacuccgaaaugaacaagcuguucgagagaacccggaaacagcucagagaaaacgcggaggauaugggcaaugggugcuuuaagaucuaccauaagugugacaacgccugcauuggcagcauccgcaauggaaccuaugaccacgauguguaccgggacgaggcucugaacaauagauuccagauuaaaggcguugaacuuaagucuggguauaaagauuggauccuguggaucuccuuugccauuagcugcuuccuccugugugugguccugcucggauuuaucaugugggccugccaaaagggcaacauucgcuguaauaucugcauuuga

SEQ ID NO: 200580 - RNA, 1701 nt, Artificial Sequence
  derived and/or modified CDS sequence (opt5) from hemagglutinin__InfluenzaA__AFG72603
augaagaccaucauugcccugagcuacauccucugccugguguucgcucagaaacuucccggcaacgacaauuccacagccacgcugugucucgggcaccaugcggucccuaacggaacccugguuaagacaauuaccaaugaucaaaucgaggugacaaacgcuaccgaacuugugcagucuagcuccacaggcagaauuugcgacucuccgcaccggauccuggaugggaaaaauuguacccucaucgacgcccugcugggagauccccauugcgacggcuuucagaacaaggagugggaucucuucgucgaacgcagcaaagccuauuccaauuguuacccuuaugacgugcccgauuacgcuucucugagaagccuuguugccuccagcgggacgcuggaguuuaccaaggaaggauucaacuggacaggcguggcucaggacggcaagucuuaugccugcaaacggggguccgucaauagcuuuuucucucgccucaacuggcugcacaagcuggaguacaaauauccugcgcugaaugugaccaugcccaacaaugauaaguuugacaaacucuacauuuggggaguucaucacccuuccacagauagcgaccaaaccucucuguacgugcaggccuccggcagagucacggugagcacaaagcggucccagcagaccgugaucccgaacauugggucucgccccugggucagaggaaucagcucccggauuagcaucuauuggacaauuguuaagccuggcgacauccugcucaucaauucuaccgggaaccugauugcuccccgcggauacuucaaaaucagaaacggcaaguccagcauuaugcggucugaugccccuaucggcaauuguaaaagcgagugcauuacccccaacggguccaucccgaaugacaagccuuuucaaaacgugaaucgcaucacauauggagcuugucccagauacgugaaacagaacacgcuuaagcuggccaccggcaugcggaaugucccugaaaaacagacacgcgggauuuucggagcgaucgccggcuuuauugagaacgggugggaaggaaugguggauggcugguauggcuucagacaccaaaauucugaggggaccggacaggcugccgaccucaagagcacacaggcugccaccgaucagaucaacggcaagcugaaucggcuuauugagaaaacgaacgaaaaguuucaucaaaucgagaaagaguucuccgaaguugaagggagaauccaggaccuggagaaguacguggaggauacaaaaauugaccucuggagcuauaaugccgaacugcuggucgcucucgagaaccagcacaccaucgaucugaccgacucugaaaugaauaaacuuuucgagcgcacacggaagcagcugagagaaaacgcggaggauaugggaaacggcugcuuuaagauuuaccauaagugugacaaugccugcaucggguccauucgcaacggcaccuacgaccacgauguguaucgggacgaggcucucaauaacagauuccaaaucaaaggaguugaacuuaagagcggcuacaaagauuggauucuuuggaucucuuuugccaucuccugcuuccugcucugugugguccugcugggguuuauuaugugggccugccagaagggaaauauccgcuguaacauuugcaucuga

SEQ ID NO: 200581 - RNA, 1701 nt, Artificial Sequence
  derived and/or modified CDS sequence (opt5) from hemagglutinin__InfluenzaA__AFG72614
augaagaccaucauugcccugagcuacauccucugccugguguucgcucagaaacuucccggcaacgacaauuccacagccacgcugugucucgggcaccaugcggucccuaacggaacccugguuaagacaauuaccaaugaucaaaucgaggugacaaacgcuaccgaacuugugcagucuagcuccacaggcagaauuugcgacucuccgcaccggauccuggaugggaaaaauuguacccucaucgacgcccugcugggagauccccauugcgacggcuuucagaacaaggagugggaucucuucgucgaacgcagcaaagccuauuccaauuguuacccuuaugacgugcccgauuacgcuucucugagaagccuuguugccuccagcgggacgcuggaguuuaccaacgaaggauucaauuggacaggcguggcucaggacggcaccucuuauuccugcaagcgggggagcgucaagucuuucuucucccgccucaacuggcugcacaaacuugaguacaaguauccugcccugaauguggcgaugcccaacaaugauaaauuugacaagcucuacauuuggggaguucaucacccuagcacagauucugaccaaaccucccuguacgugcaggccagcggcagagucacgguguccacaaaacggucucagcagaccgugaucccgaacauugggagccgccccugggucagaggaguuuccagccggaucucuauuuauuggacaaucgugaagccuggcgacauucugcucaucaauuccaccgggaaccugaucgcuccccgcggauacuucaagauuagaagcggcaaaucuagcaucaugcgguccgaugccccuauuggcaacuguaauucugagugcaucacccccaacgggagcauuccgaaugacaagccuuuucaaaacgugaaucgcaucacauauggagcuugucccagauacgucaaacagaacacgcuuaagcuggccaccggcaugcggaaugugccugaaaaacagacacgcgggaucuucggagcgauugccggcuuuaucgagaacgggugggaaggaaugguugauggcugguauggcuucagacaccaaaauuccgaggggaccggacaggcugccgaccucaagagcacacaggcugccauuaaccagaucaauggcaaacugaaccggcuuauugagaagaccaaugaaaaguuucaucaaaucgagaaagaauuuucugagguggaagggagaauccaggaucuggagaaguacgucgaggacacgaaaauugaucucugguccuauaacgccgaacugcugguggcucucgagaaucagcacacaaucgaccugaccgauagcgaaaugaacaaacuuuucgagcgcacccggaagcagcugagagaaaacgcggaggacaugggaaauggcugcuuuaagauuuaccauaagugugauaacgccugcaucgggucuauucgcaauggcacauacgaccacgacguuuaucgggaugaggcucucaacaauagauuccaaaucaaaggaguggaacugaaguccggcuacaaagacuggauucuuuggaucagcuuugccaucuccugcuuccugcucugugucgugcugcugggguuuauuaugugggccugccagaagggaaacauccgcuguaauauuugcaucuga

SEQ ID NO: 200582 - RNA, 1701 nt, Artificial Sequence
  derived and/or modified CDS sequence (opt5) from hemagglutinin__InfluenzaA__AFG72625
augaagaccaucauugcccugagcuacauccucugccugguguucgcucagaaacuucccggcaacgacaauuccacagccacgcugugucucgggcaccaugcggucccuaacggaacccugguuaagacaauuaccaaugaucaaaucgaggugacaaacgcuaccgaacuugugcagucuagcuccacaggcagaauuugcgacucuccgcaccggauccuggaugggaaaaauuguacccucaucgacgcccugcugggagauccccauugcgacggcuuucagaacaaggagugggaucucuucgucgaacgcagcaaagccuauuccaauuguuacccuuaugacgugcccgauuacgcuucucugagaagccuuguugccuccagcgggacgcuggaguuuaccaacgaaggauucaauuggacaggcguggcucaggacggcaccucuuaugccugcaagcggggguccgucaagagcuuuuucucucgccucaacuggcugcacaaacuugaguacaaguauccugcgcugaaugugacaaugcccaacaaugauaaauuugacaagcucuacauuuggggaguucaucacccuuccaccgauagcgaccaaacgucucuguacgugcaggccuccggcagagucacagugagcaccaaacggucccagcagacagugaucccgaacauugggucucgccccugggucagaggaaucagcucccggauuagcaucuauuggaccauuguuaagccuggcgacauccugcucaucaagucuaccgggaaucugauugcuccccgcggauacuucaaaaucagauccggcaagagcucuauuaugcggagcgaugccccuaucggcaacuguaacuccgagugcauuacacccaaugggucuaucccgaacgacaaaccuuuucaaaaugugaaccgcaucacguauggagcuugucccagauacgugaagcagaauacccuuaaacuggccacaggcaugcggaacgucccugaaaagcagacccgcgggauuuucggagcgaucgccggcuuuauugagaaugggugggaaggaaugguggauggcugguauggcuucagacaccagaacagcgaggggacaggacaagcugccgaccucaaauccacccaggcugccaucaaucagauuaacggcaagcugaaucggcuuaucgagaagacgaacgaaaaauuucaucaaaucgagaaggaguucagcgaaguugaagggcgcauucaggaucuggagaaauacguggaggacacaaagaucgaucucuggucuuauaaugccgaacugcuggucgcucucgagaaccagcacaccauugaccugaccgauuccgaaaugaauaaacuuuucgagagaacacggaagcagcugagagaaaacgcggaggacaugggaaacggcugcuuuaagaucuaccauaaaugugauaaugccugcauugggagcauccgcaacggcaccuacgaccacgacguguaucgggaugaggcucucaauaacagauuccaaauuaagggaguugaacugaaaucuggcuacaaggacuggauccuuuggaucuccuuugccauuagcugcuuccugcucugugugguccugcugggguuuaucaugugggccugccagaaaggaaauauucgcuguaacaucugcauuuga

SEQ ID NO: 200583 - RNA, 1701 nt, Artificial Sequence
  derived and/or modified CDS sequence (opt5) from hemagglutinin__InfluenzaA__AFG72636
augaagaccaucauugcccugagcuacauccucugccugguguucgcucagaaacuucccggcaacgacaauuccacagccacgcugugucucgggcaccaugcggucccuaacggaacccugguuaagacaauuaccaaugaucaaaucgaggugacaaacgcuaccgaacuugugcagucuagcuccacaggcagaauuugcgacucuccgcaccggauccuggaugggaaaaauuguacccucaucgacgcccugcugggagauccccauugcgacggcuuucagaacaaggagugggaucucuucgucgaacgcagcaaagccuauuccaauuguuacccuuaugacgugcccgauuacgcuucucugagaagccuuguugccuccagcgggacgcuggaguuuaccaacgaaggauucaauuggacaggcguggcucaggacggcaagucuuaugccugcaagcggggguccgucaagagcuuuuucucucgccucaacuggcugcacaaacuugaguuuaaauacccugcgcugaaugugaccaugcccaacaaugauaaguucgacaaacucuauauuuggggaguucaucacccuuccacagauagcgaccaaaccucucuguacgugcaggccuccggcagagucacggugagcacaaagcggucccagcagaccgugaucccgaacauugggucucgccccugggucagaggaaucagcucccggauuagcaucuacuggacaauuguuaagccuggcgacauccugcucaucaauucuaccgggaaccugauugcuccccgcggauauuuuaaaaucagaaacggcaaguccagcauuaugcggucugaugccccuaucgacaauuguaacagcgagugcauuacccccaauggcuccaucccgaacgauaaaccuuuccaaaaugugaaccgcaucacauacggggcuugucccagauaugugaagcagaauacgcuuaaacuggccaccggaaugcggaacgucccugaaaagcagacacgcggcauuuuuggggcgaucgccggauucauugagaauggcugggaagggaugguggacggaugguacggcuuuagacaccagaacucugagggcaccgggcaagcugccgaucucaaaagcacacaggcugccaucgaccagauuaauggaaagcugaaccggcuuaucgagaagaccaaugaaaaauuccaucaaaucgagaaggaguucuccgaaguugaaggccgcauucaggaucuggagaaauauguggaggacacgaagaucgaucucuggagcuacaacgccgaacugcuggucgcucucgagaaucagcacacaauugaccugaccgauucugaaaugaacaaacuuuuugagagaacccggaagcagcugagagaaaacgcggaggacauggggaauggaugcuucaagaucuaucauaaaugugacaacgccugcauuggcuccauccgcaaugggacauacgaucacgacguguaccgggaugaggcucucaacaauagauuucaaauuaagggcguugaacugaaaagcggauauaaggacuggauccuuuggaucucuuucgccauuuccugcuuucugcucugugugguccugcugggcuucaucaugugggccugccagaaagggaacauucgcuguaauaucugcauuuga

SEQ ID NO: 200584 - RNA, 1701 nt, Artificial Sequence
  derived and/or modified CDS sequence (opt5) from hemagglutinin__InfluenzaA__AFG72658
augaagaccaucauugcccugagcuacauccucugccuggcuuucgcccagaaacuucccggcaacgacaauuccacagcgacgcugugucucgggcaccaugcugugccuaacggaacccuggucaagacaauuaccaaugaucaaaucgagguuacaaacgccaccgaacuugugcagucuagcuccacaggcagaauuugcgacucuccgcaccggauccuggaugggaaaaauuguacccucaucgacgcccugcugggagauccccauugcgacggcuuucagaacaaggagugggaucucuucguggaacgcagcaaggcuuauuccaauuguuacccuuaugacguccccgauuacgccucucugagaagccuuguggcuuccagcgggacgcuggaguuuaccaacgaaggauucaauuggacaggcguugcccaggacggcaagucuuaugcgugcaagcggggguccgugaacagcuuuuucucucgccucaauuggcugcacaaacuugaguacaaguauccugcccugaacgucaccaugcccaauaacgauaaauuugacaagcucuacauuuggggagugcaucacccuuccacagauagcgaccaaaccucucuguacguucaggcuuccggcagagugacggucagcacaaaacggucccagcagaccgugaucccgaauauugggucucgccccugggugagaggaaucagcucccggauuagcaucuauuggacaauugucaagccuggcgacauccugcucaucaacucuaccgggaaccugauugcccccagaggauacuucaagaucagaaauggcaaauccagcauuaugcggucugaugcuccuaucgacaacuguaauagcgagugcauuacccccaacggcuccaucccgaaugauaagccuuuucaaaacguuaaucgcaucacauauggggccugucccagauacgugaaacagaacacgcuuaagcuggcgaccggaaugcggaaugugccugaaaaacagacacgcggcauuuucggggccaucgcuggauuuauugagaacggcugggaagggauggucgacggaugguauggcuucagacaccaaaauucugagggcaccgggcaggccgcugaucucaagagcacacaggccgccaucgaccagauuaacggaaaacugaaucggcuuaucgagaagaccaacgaaaaguuucaucaaaucgagaaagaguucuccgaaguggaaggccgcauucaggaucuggagaaguacguugaggacacgaaaaucgaucucuggagcuauaaugcugaacugcugguggcgcucgagaaccagcacacaauugaccugaccgauucugaaaugaacaaacuuuucgagcgcacccggaaacagcugagagaaaaugccgaggacauggggaacggaugcuuuaagaucuaccauaagugugacaaugcuugcauuggcuccauccgcaacgggacauacgaucacgacgucuaucgggaugaggcccucaauaacagauuccaaauuaaaggcguggaacuuaagagcggauacaaagacuggauccuguggaucucuuuugccauuuccugcuuccugcucuguguugugcugcugggcuuuaucaugugggcuugccagaaggggaauauucgcuguaacaucugcauuuga

SEQ ID NO: 200585 - RNA, 1701 nt, Artificial Sequence
  derived and/or modified CDS sequence (opt5) from hemagglutinin__InfluenzaA__AFG72680
augaagaccaucauugcccugagcuacauccucugccugguguucgcucagaaacuucccggcaacgacaauuccacagccacgcugugucucgggcaccaugcggucccuaacggaacccugguuaagacaauuaccaaugaucaaaucgaggugacaaacgcuaccgaacuugugcagucuagcuccacaggcauuaucugcgacucuccgcacagaauccuggaugggaaaaauuguacccucauugacgcccugcugggagauccccauugcgacggcuuucagaacaaggagugggaucucuucgucgaacggagcaaagccuauuccaauuguuacccuuaugacgugcccgauuacgcuucucugcgcagccuuguugccuccagcgggacgcuggaguuuaccaacgaaggauucaauuggacaggcguggcucaggacggcaccucuuaugccugcaagagaggguccgucaagagcuuuuucucucggcucaacuggcugcacaaacuugaguacaaguauccugcgcugaaugugacaaugcccaacaaugauaaauuugacaagcucuacaucuggggaguucaucacccuuccaccgauagcgaccaaacgucucuguacgugcaggccuccggccgcgucacagugagcaccagacggucccagcagacagugauuccgaacaucgggucucgccccugggucagaggaguuagcucccggauuagcaucuauuggaccauugugaaaccuggcgacauccugcucaucaauucuaccgggaaccugauugcuccccgcggauacuucaagaucagauccggcaagagcucuauuaugcggagcgaugccccuaucggcaacuguaauuccgagugcauuacacccaacgggucuaucccgaaugacaaaccuuuucaaaacgugaaucgcaucacguauggagcuugucccagauacgucaagcagaacacccuuaaacuggccacaggcaugcggaaugugccugaaaagcagacccgcgggauuuucggagcgaucgccggcuuuauugagaacgggugggaaggaaugguugauggcugguauggcuucagacaccagaauagcgaggggacaggacaagcugccgaccucaaauccacccaggcugccaucaaccagauuaaucggaagcugaacagacuuaucgagaaaacgaaugaaaaguuucaucaaaucgagaaggaguucagcgaaguggaaggccgcauucaggaucuggagaaauacgucgaggacacaaagaucgaucucuggucuuauaacgccgaacugcugguggcucucgagaaucagcacaccauugaccugaccgauuccgaaaugaacaaacuuuucgagcggacaagaaagcagcugcgcgaaaacgcggaggacauggggaauggaugcuuuaaaaucuaccauaagugugauaacgccugcauuggcagcauccggaaugggaccuacgaccacgacguuuauagagaugaggcucucaacaaucgcuuccaaauuaagggcguggaacugaaaucuggauacaaggacuggauccuuuggaucuccuuugccauuagcugcuuccugcucugugucgugcugcugggcuuuaucaugugggccugccagaaagggaacauucgguguaauaucugcauuuga

SEQ ID NO: 200586 - RNA, 1701 nt, Artificial Sequence
  derived and/or modified CDS sequence (opt5) from hemagglutinin__InfluenzaA__AFG72691
augaagaccaucauugcccugagcuacauccucugccugguguucgcucagaaacuucccggcaacgacaauuccacagccacgcugugucucgggcaccaugcggucccuaacggaacccugguuaagacaauuaccaaugaucaaaucgaggugacaaacgcuaccgaacuugugcagucuagcuccacaggcagaauuugcgacucuccgcaccggauccuggaugggaaaaauuguacccucaucgacgcccugcugggagauccccauugcgacggcuuuaagaacaaagagugggaucucuucgucgaacgcagcacggccuauuccaauuguuacccuuaugacgugcccgauuacgcuucucugagaagccuuguugccuccagcgggacccuggaguuuacaaacgaaggauucaauuggaccggcguggcucaggacggcacaucuuaugccugcaagcggggguccgucaagagcuuuuucucucgccucaacuggcugcacaaacuugaguacaaguauccugcgcugaaugugaccaugcccaacaaugauaaauuugacaagcucuacauuuggggaguucaucacccuuccacggauagcgaccagacaucucuguacgugcaagccuccggcagagucaccgugagcacaaaacggucccagcagaccgugaucccgaacauugggucucgccccugggucagaggaguuagcucccggaucagcauuuauuggaccaucgugaagccuggcgacauucugcucaucaauucuacagggaaccugaucgcuccccgcggauacuucaagauuagauccggcaaaagcucuaucaugcggagcgaugccccuauugacaacuguaauuccgagugcaucacgcccaacggcucuauuccgaaugggaagccuuuucagaacgugaaucgcaucaccuauggagcuugucccagauacgucaaacaaaacacacuuaagcuggccaccggcaugcggaaugugccugaaaaacagacacgcgggaucuucggagcgauugccggcuuuaucgagaacgggugggaaggaaugguugauggcugguauggcuucagacaccagaauagcgaggggaccggacaggcugccgaccucaaguccacgcaagcugccauuaaccagaucaauggcaaacugaaccggcuuauugagaagacaaaugaaaaguuucaucagaucgagaaagaguucagcgaaguggaagggagaauccaagaucuggagaaguacgucgaggacaccaaaauugaucucuggucuuauaacgccgaacugcugguggcucucgagaaucagcacaccaucgaccugacagauuccgaaaugaacaaacuuuucgagcgcacccggaagcagcugagagaaaacgcggaggacaugggaaauggcugcuuuaagauuuaccauaagugugauaacgccugcaucgggagcauucgcaauggcacauacgaccacgacguuuaucgggaugaggcucucaacaauagauuccagaucaaaggaguggaacugaagucuggcuacaaagacuggauucuuuggaucuccuuugccaucagcugcuuccugcucugugucgugcugcugggguuuauuaugugggccugccaaaagggaaacauccgcuguaauauuugcaucuga

SEQ ID NO: 200587 - RNA, 1701 nt, Artificial Sequence
  derived and/or modified CDS sequence (opt5) from hemagglutinin__InfluenzaA__AFG72713
augaagaucauuaucgcccugagcuacauucucugccugguguucgcucagaaacuucccggcaacgacaauuccaccgccacacugugucucgggcaccaugcggucccuaacggaacgcugguuaagaccaucacaaaugaucaaauugaggugaccaacgcuacagaacuugugcagucuagcuccaccggcagaaucugcgacucuccgcaccagauccuggaugggaaaaauuguacacucauugacgcccugcugggagauccccauugcgacggcuuuaagaacaaagagugggaucucuucgucgaacggagcaccgccuauuccaauuguuacccuuaugacgugcccgauuacgcuucucugcgcagccuuguugccuccagcgggacgcuggaguuuaccaacgaaggauucaauuggacaggcguggcucaggacggcaccucuuaugccugcaagagaggguccgucaagagcuuuuucucucggcucaacuggcugcacaaacuugaguacaaguauccugcgcugaaugugacaaugcccaacaaugauaaauuugacaagcucuacaucuggggaguucaucacccuuccaccgauagcgaccaaacgucucuguacgugcaggccuccggccgcgucacagugagcaccaaaagaucccagcagacagugauuccgaacaucgggucucggcccuggguccgcggaauuagcuccagaaucagcauuuauuggaccaucguuaagccuggcgacauccugcucauuucuuccaccgggaaucugaucgcuccccggggauacuucaagauucgcagcggcaaaucuagcaucauuagauccgaugccccuaucgacaacuguaacucugagugcaucacacccaauggcagcauuccgaacgauaagccuuuucaaaaugugaaccggaucacguauggggcuuguccccgcuacgugaaacagaauacccuuaagcuggccacaggaaugagaaacgucccugaaaaacagacccggggcauuuucggggcgaucgccggauuuauugagaauggcugggaagggaugguggacggaugguauggcuuccgccaccagaacuccgagggcacagggcaagcugccgaucucaagagcacccaggcugccaucaaucagaucaacggaaaacugaauagacuuauugagaagacgaacgaaaaguuucaucaaaucgagaaagaguucucugaaguugaaggccggauucaggaccuggagaaguacguggaggauacaaaaaucgaccucugguccuauaaugccgaacugcuggucgcucucgagaaccagcacaccauugaucugaccgacagcgaaaugaauaaacuuuucgagagaacacgcaagcagcugcgggaaaacgcggaggauauggggaacggaugcuuuaagaucuaccauaagugugacaaugccugcauuggcucuaucagaaacgggaccuacgaccacgauguguaucgcgacgaggcucucaauaaccgguuccaaaucaaaggcguugaacugaaguccggauacaaagauuggauucuuuggaucagcuuugccauuuccugcuuccugcucugugugguccugcugggcuuuaucaugugggccugccagaaggggaauauuagauguaacaucugcaucuga

SEQ ID NO: 200588 - RNA, 1701 nt, Artificial Sequence
  derived and/or modified CDS sequence (opt5) from hemagglutinin__InfluenzaA__AFG72724
augaagaccaucauugcccugagcuacauccucugccugguguucgcucagaaacuucccggcaacgacaauuccacagccacgcugugucucgggcaccaugcggucccuaacggaacccugguuaagacaauuaccaaugaucaaaucgaggugacaaacgcuaccgaacuugugcagucuagcuccacaggcagaauuugcgacucuccgcaccggauccuggaugggaaaaauuguacccucaucgacgcccugcugggagauccccauugcgacggcuuucagaacaaggagugggaucucuucgucgaacgcagcaaagccuauuccaauuguuacccuuaugacgugcccgauuacgcuucucugagaagccuuguugccuccagcgggacgcuggaguuuaccaacgaaggauucaauuggacaggcguggcucaggacggcaccucuuaugccugcaagcggggguccgucaagagcuuuuucucucgccucaacuggcugcacaaacuugaguacaaguauccugcgcugaaugugacaaugcccaacaaugauaaauuugacaagcucuacauuuggggaguucaucacccuuccaccgauagcgaccaaacgucucuguacgugcaggccuccggcagagucacagugagcaccaaacggucccagcagacagugaucccgaacauugggucucgccccugggucagaggaguuagcucccggaucagcauuuauuggaccaucgugaagccuggcgacauucugcucaucaauucuaccgggaaccugaucgcuccccgcggauacuucaagauuagauccggcaaaagcucuaucaugcggagcgaugccccuauugacaacuguaauuccgagugcaucacacccaacggcucuauuccgaaugauaagccuuuucaaaacgugaaucgcaucacguauggggcuugucccagauacgucaaacagaacacccuuaagcuggccacaggaaugcggaaugugccugaaaaacagacccgcggcaucuucggggcgauugccggauuuaucgagaacggcugggaagggaugguugacggaugguauggcuucagacaccagaauagcgagggcacagggcaagcugccgaucucaaguccacccaggcugccauuaaccagaucaauggaaaacugaaccggcuuauugagaagacgaaugaaaaguuucaucaaaucgagaaagaguucagcgaaguggaaggcagaauccaggaccuggagaaguacgucgaggauacaaaaauugaccucuggucuuauaacgccgaacugcugguggcucucgagaaucagcacaccaucgaucugaccgacuccgaaaugaacaaacuuuucgagcgcacacggaagcagcugagagaaaacgcggaggauauggggaauggaugcuuuaagauuuaccauaagugugacaacguuugcaucggcagcauucgcaaugggaccuacgaccacgauguguaucgggacgaggcccucaacaauagauuccaaaucaaaggcgucgaacugaagucuggauacaaagauuggauucuuuggaucuccuuugcuaucagcugcuuccugcucugugugguccugcugggcuuuauuaugugggccugccagaaggggaacauccgcuguaauauuugcaucuga

SEQ ID NO: 200589 - RNA, 1701 nt, Artificial Sequence
  derived and/or modified CDS sequence (opt5) from hemagglutinin__InfluenzaA__AFG72735
augaagaccaucauugcccugagcuacauccucugccugguguucgcucagaaacuucccggcaacgacaauuccacagccacgcugugucucgggcaccaugcggucccuaacggaacccugguuaagacaauuaccaaugaucaaaucgaggugacaaacgcuaccgaacuugugcagucuagcuccacaggcagaauuugcgacucuccgcaccggauccuggaugggaaaaauuguacccucaucgacgcccugcugggagauccccauugcgacggcuuuaagaacaaagagugggaucucuucgucgaacgcagcacggccuauuccaauuguuacccuuaugacgugcccgauuacgcuucucugagaagccuuguugccuccagcgggacccuggaguuuacaaacgaaggauucaauuggaccggcguggcucaggacggcacaucuuaugccugcaagcggggguccgucaagagcuuuuucucucgccucaacuggcugcacaaacuugaguacaaguauccugcgcugaccgugacgaugcccaauaacgauaaauuugacaagcucuacauuuggggaguucaucacccuuccacagauagcgaccagaccucuaucuacgugcaagccuccggcagagucacagugagcaccaaacggucccagcagaccgugauuccgaauaucgggucucgccccugggucagaggaguuagcucccggauuagcaucuauuggacaauugugaagccuggcgacauccugcugaucaacucuacggggaaucucauugcuccccgcggauacuucaagaucagauccggcaaaagcucuauuaugcggagcgaugccccuaucgacaacuguaacuccgagugcauuacccccaauggcucuaucccgaacgauaagccuuuucagaaugugaaccgcaucacauauggggcuugucccagauacgucaaacaaaauacccugaaacuugccacaggaaugcggaacgugccugaaaagcagacccgcggcauuuucggggcgaucgccggauuuauugagaauggcugggaagggaugguugacggaugguauggcuucagacaccagaacagcgagggcacggggcaggcugccgaucugaaguccacacaagcugccaucaaucagauuaacggaaaacucaaucggcugaucgagaagaccaacgaaaaguuucaucagaucgagaaagaguucagcgaaguggaaggccgcauucaagaccuugagaaguacgucgaggauaccaaaaucgacauuuggucuuauaaugccgaacugcucguggcucuggagaaccagcacacaaucgaucugaccgacuccgaaaugaauaaacucuucgagagaacacggaagcagcugagagaaaacgcggaggauauggggaacggaugcuuuaagauuuaccauaagugugacaaugccugcaucggcagcauucgcaacgggacguacgaccacgauguuuaucgggacgaggcucuuaauaacagauuccagaucaaaggcguggaacugaagucuggauacaaagauuggauccucuggauuuccuuugccaucagcugcuuccugcuuugugucgugcugcucggcuuuauuaugugggccugccaaaaggggaauauccgcuguaacauuugcaucuga

SEQ ID NO: 200590 - RNA, 1701 nt, Artificial Sequence
  derived and/or modified CDS sequence (opt5) from hemagglutinin__InfluenzaA__AFG72757
augaagaccaucauugcccugagcuacauccucugccugguguucgcucagaaaauucccggcaacgacaauuccacagccacgcuuugucuggggcaccaugcggucccuaacggaacccucguuaagacaaucaccaaugaucaaauugaggugacaaacgcuaccgaacuggugcagucuagcuccacaggcagaaucugcgacucuccgcaccggauccuugauggggagaauuguacccugauugacgcccuccugggagauccccauugcgacggcuuucagaacaaagaaugggaucuguucgucgagcgcagcaaggccuauuccaauuguuacccuuaugacgugcccgauuacgcuucucucagaagccugguugccuccagcgggacgcuugaauuuaacaaugagucuuucaacuggaccggaguggcucagaauggcacauccuaugccugcaaacggagcucuaucaaguccuuuuucagccgccugaacuggcuccaccaacugaaguacaaauauccugcgcuuaaugucaccaugcccaacaaugacaaguuugauaaacuguacauuuggggcgugcaucacccuucuacagacuccgaucagaccagcaucuacgcccaggcuuccgggagaguuacggugucuacaaagcggagccagcaaaccgucauuccgaacaucggaucccgccccugggugagaggcauuagcucucggaucuccauccacuggacaauugugaaaccuggggacauccuccugauuaacagcaccggaaaucugaucgcuccccgcggcuauuucaagauuagaucuggaaagagcuccaucaugcggucugacgccccuaucgggaaauguaacagcgagugcauuacccccaauggcuccaucccgaacgauaagccuuuucagaaugucaaccgcauuacauacggcgccugucccagauauguuaaacagaauacgcucaagcuggcgaccgggaugcggaacgugccugaaaaacagacacgcggaaucuucggcgccauugcuggguuuaucgagaauggaugggaaggcaugguggacgggugguacggauucagacaucaaaacagcgagggcaccggccaggccgcugaucuuaagucuacacaggccgccaucaaucaaauuaacgggaaacugaaucggcucaucgagaagaccaacgaaaaguuucaccagauugagaaagaguucuccgaagucgaaggaagaauccaggaccuggagaaguauguggaggauacgaaaauugaccuuuggagcuacaaugcugaacugcucguugcgcuggagaaccagcauacaaucgaucugaccgacucugaaaugaacaagcuguucgagcgcacccggaaacaacugagagaaaaugccgaggauaugggcaacgggugcuuuaagauuuaucacaagugugacaaugcuugcaucggauccauccgcaacggcacauacgaucacgacguguaccgggacgaggcccuuaauaacagauuccagauuaaaggggucgaacucaagagcggcuauaaagauuggauccucuggauuuccuuugccaucucuugcuuccugcuuugugugguucugcucggauuuauuaugugggcuugccagaagggcaauauccgcuguaacaucugcauuuga

SEQ ID NO: 200591 - RNA, 1701 nt, Artificial Sequence
  derived and/or modified CDS sequence (opt5) from hemagglutinin__InfluenzaA__AFG72779
augaagaccaucauugcccugagcuacauccucugccugguguucgcucagaaacuucccggcaacgacaauuccacagccacgcugugucucgggcaccaugcggucccuaacggaacccugguuaagacaauuaccaaugaucaaaucgaggugacaaacgcuaccgaacuugugcagucuagcuccacaggcagaauuugcgacucuccgcaccggauccuggauggggagaauuguacccucaucgacgcccugcugggagauccccauugcgacggcuuucagaacaaagaaugggaucucuucgucgagcgcagcaaggccuauuccaauuguuacccuuaugacgugcccgauuacgcuucucugagaagccuuguugccuccagcgggacgcuggaauuuaacaaugagucuuucaacuggaccggaguggcucagaauggcacauccagcgccugcaaacggcgcucuauuaaguccuuuuucagcagacucaacuggcugcaccaacuuaaguauaaauacccugcgcugaaugucaccaugcccaacaaugacaaguuugauaaacucuauaucuggggcgugcaucacccuucuacagacuccgaucagaccagccuguacgcccaggcuuccgggcggguuacggugucuacacgcagaagccagcaaaccgucauuccgaacaucggaucccggcccugggugcgcggcgugagcucugggauuuccaucuacuggacaauugucaagccuggagacauccugcucaucaacagcaccggcaaucugauugcccccagaggguauuucaaaauccggucuggaaagagcuccauuaugcgcucugacgcuccuaucggcaaguguaacagcgagugcauuacccccaauggcuccaucccgaacgauaaaccuuuucagaauguuaacagaaucacauacggggccuguccccgguaugugaagcagaauacgcuuaaacuggcgaccggaaugcgcaacgugccugaaaagcagacaagaggcauuuucggggccaucgcuggauuuauugagaauggcugggaagggauggucgacggaugguacggcuuccggcaccaaaacagcgagggcaccgggcaggccgcugaucucaaaucuacacaggccgccaucaaucaaauuaacggaaagcugaauagacuuaucgagaaaaccaacgaaaaguuucaucagaucgagaaggaguucuccgaaguggaaggccgcauucaggaccuggagaaauauguugaggauacgaagaucgaccucuggagcuacaaugcugaacugcugguggcgcucgagaaccagcacacaauugaucugaccgacucugaaaugaacaaacuuuucgagcggaccagaaagcaacugcgcgaaaaugccgaggauauggggaacggaugcuuuaaaaucuaucauaagugugacaaugcuugcauuggcuccauccggaacgggacauacgaucacgacgucuacagagacgaggcccucaauaaccgcuuccagauuaagggcguggaacugaaaagcggauauaaggauuggauccuuuggaucuccuuugccauuucuugcuuccugcucuguguugugcugcugggcuuuaucaugugggcuugccagaaagggaauauucgguguaacaucugcauuuga

SEQ ID NO: 200592 - RNA, 1701 nt, Artificial Sequence
  derived and/or modified CDS sequence (opt5) from hemagglutinin__InfluenzaA__AFG72801
augaagaccaucauugcccugagcuacauccucugccugguguucgcucagaaacuucccggcaacgacaauuccacagccacgcugugucucgggcaccaugcggucucuaacggaacccugguuaagacaauuaccaaugaucaaaucgaggugacaaacgcuaccgaacuugugcagagcuccucuacaggcagaauuugcgacagcccucaccagauccuggauggggagaauuguacccucaucgacgcccugcugggagauccgcauugcgacggcuuucagaacaaagaaugggaucucuucgucgagcgguccaaggccuauucuaauuguuaccccuaugacgugccugauuacgcuagccugcgcucccuuguugccagcucugggacgcuggaauuuaacaaugaguccuucaacuggaccggaguggcucaaaauggcacaagcucugccugcaaaagacgguccaacaagagcuuuuucucucgccucaauuggcugcaccagcuuaaguauaaauaccccgcgcugaacgucaccaugccuaauaacgagaaguuugacaaacucuauauuuggggcgugcaucaccccuccacagauagcgaccagaucuccauuuacgcccagucuagcgggagaguuaccguguccacgaagcggagccaacagacagucaucccuaacauuggaucuuccccgugggugcgcggcgugagcucuagaaucagcauuuacuggaccaucgucaaacccggggauauccugcugauuaauuccacaggaaaccucaucgcuccucggggcuauuucaagauucgcucuggaaagagcuccaucaugagaagcgacgcccccauugggaaauguaauucugaaugcaucaccccuaacggcuccauccccaaugacaagccguuucagaacguuaaucggauuaccuacggcgcuuguccucgcuaugugaaacagaacacacugaaacuugccacggggaugagaaaugugcccgagaagcaaacccggggaaucuucggcgcgauugccggguuuaucgaaaacggaugggagggcauggucgaugggugguacggauuccgccaccagaauagcgagggcacaggccaggcugccgaccugaagucuacccaagcugccauuaaccagaucaaugggaaacucaacagacugaucgaaaagacaaaugagaaguuucaucagauugaaaaagaguucuccgaaguggagggacggauccaggaucuugagaaguauguugaagacaccaaaauugaucuguggagcuacaacgccgagcuccugguggcucuggaaaaccaacacacgaucgaccucacagauuccgagaugaauaagcuguucgaaagaaccaaaaagcagcuucgcgagaacgcggaggacaugggcaaugggugcuuuaagauuuaucauaaaugugauaacgccugcaucggaucuauucggaauggcaccuacgaccacgaugucuacagagacgaagcucugaacaaucgcuuccagaucaaggggguggagcucaaaagcggcuauaaggacuggauccuguggauuuccuuugccaucucuugcuuccuucuguguguugugcuccugggauuuauuaugugggccugccagaaaggcaacauccgguguaauauuugcaucuga

SEQ ID NO: 200593 - RNA, 1701 nt, Artificial Sequence
  derived and/or modified CDS sequence (opt5) from hemagglutinin__InfluenzaA__AFG72812
augaagaccaucauugcccugagcuacauccucugccugguguucgcucagaaacuucccggcaacgacaauuccacagccacgcugugucucgggcaccaugcggucccuaacggaacccugguuaagacaauuaccaaugaucaaaucgaggugacaaacgcuaccgaacuugugcagucuagcuccacaggcagaauuugcgacucuccgcaccagauccuggauggggagaauuguacccucaucgacgcccugcugggagauccccauugcgacggcuuucagaacaaagaaugggaucucuucgucgagcggagcaaggccuauuccaauuguuacccuuaugacgugcccgauuacguuucucugcgcagccuuguggcuuccagcgggacgcuggaauuuaacaaugagucuuucaacuggaccggagucgcccaaaauggcacauccagcgcuugcaaaagacggucuaacaaguccuuuuucagccgccucaauuggcugcaccagcuuaaguauaaauacccugcccugaacgugaccaugcccaauaacgagaaguuugacaaacucuauauuuggggcguucaucacccugggacagauucugaccagaucucccuguacgcgcaggccagcggaagagugaccgucuccacgaagcggucucaacagacagugauuccgaacaucggcagccgccccugggugagaggggucuccagccggauuucuaucuacuggaccauuguuaaaccuggagauauccugcucaucaauuccacaggcaaccugauugcuccccgcggguauuucaagaucagaagcggaaagucuagcauuaugcgguccgacgccccuaucggcaaauguaauucugaaugcauuacccccaacggcagcaucccgaaugacaagccuuuucagaacgugaaucgcaucaccuacggggcuugucccagauaugugaaacagaacacacuuaagcuggccacgggaaugcggaaugucccugagaaacaaacccgcggcauuuucggggcgaucgccggauuuauugaaaacggcugggaggggaugauggauggaugguacggcuucagacaccucaauuccgagggcacagggcaggcugccgaccuuaagagcacccaggcugccaucaaccaaauuaauggaaaacugaaccggcugaucgaaaagacaaaugagaaguuucaucagaucgaaaaagaguucucugaaguggagggccgcauucaggaucucgagaaguauguugaagacaccaaaaucgaucugugguccuacaacgccgagcugcucguggcucuggaaaaccagcacacgauugaccuuacagauagcgagaugaauaagcuguucgaaagaaccaaaaagcaacuccgggagaacgcggaggacauggggaauggaugcuuuaagaucuaucauaaaugugauaacgccugcauuggcucuaucagaaaugggaccuacgaccacgaugucuaccgcgacgaagcucugaacaaucgguuccagauuaagggcguggagcuuaaauccggauauaaggacuggauccuguggaucagcuuugccauuuccugcuuccuccuguguaucguucugcucggcuuuauuaugugggccugccagaaagggaacaucagauguaauauuugcaucuga

SEQ ID NO: 200594 - RNA, 1701 nt, Artificial Sequence
  derived and/or modified CDS sequence (opt5) from hemagglutinin__InfluenzaA__AFG72823
augaagaccaucauugcccugagcuacauccucugccugguguucgcucagaaacuucccggcaacgacaauuccacagccacgcugugucucgggcaccaugcggucccuaacggaaccauuguuaagacaaucaccaaugaucaaauugaggugacaaacgcuaccgaacuggugcagucuagcuccacaggcgggaucugcgacucuccgcaccagauccuugauggagagaauuguacccugauugacgcccuccugggcgauccccagugcgacggguuucaaaacaaaaagugggaucuguucgucgaaagaagcaaagccuauuccaauuguuacccuuaugacgugcccgauuacgcuucucuccggagccugguugccuccagcggaacgcuugaguuuaacaaugaaucuuucaacuggaccggcgugacacagaauggcaccuccagcgcuugcaagcgcagaucuaacaaguccuuuuucagccggcugaauuggcucacacaucugaaauauaaguacccugcccuuaacgucaccaugcccaauaacgagaaauuugacaagcuguauaucuggggagugcuccacccugggacggauucugaccagauuucccuguacgcgcaggccagcggccgcaucacaguuuccaccaaaagaucucaacagacagugauuccgaacaucgggagccggccccgcgucagaggaguguccagccggauuucuaucuacuggaccaucgugaagccuggcgauauucugcucaucaauuccaccgggaaccugauugcuccccgcggauauuucaagaucagaagcggcaaaucuagcauuaugcgguccgacgccccuaucggcaaguguaauucugagugcaucacacccaacgggagcauuccgaaugacaaaccuuuucagaacgucaaucgcaucacguacggagcuugucccagauauauuaagcagaacacccuuaaacuggccacaggcaugcggaauguuccugaaaagcaaacccgcgggaucuucggagcgauugccggcuuuaucgagaacgggugggaaggaaugguggauggcugguacggcuucagacaucaaaauuccgaggggacaggacaggcugccgaccucaaaagcacccaggcugccaucaaccagauuaauggcaagcugaaccggcuuaucgggaagacgaaugagaaauuucaccagauugaaaaggaguucucugaaguggagggaagaauccaggaucuggaaaaauaugucgaggacacaaagauugaucucugguccuacaacgccgagcugcugguggcucucgaaaaccaacacaccaucgaccugaccgauagcgagaugaauaaacuuuucgaacgcacaaagaagcagcugcgggagaacgcggaagacaugggcaaugggugcuuuaaaauuuaucauaagugugauaacgccugcaucggcucuaucagaaauggaaccuacgaccacgauguuuaccgcgacgaggcucucaacaaucgguuccagauuaaaggcguggagcugaaguccggguauaaagacuggauccuuuggauuagcuuugccaucuccugcuuccugcucugugucgcccugcugggauuuauuaugugggcuugccagaagggcaacaucagauguaauaucugcauuuga

SEQ ID NO: 200595 - RNA, 1701 nt, Artificial Sequence
  derived and/or modified CDS sequence (opt5) from hemagglutinin__InfluenzaA__AFG72834
augaagaccaucauugcccugagcuacauccucugccugguguucgcucagaaacuucccggcaacgacaauuccacagccacgcugugucucgggcaccaugcggucccuaacggaacccugguuaagacaauuaccaaugaucaaaucgaggugacaaacgcuaccgaacuugugcagucuagcuccacaggcagaauuugcgacucuccgcaccagauccuggauggggagaauuguacccucaucgacgcccugcugggagauccccauugcgacggcuuucagaacaaagaaugggaucucuucgucgagcggagcaaggccuauuccaauuguuacccuuaugacgugcccgauuacguuucucugcgcagccuuguggcuuccagcgggacgcuggaauuuaacaaugagucuuucaacuggaccggagucgcccaaaauggcacauccagcgcuugcaaaagacggucuaacaaguccuuuuucagccgccucaauuggcugcaccagcuuaaguauaaauacccugcccugaacgugaccaugcccaauaacgagaaguuugacaaacucuauauuuggggcguucaucacccugggacagauucugaccagaucucccuguacgcgcaggccagcggaagagugaccgucuccacgaagcggucucaacagacagugauuccgaacaucggcagccgccccugggugagaggggucuccagccggauuucuaucuacuggaccauuguuaaaccuggagauauccugcucaucaauuccacaggcaaccugauugcuccccgcggguauuucaagauccagagcggaaagucuagcauuaugagauccgacgccccuaucggcaaauguaauucugaaugcauuacccccaacggcagcaucccgaaugacaagccuuuucagaacgugaaucggaucaccuacggggcuuguccccgcuaugugaaacaaaacacacuuaagcuggccacgggaaugagaaaugucccugagaaacagacccggggcauuuucggggcgaucgccggauuuauugaaaacggcugggaggggaugauggauggaugguacggcuuccgccaccaaaauuccgagggcacagggcaggcugccgaccucaagagcacccaggcugccaucaaccagauuaauggaaaacugaacagacuuaucgaaaagacaaaugagaaguuucaucagaucgaaaaagaguucucugaaguggagggccggauucaagaucuggagaaguauguugaagacaccaaaaucgaucucugguccuacaacgccgagcugcugguggcucucgaaaaccagcacacgauugaccugacagauagcgagaugaauaaacuuuucgaaagaaccaagaagcagcugcgcgagaacgcggaggacauggggaauggaugcuuuaagaucuaucauaaaugugauaacgccugcauuggcucuauccggaaugggaccuacgaccacgaugucuacagagacgaagcucucaacaaucgcuuccagauuaagggcguggagcugaaauccggauauaaggacuggauccuuuggaucagcuuugccauuuccugcuuccugcucuguaucguucugcugggcuuuauuaugugggccugccaaaaagggaacauccgguguaauauuugcaucuga

SEQ ID NO: 200596 - RNA, 1701 nt, Artificial Sequence
  derived and/or modified CDS sequence (opt5) from hemagglutinin__InfluenzaA__AFG72845
augaagaccaucauugcccugagcuacauccucugccugguguucgcucagaaacuucccggcaacgacaauuccacagccacgcugugucucgggcaccaugcggucccuaacggaacccugguuaagacaauuaccaaugaucaaaucgaggugacaaacgcuaccgaacuugugcagucuagcuccacaucuagaauuugcgacagcccgcaccagauccuggauggcgagaauuguacccucaucgacgcccugcugggggauccccauugcgacggauuucagaacaaagaaugggaucucuucgucgagcgguccaaggccuauucuaauuguuacccuuaugacgugcccgauuacguuagccugcgcucccuuguggcuagcucuggcacgcuggaauuuaacaaugaguccuucaacuggaccggggucgcccaaaauggaacaagcucugcuugcaaaagacgguccgacaagagcuuuuucucucgccucaacuggcugcaccagcuuagauauaaguacccugcccugaaugugaccaugcccaacaaugagaaauuugauaagcucuauauuuggggcguucaucacccuggcacagacuccgaucagaucagccuguacgcgcaggccuccgggcgggugaccauuucuacgaaacgcagccaacagacagucaucccgaacauuggauccagacccugggugcggggcgugagcucucgcaucuccauucacuggaccaucgucaagccuggggacauccugcucauuaacagcacaggaaaucugaucgcucccagaggcuacuucaaaauucggucuggaaagagcuccaucaugcgcucugacgccccuauugggaaguguaacagcgaaugcaucacccccaauggcuccaucccgaacgauaaaccuuuucagaauguuaacagaauuaccuauggcgcuuguccccgguacgugaagcagaaaacacuuaagcuggccacggggaugcgcaaugugccugagaaacaaaccagaggaaucuucggcgcgauugccggguuuaucgaaaacggaugggagggcaugauggacgggugguauggauuccggcaucagaauagcgagggcacaggccaggcugccgaucucaagucuacccaagcugccauuaaccagaucaaugggaaacugaacagacuuaucgaaaagacaaaugagaaguuucaccagauugaaaaagaguucuccgaagucgagggacgcauccaggaccuggagaaguacguggaagauaccaaaauugaccucuggagcuauaacgccgagcugcugguugcucucgaaaaucaacauacgaucgaucugacagacucugagaugaacaaacuuuucgaacggaccaagaagcagcugagagagaacgcggaggauaugggcaaugggugcuuuaagauuuaccacaaaugugacaacgccugcaucggauccauucgcaauggcaccuaugaucacgacguguaccgggacgaagcucucaacaauagauuccagaucaagggggucgagcugaaaagcggcuacaaggauuggauccuuuggauuuccuuugccaucucuugcuuccugcucuguauugugcugcugggauuuaucaugugggccugccagaaaggcaacauucgcuguaauaucugcaucuga

SEQ ID NO: 200597 - RNA, 1701 nt, Artificial Sequence
  derived and/or modified CDS sequence (opt5) from hemagglutinin__InfluenzaA__AFG72856
augaagaccaucauugcccugagcuacauccucugccugguguucgcucagaaacuucccggcaacgacaauuccacagccacgcugugucucgggcaccaugcggucccuaacggaaccauuguuaagacaaucaccaaugaucaaauugaggugacaaacgcuaccgaacuggugcagucuagcuccacaggcgggaucugcgacucuccgcaccagauccuugauggagagaauuguacccugauugacgcccuccugggcgauccccagugcgacggguuucaaaacaaaaagugggaucuguucgucgaaagaagcaaagccuauuccaauuguuacccuuaugacgugcccgauuacgcuucucuccggagccugaucgccuccagcggaacgcuugaguuuaccaacgaaucuuucaauuggacaggcguuacccagaacggcacauccagcgcuugcaagcgcagaucuaauaaguccuuuuucagccggcugaacuggcucacccaucugaaauauaaguacccugcccuuaaugugacgaugcccaacaaugagaaauuugacaagcuguauauuuggggaguccaccauccugggacagauucugaccagaucucccucuacgcgcaggccagcggccgcauuaccguguccacaaaaagaucucaacagaccguuaucccgaacauugggagccggccccgcgugagagauaucuccagccggaucucuauuuacuggaccaucgucaagccuggagacauucugcugaucaacuccacaggcaaucucauugcuccccgcggguauuucaagaucagaagcggaaaaucuagcaucaugcgguccgacgccccuauuggcaaguguaacucugagugcaucacgcccaauggcagcauuccgaacgauaaaccuuuucagaaugugaaccgcaucaccuacggggcuugucccagauaugugaagcagaauacacugaaacuugccaccggaaugcggaacgucccugaaaagcaaacacgcggcauuuucggggcgaucgccggauuuaucgagaauggcugggaagggaugguugacggaugguacggcuucagacaccagaacuccgagggcaccgggcaggcugccgaucugaaaagcacgcaagcugccauuaaucagaucaacggaaagcucaauaagcugauuggcaaaacaaacgagaaguuucaccagaucgaaaaagaguucucugaaguggaggggcggauucaggaccuugaaaaguauguggaggauaccaaaaucgaccugugguccuacaaugccgagcuccuggucgcucuggaaaaccaacauaccauugaucucacagacagcgagaugaacaagcuguucgaaagaaccaagaaacagcuucgcgagaaugcggaagauaugggaaacggcugcuuuaagaucuaucacaaaugugacaaugccugcaucgggucuauucggaacggcacauacgaucaugacguguacagagacgaggcucugaauaaccgcuuccagaucaagggaguugagcucaaauccggcuauaaggauuggauucuguggaucagcuuugccauuuccugcuuccuucugugugugguccuccugggguuuaucaugugggccugccagaagggaaauauccgguguaacauuugcaucuga

SEQ ID NO: 200598 - RNA, 1701 nt, Artificial Sequence
  derived and/or modified CDS sequence (opt5) from hemagglutinin__InfluenzaA__AFG72867
augaagaccaucauugcccugagcuacauccucugccugguguucgcucagaaacuucccggcaacgacaauuccacagccacgcugugucucgggcaccaugcggucccuaacggaacccugguuaagacaauuaccaaugaucaaaucgaggugacaaacgcuaccgaacuugugcagucuagcuccacaggcagaauuugcgacucuccgcaccagauccuggauggggagaauuguacccucaucgacgcccugcugggagauccccauugcgacggcuuucagaacaaagaaugggaucucuucgucgagcggagcaaggccuauuccaauuguuacccuuaugacgugcccgauuacguuucucugcgcagccuuguggcuuccagcgggacgcuggaauuuaacaaugagucuuucaacuggaccggagucgcccaaaauggcacauccagcgcuugcaaaagacggucuaacaaguccuuuuucagccgccucaauuggcugcaccagcuuaagaacaaauauccugcccugaaugugaccaugcccaacaacgagaaguuugacaaacucuacauuuggggcguucaucacccugggacagauucugaccagaucucccuguaugcgcaggccagcggaagagugaccgucuccacgaagcggucucaacagacagugauuccgaauaucggcagccgccccagagugcgggauauuuccagccgcaucucuauuuacuggaccaucgucaaaccuggggacauccugcucauuaacuccacaggaaaucugaucgcucccagaggcuacuucaagauucggagcgggaagucuagcaucaugcgcuccgacgccccuauuggaaaauguaacucugaaugcaucacccccaauggcagcaucccgaacgauaagccuuuucagaauguuaacagaauuaccuauggcgcuuguccccgguacgugaaacagaauacacuuaagcuggccacggggaugcgcaacgugccugagaaacaaaccagaggaaucuucggcgcgauugccggguuuaucgaaaauggaugggagggcaugauggacgggugguauggauuccggcaccagaacuccgagggcacaggccaggcugccgaucucaagagcacccaagcugccauuaaucagaucaacgggaaacugaauagacuuaucgaaaagacaaacgagaaguuucaucagauugaaaaagaguucucugaagucgagggacgcauccaggaccuggagaaguacguggaagauaccaaaauugaccucugguccuauaacgccgagcugcugguugcucucgaaaaucaacacacgaucgaucugacagacagcgagaugaacaaacuuuucgaacggaccaagaagcagcugagagagaaugcggaggauaugggcaacgggugcuuuaagauuuaccauaaaugugacaaugccugcaucggaucuauucgcaacggcaccuaugaucacgacguguaccgggacgaagcucucaauaacagauuccagaucaagggggucgagcugaaauccggcuacaaggauuggauccuuuggauuagcuuugccaucuccugcuuccugcucuguauugugcugcugggauuuaucaugugggccugccagaaaggcaauauucgcuguaacaucugcaucuga

SEQ ID NO: 200599 - RNA, 1701 nt, Artificial Sequence
  derived and/or modified CDS sequence (opt5) from hemagglutinin__InfluenzaA__AFG72922
augaagaccaucauugcccugagcuacauccucugccugguguucgcucagaaacuucccggcgacgauaacuccacagccacgcugugucucgggcaccaugcggucccuaauggaaccauuguuaagacaaucaccaacgaccaaauugaggugacaaaugcuaccgaacuggugcagucuagcuccacaggcgagaucugcgauucuccgcaccagauccuugacggggaaaacuguacccugauugaugcccuccugggagacccccagugcgauggcuuucaaaauaaaaagugggaccuguucgucgagagaagcaaagccuauuccaacuguuacccuuaugaugugcccgacuacgcuucucuccggagccugguugccuccagcgggacgcuugaauuuaauaacgagucuuucaauuggaccggagugacacagaacggcaccuccagcucuugcauccgcaaguccaauaacagcuuuuucucuagacugaauuggcucacacaucugaaguuuaaauauccugcucuuaacgucaccaugcccaauaacgagcaguucgauaagcuguacauuuggggcgugcaccauccugggacggacaacgaucagaucuuucucuaugcccaagcguccggacggauuacaguuagcaccaaacgcucccagcagacagugaucccgaauauuggcucuagaccccggguccgcaacaucccuagcagaaucuccauuuacuggaccaucgugaagcccggggacauucugcugaucaauagcaccggaaaccucauugccccucggggcuacuucaaaauccgcucugggaaguccagcaucaugagaucugacgcucccauuggaaaguguaauagcgaaugcaucacaccgaacggcuccauuccuaaugauaaacccuuucagaacgugaaucggaucacguauggcgccuguccucgcuacgucaagcaaaacacccugaaacuugcuacagggaugagaaauguucccgagaagcagacccggggaauuuucggcgccaucgcgggguuuaucgaaaacggaugggagggcaugguggacgggugguauggauuccgccaccaaaauucugagggcagaggccaggccgcugaucugaaaagcacacaggccgcuauugaccagaucaacgggaagcucaaucggcugauuggaaaaaccaacgaaaaguuccaccagaucgagaaggaauuuuccgagguggaaggccgcauucaagaucuugagaaauacgucgaggacacgaagaucgaucuguggagcuauaacgccgaacuccugguggcccuggagaaucagcauacaauugaccucaccgauucugaaaugaacaaacuguucgagaagaccaaaaagcagcuuagagaaaaugcugaggacauggggaacggaugcuuuaagaucuaccacaaaugugauaaugcgugcaucggcuccauucggaacgggacauaugaccaugacguuuacagagaugaggcccugaauaaccgcuuccagaucaagggcguggaacucaaaagcggauacaaggacuggauucuguggaucucuuuugcuauuuccugcuuccuucugugugucgcccuccugggcuuuaucaugugggccugccaaaaagggaauauccgguguaacauuugcaucuga

SEQ ID NO: 200600 - RNA, 1701 nt, Artificial Sequence
  derived and/or modified CDS sequence (opt5) from hemagglutinin__InfluenzaA__AFG72933
augaagaccaucauugcccugagcuacauccucugccugguguucgcucagaaacuucccggcaacgacaauuccacagccacgcugugucucgggcaccaugcggucccuaacggaaccauuguuaagacaaucaccaaugaucaaauugaggugacaaacgcuaccgaacuggugcagucuagcuccacaggcgagaucugcgacucuccgcaccagauccuugauggggaaaauuguacccugauugacgcccuccugggagauccccagugcgacggcuuucaaaacaaaaagugggaucuguucgucgagagaagcaaagccuauuccaauuguuacccuuaugacgugcccgauuacgcuucucuccggagccugguugccuccagcgggacgcuugaauuuaacaaugagucuuucaacuggaccggagugacacagaauggcaccuccagcgcuugcguccgcagaucuaacaauuccuuuuucagccggcugaacuggcucacacaucugaaguuuaaguauccugcccuuaaugugaccaugcccaacaacgagcaguucgacaaacuguacaucuggggcguucaccauccugggacggauaaugaccagauuuuucucuaugcgcaagccucuggacgcaucacaguguccaccaagagaagccagcagacagucauuccgaacaucggcucccggccccgcgugagaaauauuccuucucggaucagcaucuacuggaccauugugaaacccggggauauccugcugauuaacuccaccggaaaucucaucgcuccucgcggcuacuucaagauuagaagcgggaaaucuuccaucaugcggagcgacgcccccaucggaaaguguaacucugaaugcauuacaccgaauggcagcaucccuaacgacaagcccuuucagaaugucaaccgcauuacguauggcgcuuguccuagauacguuaaacaaaauacccugaaacuugccacagggaugcggaacgugcccgagaagcagacccgcggaaucuucggcgcgauugccggguuuaucgaaaauggaugggagggcaugguggaugggugguauggauucagacaccagaacuccgagggccggggccaagcugccgaccugaagucuacacaggcugccaucgaucagauuaaugggaaacucaacagacugaucggaaagaccaacgaaaaauuccaccagauugagaaggaauuuagcgaggucgaaggccgcauccaagaccuugagaaguacguggaggauacgaaaauugaccugugguccuauaaugccgaacuccugguugcucuggagaaccagcauacaaucgaucucaccgacagcgaaaugaauaagcuguucgagaaaaccaagaaacagcuucgggaaaacgcggaggauauggggaauggaugcuuuaagauuuaccacaagugugacaacgccugcaucggcucuaucagaaaugggacauaugaucaugacguguaccgcgacgaggcucugaacaaucgguuccagauuaaaggcgucgaacucaaguccggauacaaagauuggauccuguggauuagcuuugccaucucuugcuuccuucuguguguggcccuccugggcuuuauuaugugggcuugccaaaaggggaacaucagauguaauaucugcauuuga

SEQ ID NO: 200601 - RNA, 1701 nt, Artificial Sequence
  derived and/or modified CDS sequence (opt5) from hemagglutinin__InfluenzaA__AFG72955
augaagaccaucauugcccugagcuacauccucugccugguguucgcucagaaacuucccggcaacgacaauuccacagccacgcugugucucgggcaccaugcggucccuaacggaaccauuguuaagacaaucaccaaugaucaaauugaggugacaaacgcuaccgaacuggugcagucuagcuccacaggcgagaucugcgacucuccgcaccagauccuugauggggaaaauuguacccugauugacgcccuccugggagauccccagugcgacggcuuucaaaacaaaaagugggaucuguucgucgagagaagcaaagccuauuccaauuguuacccuuaugacgugcccgauuacgcuucucuccggagccugaucgccuccagcgggacgcuugaauuuaacaaugagucuuucaacuggaccggaguuacacagaauggcaccuccagcgcuugcauucgcagaucuaacaauuccuuuuucagccggcugaacuggcucacacaucugcgcuuuaaguauccugcccuuaaugugaccaugcccaacaacgagcaguucgacaagcuguacaucuggggcguccaccauccugggacggauaaugaccagauuuuucucuaugcgcaagccucuggaagaaucacaguguccaccaaacggagccagcagacaguuauuccgaacaucggcucccgccccagagugcggaauaucccuucucgcauuagcaucuacuggaccauugucaagcccggggauauccugcugauuaacuccaccggaaaucucaucgcuccuagaggcuacuucaaaauccggagcgggaagucuuccauuaugcgcagcgacgcccccaucggaaaauguaacucugaaugcauuacaccgaauggcagcaucccuaacgacaagcccuuucagaaugugaacagaauuacguauggcgcuuguccucgguacgugaagcaaaauacccugaaacuugccacagggaugcgcaacguccccgagaagcagaccagaggaaucuucggcgcgaucgccggguuuauugaaaauggaugggagggcaugguugaugggugguauggauuccggcaccagaacuccgagggcagaggccaagcugccgaccugaaaucuacacaggcugccaucgaucagauuaaugggaagcucaaccgccugaucggaaaaaccaacgaaaaguuccaccagauugagaaagaauuuagcgagguggaaggccggauccaagaccuugagaaguacguggaggauacgaagauugaccugugguccuauaaugccgaacuccuggucgcucuggagaaccagcauacaaucgaucucaccgacagcgaaaugaauaaacuguucgagaagaccaaaaagcagcuuagagaaaacgcggaggauauggggaauggaugcuuuaaaaucuaccacaagugugacaacgccugcauuggcucuauccgcaaugggacauaugaucaugacguguaccgggacgaggcucugaacaauagauuccagauuaagggcguugaacucaaauccggauacaaggauuggauccuguggauuagcuuugccaucucuugcuuccuucuguguguggcccuccugggcuuuaucaugugggcuugccaaaaagggaacauucgcuguaauaucugcauuuga

SEQ ID NO: 200602 - RNA, 1701 nt, Artificial Sequence; identical to SEQ ID NO: 193712
  derived and/or modified CDS sequence (opt5) from hemagglutinin__InfluenzaA__AFG98808

SEQ ID NO: 200603 - RNA, 1701 nt, Artificial Sequence; identical to SEQ ID NO: 193712
  derived and/or modified CDS sequence (opt5) from hemagglutinin__InfluenzaA__AFG98819

SEQ ID NO: 200604 - RNA, 1701 nt, Artificial Sequence
  derived and/or modified CDS sequence (opt5) from hemagglutinin__InfluenzaA__AFG98830
augaagaccaucauugcccugagcuacaucuucugccucgugcugggccaggaccuucccgggaacgauaaauccacagcuacgcugugucucggacaccaugccgucccuaauggcacccugguuaagacaauuaccaacgaccaaaucgaggugacaaaugcgaccgaacuugugcagucuagcuccacagggaaaauuugcaacaauccgcacagaauccuggauggaaucgacuguacccucauugaugcucugcugggcgacccccauugcgauggguuucagaacgagacgugggaccucuucgucgaacggucuaaggccuuuagcaauuguuauccuuacgaugugcccgacuaugccucccugcgcucucuuguugcuagcuccggaacccuggaguucaucacagaaggcuuuaccuggacaggcgugacccagaacgggggaagcucugccugcaaaagaggcccuggguccggauucuuuagccggcucaauuggcugacgaagucuggcuccacauaccccguccuuaacgugaccaugccuaauaacgauaauuucgacaagcuguauauuuggggaguucaccauccgagcacaaaccaagagcagaccucucucuacgugcaggcuuccgggcgcgucaccgugagcacaagacggucccagcaaacgaucauucccaauaucggcucucgcccuugggugagaggccugagcucccggauuagcaucuauuggaccaucgucaaacccggggauauucugaucauuaacucuaacggaaaucucaucgccccucgcggcuacuuuaagaugagaacagggaaauccagcauuaugcggucugacgcgcccaucgacaccuguaucagcgagugcauuacaccgaacggauccaucccuaaugauaagcccuuccagaacguuaauaaaauuaccuacggcgccuguccuaaguaugugaagcagaacacgcugaaacuugcuacagggaugcgcaaugugcccgaaaagcagaccagaggacuguuuggcgccaucgcuggcuucauugagaacgggugggaaggaaugaucgacggcugguacggguuucggcaccaaaauucugagggaaccggccaggccgcggaucucaaaagcacacaggccgcuaucgaccaaauuaacgggaagcugaaucgcgucaucgagaaaaccaacgaaaaguuccaccagauugagaaagaguucuccgaaguggaaggcagaauccaggaucuugagaaguauguugaggacacaaagauugaucuguggagcuacaaugccgaacuccugguggcucuggagaaccagcauacgaucgaccucaccgauucugaaaugaauaaacuguuugagaagacacggagacaacuucgcgaaaacgccgaggacaugggaaacggcugcuucaaaauuuaucacaagugugauaaugccugcaucggguccauccggaacggaaccuacgaccaugacgucuauagagaugaggcucugaauaaccgcuuucagauuaaaggcguggaacucaagagcggguacaaggacuggauccuguggauuucuuucgcgaucuccugcuuucuucuguguguugugcuccugggauucauuaugugggccugccagaaaggcaauauccgguguaacaucugcauuuga

SEQ ID NO: 200605 - RNA, 1701 nt, Artificial Sequence
  derived and/or modified CDS sequence (opt5) from hemagglutinin__InfluenzaA__AFG98841
augaagaccaucauugcccugagcuacaucuucugccucgugcugggccaggaccuucccgggaacgauaaauccacagcuacgcugugucucggacaccaugccgucccuaauggcacccugguuaagacaauuaccaacgaccaaaucgaggugacaaaugcgaccgaacuugugcagucuagcuccacagggaaaauuugcaacaauccgcacagaauccuggauggaaucgacuguacccucauugaugcucugcugggcgacccccauugcgauggguuucagaacgagacgugggaccucuucgucgaacggucuaaggccuuuagcaauuguuauccuuacgaugugcccgacuaugccucccugcgcucucuuguugcuagcuccggaacccuggaguucaucacagaaggcuuuaccuggacaggcgugacccagaacgggggaagcaaugccugcaaaagaggcccugggucuggauucuuuucccggcucaacuggcugacaaagagcggcucuacguaccccguccuuaaugugaccaugccuaacaaugauaacuucgacaagcuguauauuuggggaguucaccauccguccacaaaucaagagcagaccagccucuacgugcaggcuucugggcgcgucaccguguccacaagacggagccagcaaacgaucauucccaacaucggcucccgcccuugggugagaggccugucuagccggauuuccaucuauuggaccaucgucaaacccggggauauucugaucauuaacagcaauggaaaccucaucgccccucgcggcuacuuuaagaugagaacagggaaaucuuccauuaugcggagcgacgcgcccaucggaaccuguaucucugagugcauuacaccgaauggcagcaucccuaacgacaagcccuuccagaauguuaacaaaauuaccuacggggccuguccuaaguaugugaagcagaauacgcugaaacuugcuacaggaaugcgcaacgugcccgaaaagcagaccagaggccuguuuggcgccaucgcuggguucauugagaauggaugggaaggcaugaucgaugggugguacggauuucggcaccaaaacuccgagggcaccgggcaggccgcggaccucaaaucuacacaggccgcuaucgaucaaauuaauggcaagcugaaccgcgucaucgagaaaaccaaugaaaaguuccaccagauugagaaagaguucagcgaaguggaaggaagaauccaggaccuugagaaguauguugaggauacaaagauugaccugugguccuacaacgccgaacuccugguggcucuggagaaucagcauacgaucgaucucaccgacagcgaaaugaacaaacuguuugagaagacacggagacaacuucgcgaaaacgccgaggauaugggcaaugggugcuucaaaauuuaucacaagugugacaacgccugcaucggaucuauccggaauggcaccuacgaucaugacgucuauagagacgaggcucugaacaaucgcuuucagauuaaagggguggaacucaaguccggauacaaggauuggauccuguggauuagcuucgcgaucucuugcuuucuucuguguguugugcuccugggcuucauuaugugggccugccagaaagggaacauccgguguaauaucugcauuuga

SEQ ID NO: 200606 - RNA, 1701 nt, Artificial Sequence; identical to SEQ ID NO: 192377
  derived and/or modified CDS sequence (opt5) from hemagglutinin__InfluenzaA__AFG98852

SEQ ID NO: 200607 - RNA, 1701 nt, Artificial Sequence
  derived and/or modified CDS sequence (opt5) from hemagglutinin__InfluenzaA__AFG98863
augaagaccaucauugcccugagcuacaucuucugccucgugcugggccaggaccuucccgggaacgauaauuccacagcuacgcugugucucggacaccaugccgucccuaacggcacccugguuaaaacaauuaccaaugaccaaaucgaggugacaaacgcgaccgaacuugugcagucuagcuccacagggaagauuugcaauaacccgcacagaauccuggauggaaucgacuguacccucauugaugcucugcugggcgacccccauugcgauggguuucagaaugagacgugggaccucuucgucgaacggucuaaagccuuuagcaacuguuauccuuacgaugugcccgacuaugccucccugcgcucucuuguugcuagcuccggaacccuggaguucaucaaugaaggcuuuacauggaccggcgugacacagaacgggggaagcucugccugcaagagaggcccugauuccggguucuuuagccggcucaauuggcuguacaaaucuggauccaccuaucccguccuuaacgugacgaugccuaauaacgacaauuucgauaagcuguacauuuggggcguucaccauccgagcacaaaccaagagcagaccucucucuaugugcaggcuuccgggcgcgucacagugagcaccaagagaucccagcaaaccaucauucccaacaucggaucucggccuugggugcgcggccugagcuccagaauuagcaucuacuggacaaucgucaaacccggcgacauucugguuaucaauucuaacgggaaucucauugccccucggggauacuuuaagaugcgcacgggcaaauccagcaucaugagaucugacgcgcccauugggaccuguaucagcgagugcaucacaccgaacggauccauuccuaaugauaagcccuuccagaacgugaauaaaaucaccuauggcgccuguccuaaguacgugaagcagaacacacugaaacuugcuaccgggaugcggaauguccccgaaaagcagacgcgcggacuguuuggcgccauugcuggcuucaucgagaacgggugggaaggaaugauugacggcugguauggguuuagacaccaaaauucugagggaacaggccaggccgcggaucucaaaagcacccaggccgcuaucgaccaaaucaacgggaagcugaaucgggugauugagaaaaccaacgaaaaguuccaccagaucgagaaagaguucuccgaaguugaaggccgcauucaggaucuugagaaguacguggaggacacaaagaucgaucuguggagcuauaaugccgaacuccuggucgcucuggagaaccagcauaccauugaccucacagauucugaaaugaacaaacuguuugagaagacgagacggcaacuuagagaaaaugccgaggacaugggaaacggcugcuuccgcaucuaccacaaaugugauaaugccugcauuggguccauccggaacggaaccuaugaccaugacguguacagagaugaggcucugaauaaccgcuuucagaucaagggcguugaacucaaaagcggguacaaggacuggauucuguggaucucuuucgcgauuuccugcuuucuucugugugugguccuccugggauucaucaugugggccugccagaagggcaauauucgguguaacaucugcaucuga

SEQ ID NO: 200608 - RNA, 1701 nt, Artificial Sequence
  derived and/or modified CDS sequence (opt5) from hemagglutinin__InfluenzaA__AFG98874
augaagaccaucauugcccugagcuacaucuucugccucgugcugggccaggacuuucccgggaacgauaauuccacagcuacgcuuugucugggacaccaugccgucccuaacggcacccucguuaaaacaauuaccaaugaccaaaucgaggugacaaacgcgaccgaacuggugcagucuagcuccacagggaagauuugcaauaacccgcacagaauccuugauggaaucgacuguacccugauugaugcucuccugggcgacccccauugcgauggguuccagaaugagacgugggaccuguuugucgaacggucuaaagccuucagcaacuguuauccuuacgaugugcccgacuaugccucccuccgcucucugguugcuagcuccggaacccuugaguuuaucaaugaaggcuucacauggaccggcgugacacagaacgggggaagcaaugccugcaagagaggcccugauaacggguuuuucucucggcugaauuggcucuacaaauccggaagcaccuaucccguccugaacgugacgaugccuaauaacgacaacuuugauaaacuuuacauuuggggcguucaccauccgucuacagaccaagagcagaccucccuguaugugcaggcuagcgggcgcgucacagugucuaccaagagaucccagcaaaccaucauucccaauaucggaagccggccuugggugcgcggccucuccucuagaauuagcaucuacuggacaaucgucaagcccggcgacauucugguuaucaacuccaaugggaaccugauugccccucggggauacuucaagaugcgcacgggcaaaagcucuaucaugagauccgaugcgcccauugggaccuguaucagcgagugcaucacaccgaauggaucuauuccuaacgacaagcccuuucagaaugugaacaaaaucaccuauggcgccuguccuaaguacgugaagcagaauacacucaaacuggcuaccgggaugcggaacguccccgaaaagcagacgcgcggacuuuucggcgccauugcuggcuuuaucgagaaugggugggaaggaaugauugauggcugguauggguucagacaccaaaacagcgagggaacaggccaggccgcggaccugaaauccacccaggccgcuaucgaucaaaucaaugggaagcucaaccgggugauugagaaaaccaaugaaaaguuccaccagaucgagaaagaauuuucugagguugaaggccgcauucaggaccuggagaaguacguggaggauacaaagaucgaccuuuggagcuauaacgccgaacugcucgucgcucuggagaaccagcauaccauugaucugacagacuccgaaaugaauaaacucuucgagaagacgagacggcaacugagagaaaacgccgaggauaugggaaauggcugcuuuaaaaucuaccacaagugugacaacgccugcauugggagcauccgcaauggaaccuaugaccaugauguguaccgggacgaggcucuuaacaauagauuccagaucaaaggcguugaacugaagucuggguacaaggauuggauucucuggaucuccuuugcgauuagcugcuuccugcuuugugugguccugcucggauuuaucaugugggccugccagaaaggcaacauucgcuguaauaucugcaucuga

SEQ ID NO: 200609 - RNA, 1701 nt, Artificial Sequence
  derived and/or modified CDS sequence (opt5) from hemagglutinin__InfluenzaA__AFG98885
augaagaccaucauugcccugagcuacaucuucugccucgugcugggccaggacuuucccgggaacgauaauuccacagcuacgcuuugucugggacaccaugccgucccuaacggcacccucguuaaaacaauuaccaaugaccaaaucgaggugacaaacgcgaccgaacuggugcagucuagcuccacagggaagauuugcaauaacccgcacagaauccuugauggaaucgacuguacccugauugaugcucuccugggcgacccccauugcgauggguuccagaaugagacgugggaccuguuugucgaacggucuaaagccuucagcaacuguuauccuuacgaugugcccgacuaugccucccuccgcucucugguugcuagcuccggaacccuugaguuuaucaaugaaggcuucacauggaccggcgugacacagaacgggggaagcaaugccugcaagagaggcaccgauucuggguuuuucucccggcugaacuggcucuacaaaagcggaucuacguauccuguccugaaugugacaaugcccaacaaugacaacuuugauaaacuuuacauuuggggcguucaccauccuuccaccgaccaagagcagacaagccuguaugugcaggcuucugggcgcgucaccguguccaccaagagaagccagcaaacaaucauuccgaacaucggaucccggcccugggugcgcggccucucuagcagaauuuccaucuacuggacgaucgucaagccuggcgacauucugguuaucaauagcaacgggaaucugauugcgccccggggauacuucaagaugcgcaccggcaaaucuuccaucaugagaagcgaugccccuauugggacauguaucucugagugcaucacccccaacggaagcauuccgaaugacaagccuuuucagaacgugaauaaaaucacauauggcgccugucccaaguacgugaagcagaacacccucaaacuggcuacggggaugcggaaugucccugaaaagcagacacgcggacuuuucggcgccauugcuggcuuuaucgagaacgggugggaaggaaugauugauggcugguauggguucagacaccaaaauuccgagggaaccggccaggccgcggaccugaaaucuacccaggccgcuaucgaucaaaucaacgggaagcucaaucgggugauugagaaaacaaacgaaaaguuccaccagaucgagaaagaauuuagcgagguugaaggccgcauucaggaccuggagaaguacguggaggauaccaagaucgaccuuugguccuauaaugccgaacugcucgucgcucuggagaaccagcauacaauugaucugacggacagcgaaaugaacaaacucuucgagaagaccagacggcaacugagagaaaaugccgaggauaugggaaacggcugcuuuaaaaucuaccacaagugugacaaugccugcauugggucuauccgcaacggaacauaugaccaugauguguaccgggacgaggcucuuaauaacagauuccagaucaaaggcguugaacugaaguccggguacaaggauuggauucucuggaucagcuuugcgauuucuugcuuccugcuuugugugguccugcucggauuuaucaugugggccugccagaaaggcaauauucgcuguaacaucugcaucuga

SEQ ID NO: 200610 - RNA, 1701 nt, Artificial Sequence
  derived and/or modified CDS sequence (opt5) from hemagglutinin__InfluenzaA__AFG98896
augaagaccaucauugcccugagcuacaucuucugccucgugcugggccaggacuuucccgggaacgauaauuccacagcuacgcuuugucugggacaccaugccgucccuaacggcacccucguuaaaacaauuaccaaugaccaaaucgaggugacaaacgcgaccgaacuggugcagucuagcuccacagggaagauuugcaauaacccgcacagaauccuugauggaaucaauuguacccugauugacgcucuccugggcgauccccauugcgacggguuccagaacgagacgugggaucuguuugucgaacggucuaaagccuucagcaauuguuauccuuacgacgugcccgauuaugccucccuccgcucucugguugcuagcuccggaacccuugaguuuaucaacgaaggcuucacauggaccggcgugacacagaaugggggaagcaacgccugcaagagaggcccugacucuggguuuuucucccggcugaauuggcucuacaaaagcggaucugcuuaucccguccugaacgugaccaugccuaauaacgauaacuuugacaaacuuuacauuuggggcguucaccauccguccacggaucaagagcagacaaaucuguaugugcagaccagcgggcgcgucacagugucuaccaagagaucccagcaaaccaucauucccaacaucggaagccggccuugggugcgcggccucuccucuagaauuagcaucuacuggacaaucgucaagcccggcgacauucugguuaucaauuccaacgggaaucugauugccccucggggauacuucaagaugcgcacgggcaaaagcucuaucaugagauccgacgcgcccauugggaccuguaucagcgagugcaucacaccgaacggaucuauuccuaaugauaagcccuuucagaacgugaauaaaaucaccuauggcgccuguccuaaguacgugaagcagaacacacucaaacuggcuaccgggaugcggaauguccccgaaaagcagacgcgcggaauuuucggcgccaucgcuggcuuuauugagaacgggugggaaggaaugaucgacggcugguauggguucagacaccaaaauagcgagggaacaggccaggccgcggaucuuaaauccacccaggccgcuaucgaccaaauuaacgggaagcugaaucgggugaucgagaaaaccaacgaaaaguuccaccagauugagaaagaauuuucugagguugaaggccgcauccaggaucucgagaaguacguggaggacacaaagauugaucuguggagcuauaacgccgaacuucuggucgcucucgagaaucagcauaccaucgaccugacagauuccgaaaugaacaaacuguucgagaagacgagacggcaacucagagaaaaugccgaggacaugggaaacggcugcuuuaaaauuuaccacaagugugauaaugccugcaucgggagcauccgcaacggaaccuaugaccaugacguguaccgggaugaggcucugaauaacagauuccagauuaaaggcguugaacuuaagucuggguacaaggacuggauccuguggauuuccuuugcgaucagcugcuuccuccugugugugguccuucugggauuuauuaugugggccugccagaaaggcaauauccgcuguaacaucugcauuuga

SEQ ID NO: 200611 - RNA, 1701 nt, Artificial Sequence
  derived and/or modified CDS sequence (opt5) from hemagglutinin__InfluenzaA__AFG98907
augaagaccaucauugcccugagcuacaucuucugccucgugcugggccaggaccuucccgggaacgauaauuccacagcuacgcugugucucggacaccaugccgucccuaacggcacccugguuaaaacaauuaccaaugaccaaaucgaggugacaaacgcgaccgaacuugugcagucuagcuccacagggaagauuugcaauaacccgcacagaauccuggauggaaucaauuguacccucauugacgcucugcugggcgauccccauugcgacggguuucagaacgagaaaugggaucucuucgucgaacggucuaaggccuuuagcaauuguuauccuuacgacgugcccgauuaugccucccugcgcucucuuguugcuagcuccggaacgcuggaguucaucaacgaaggcuuuaauuggaccggcgugacacagaacgggggaagcaaugccugcaaaagaggcccugacuguggguucuuuucucggcucaacuggcuguacaaguccggaagcaccuaucccguccuuaaugugacaaugccuaacaacgauaauuucgacaagcuguacauuuggggcguucaccauccgucuaccgaucaagagcagacgaaccucuaugugcaggcuuccgggcgcgucacagugagcaccaaaagaucucagcaaacaaucauucccaauaucggaucccggccuugggugcgcggccugagcuccagaauuucuaucuacuggaccaucgucaagcccggcgacauucugguuaucaacagcaaugggaaccucauugccccucggggauacuuuaaaaugcgcaccggcaaguccagcaucaugagaucugacgcgcccauugggacaugcaucuccgaguguaucacgccgaauggaagcauuccuaacgauaaacccuuccagaaugugaacaagaucaccuauggcgccugcccuaaguacgugaaacagaauacacugaagcuggcuaccgggaugcggaacguccccgaaaaacagacacgcggaauuuuuggcgccaucgcuggcuucauugagaaugggugggaaggaaugaucgacggcugguauggguuuagacaccaaaacucugagggaaccggccaggccgcggaucuuaagagcacgcaggccgcuaucgaccaaauuaaugggaaacucaaccgggugaucgagaagacaaacgaaaaauuccaccagauugagaaggaguucuccgaaguugaaggccgcauccaggaucuggagaaguacguggaggacaccaaaauugaucuuuggucuuauaaugccgaacugcucgucgcucuggagaaccagcauaccaucgaccugacagauagcgaaaugaauaagcucuuugagaaaaccagacggcaacugagagaaaacgccgaggacaugggaaauggcuguuucaagauuuaccacaaaugcgauaacgccugcaucggguccauccgcaauggaacauauaaccaugacguguaccgggacgaggcucuuaauaacagauuucagauuaagggcguugaacucaagagcggguacaaagauuggauccuguggauuucuuucgcgaucuccuguuuucugcuuugcgugguccugcucggauucauuaugugggccugucagaagggcaauauccgcugcaacaucuguauuuga

SEQ ID NO: 200612 - RNA, 1701 nt, Artificial Sequence
  derived and/or modified CDS sequence (opt5) from hemagglutinin__InfluenzaA__AFG98918
augaagaccaucauugcccugagcuacaucuucugccucgugcugggccaggaccuucccgggaacgauaauuccacagcuacgcugugucucggacaccaugccgucccuaacggcacccugguuaaaacaauuaccaaugaccaaaucgaggugacaaacgcgaccgaacuugugcagucuagcuccacagggaagauuugcaauaacccgcacagaauccuggauggaaucaauuguacccucauugacgcucugcugggcgauccccauugcgacggguuucagaacgagaaaugggaucucuucgucgaacggucuaaggccuuuagcaauuguuauccuuacgacgugcccgauuaugccucccugcgcucucuuguugcuagcuccggaacgcuggaguucaucaacgaaggcuuuaauuggaccggcgugacacagaacgggggaagcaaugccugcaaaagaggcccugaccggggguucuuuucucgccucaacuggcuguacaaguccggaagcaccuaucccguccuuaaugugacaaugccuaacaacgauaauuucgacaagcuguacauuuggggcguucaccauccgucuaccgaucaagagcagacgaaccucuaugugcaggcuuccgggagagucacagugagcaccaaacggucucagcaaacaaucauucccaauaucggaucccgcccuugggugagaggccugagcucccggauuucuaucuacuggaccaucgucaagcccggcgacauucugguuaucaacagcaaugggaaccucauugccccucgcggauacuuuaaaaugagaaccggcaaguccagcaucaugcggucugacgcgcccauugggacauguaucuccgagugcaucacgccgaauggaagcauuccuaacgauaaacccuuccagaaugugaacaagaucaccuauggcgccuguccuaaguacgugaaacagaauacacugaagcuggcuaccgggaugcgcaacguccccgaaaaacagacaagaggaauuuuuggcgccaucgcuggcuucauugagaaugggugggaaggaaugaucgacggcugguauggguuucggcaccaaaacucugagggaaccggccaggccgcggaucuuaagagcacgcaggccgcuaucgaccaaauuaaugggaaacucaaccgcgugaucgagaagacaaacgaaaaauuccaccagauugagaaggaguucuccgaaguugaaggcagaauccaggaucuggagaaguacguggaggacaccaaaauugaucuuuggucuuauaaugccgaacugcucgucgcucuggagaaccagcauaccaucgaccugacagauagcgaaaugaauaagcucuuugagaaaacccggagacaacugcgcgaaaacgccgaggacaugggaaauggcugcuucaagauuuaccacaaaugugauaacgccugcaucggguccauccggaauggaacauauaaccaugacguguacagagacgaggcucuuaauaaccgcuuucagauuaagggcguugaacucaagagcggguacaaagauuggauccuguggauuucuuucgcgaucuccugcuuucugcuuugugugguccugcucggauucauuaugugggccugccagaagggcaauauccgguguaacaucugcauuuga

SEQ ID NO: 200613 - RNA, 1701 nt, Artificial Sequence
  derived and/or modified CDS sequence (opt5) from hemagglutinin__InfluenzaA__AFG98929
augaagaccgugaucgcccugagcuacauuuucugccucguccugggccaggaccuucccgggaacgauaauuccacagcuacgcugugucucggacaccaugccguuccuaacggcacccuggugaaaacaaucaccaaugaccaaauugaggugacaaacgcgaccgaacuuguccagucuagcuccacagggaagaucugcaauaacccgcaccggauucuggauggaaucaauuguacccucaucgacgcucugcugggcgauccccauugcgacggguuucagaacgagaaaugggaucucuucguggaaagaucuaaggccuuuagcaauuguuauccuuacgacguucccgauuaugccucccugcgcucucuuguggcuagcuccggaacgcuggaguucauuaacgaaggcuuuaauuggaccggcgucacacagaacgggggaagcaaugccugcaaaagaggcccugacaucggguucuuuucucggcucaacuggcuguacaaguccggaagcaccuaucccgugcuuaauguuacaaugccuaacaacgauaauuucgacaagcuguacauuuggggcgugcaccauccgucuaccgaucaagagcagacgaaccucuauguccaggcuuccgggcgcgugacagugagcaccaaaagaucucagcaaacaaucauucccaauaucggaucccggccuuggguccgcggccugagcuccagaauuucuaucuacuggaccaucguuaagcccggcgacauucuggugaucaacagcaaugggaaccucauugccccucggggauacuuuaaaaugcgcaccggcaaguccagcaucaugagaucugacgcgcccauugggacauguaucuccgagugcaucacgccgaauggaagcauuccuaacgauaaacccuuccagaaugugaacaagaucaccuauggcgccuguccuaaguacgucaaacagaauacacugaagcuggcuaccgggaugcggaacgugcccgaaaaacagacacgcggaauuuuuggcgccaucgcuggcuucauugagaaugggugggaaggaaugaucgacggcugguauggguuuagacaccaaaacucugagggaaccggccaggccgcggaucuuaagagcacgcaggccgcuaucgaccaaauuaaugggaaacucaaccggguuaucgagaagacaaacgaaaaauuccaccagauugagaaggaguucuccgaaguggaaggccgcauccaggaucuggagaaguacgucgaggacaccaaaauugaucuuuggucuuauaaugccgaacugcucguggcucuggagaaccagcauaccaucgaccugacagauagcgaaaugaauaagcucuuugagaaaaccagacggcaacugagagaaaacgccgaggacaugggaaauggcugcuucaagauuuaccacaaaugugauaacgccugcaucggguccauccgcaauggaacauauaaccaugacguuuaccgggacgaggcucuuaauaacagauuucagauuaagggcguggaacucaagagcggguacaaagauuggauccuguggauuucuuucgcgaucuccugcuuucugcuuugugucgugcugcucggauucauuaugugggccugccagaagggcaauauccgcuguaacaucugcauuuga

SEQ ID NO: 200614 - RNA, 1701 nt, Artificial Sequence
  derived and/or modified CDS sequence (opt5) from hemagglutinin__InfluenzaA__AFG98940
augaagaccaucauugcccugagcuacaucuucugccucgugcugggccaggaccuucccgggaacgauaauuccacagcuacgcugugucucggacaccaugccgucccuaacggcacccugguuaaaacaauuaccaaugaccaaaucgaggugacaaacgcgaccgaacuugugcagucuagcuccacagggaagauuugcaauaacccgcacagaauccuggauggaaucaauuguacccucauugacgcucugcugggcgauccccauugcgacggguuucagaacgagaaaugggaucucuucgucgaacggucuaaggccuuuagcaauuguuauccuuacgacgugcccgauuaugccucccugcgcucucuuguugcuagcuccggaacgcuggaguucaucaacgaaggcuuuaauuggaccggcgugacacagaacgggggaagcaaugccugcaaaagaggcccugacucuggguucuuuucccggcucaacuggcuguacaagagcggaucuaccuaucccguccuuaaugugacaaugccuaacaaggauaacuucgacaaacuguacauuuggggcguucaccauccguccaccgaucaagagcagacgaaucucuaugugcaggcuagcgggcgcgucacagugucuaccaagagaucccagcaaacaaucauucccaacaucggaagccggccuugggugcgcggcauguccucuagaauuagcaucuacuggaccaucgucaaacccggcgacauucugguuaucaauuccaacgggaaucugauugccccucggggauacuuuaagaugcgcaccggcagaagcucuaucaugcgguccgacgcgcccauugggacauguaucagcgagugcaucacgccgaacggaucuauuccuaaugaucgccccuuccagaacgugaauaaaaucaccuauggcgccuguccuaaguacgugaagcagaacacacucaaacuggcuaccgggaugagaaauguccccgaaaagcagacacggggaauuuuuggcgccaucgcuggcuucauugagaacgggugggaaggaaugaucgacggcugguauggguuucgccaccaaaauagcgagggaaccggccaggccgcggaucuuaaauccacgcaggccgcuaucgaccaaauuaacgggaagcugaauagagugaucgagaaaacaaacgaaaaguuccaccagauugagaaagaguucucugaaguugaaggccggauccaggaucucgagaaguacguggaggacaccaagauugaucuguggagcuauaacgccgaacuucuggucgcucucgagaaucagcauaccaucgaccugacagauuccgaaaugaacaaacuguuugagaagaccagacgccaacuccgggaaaaugccgaggacaugggaaacggcugcuucaaaauuuaccacaagugugauaaugccugcaucgagagcaucagaaacgggacauauaaucaugacguguaccgcgacgaagcucugaacaaucgguuucagauuaaaggaguugagcuuaagucuggcuacaaggauuggauccuguggauuuccuucgcgaucagcugcuuucuccugugugugguccuucugggguucauuaugugggccugccagaaaggaaacaucagauguaauaucugcauuuga

SEQ ID NO: 200615 - RNA, 1701 nt, Artificial Sequence
  derived and/or modified CDS sequence (opt5) from hemagglutinin__InfluenzaA__AFG98962
augaagaccaucauugcccugagcuacaucuucugccucgugcuggcucaggaccuucccggcaacgauaauuccacagccacgcugugucucgggcaccaugcggucccuaacggaacccugguuaaaacaauuaccaaugaccaaaucgaggugacaaacgcuaccgaacuugugcagucuagcuccacaggcaagauuugcaauaacccgcacagaauccuggaugggaucaauuguacccucauugacgcccugcugggagauccccauugcgacggcuuucagaacgagaaaugggaucucuucgucgaacggucuaaggccuuuagcaauuguuauccuuacgacgugcccgauuaugcuucccugcgcucucuuguugccagcuccgggacgcuggaguucaucaacgaaggauuuaauuggaccggcgugacacagaacggcgggagcaaugcuugcaaaagaggaccugacucuggcuucuuuucccggcucaacuggcuguacaagagcgggucuaccuaucccguccuuaaugugacaaugccuaacaacgauaauuucgacaagcuguacauuuggggaguucaccauccguccaccgaucaagagcagacgaaccucuaugugcaggccagcggccgcgucacagugucuaccaaaagaucccagcaaacaaucauucccaauguggggagccggccuuggguccgcggacuguccucuagaaucagcauuuacuggaccaucguuaagcccggcgacauccuggugauuaacuccaauggcaaccucaucgcgccucggggguacuuuaaaaugcgcaccggaaagagcucuauuaugagauccgacgcccccaucggcacauguagcucugagugcauuacgccgaaugggagcaucccuaacgauaaacccuuccagaaugugaacaagaucaccuauggagcuuguccuaaguacgucaaacagaauacacugaaacuugccaccggcaugcggaacgugcccgaaaagcagacacgcgggauuuuuggagcuaucgccggcuucauugagaauggcugggaagggaugaucgacggaugguauggcuuuagacaccaaaacuccgaggggaccggacaggcggccgaucugaagucuacgcaggcugccauugaccaaaucaauggcaaacucaaccggguuaucgagaagacaaacgaaaaauuccaccagauugagaaggaguucagcgaaguggaagggcgcauccaggaucuggagaaguacgucgaggacaccaaaauugaucuuugguccuauaaugcugaacugcucguggcccuggagaaccagcauaccaucgaccugacagauagcgaaaugaauaagcucuuugagaaaaccagacggcaacugagagaaaacgccgaggacaugggcaauggaugcuucaagauuuaccacaaaugugauaacgcuugcaucggcucuauucgcaaugggacauaugaccaugacguuuaccgggaugaggcgcuuaacaauagauuucagaucaagggaguggaacugaaguccggcuacaaagacuggauccucuggauuagcuucgccaucucuugcuuucugcuuugugucgugcugcucggguucauuaugugggcuugccagaagggaaacauccgcuguaauauuugcaucuga

SEQ ID NO: 200616 - RNA, 1701 nt, Artificial Sequence
  derived and/or modified CDS sequence (opt5) from hemagglutinin__InfluenzaA__AFG98973
augaagaccaucauugcccugagcuacaucuucugccucgugcugggccaggacuuucccagaaacgauaauuccacagcuacgcuuugucuggggcaccaugccgucccuaacggaacccucguuaaaacaauuaccaaugaccaaaucgaggugacaaacgcgaaugaacuggugcagucuagcuccaccggcaagauuugcaacaauccgcaccggauccuugaugggauggacuguacacugaucgaugcucuccugggagacccccauugcgauggccugcagaacgagaccugggaccucuucgucgaacgcucuaaagccuuuagcaauuguuauccuuacgaugugcccgacuaugccucccugagaucucuuguugcuagcuccgggacgcuggaguucauuaacgaaggauuuaccuggacaggcgugacccagaauggcgggagcaacgccugcaagcggggaccugaucgcggcuucuuuucuagacucaauuggcuguacaaauccgggaacacauaucccguccuuaaugugaccaugccuaacaacgacaauuucgauaagcuguacaucuggggaguucaccauccgagcacggaccaagaccagacaucucucuaugugcaggcuuccggccgggucaccgugagcacaaagcgcucucagcaaaccgugauucccaacaucgggccuagacccuggguccggggacuguccagcggcauuuccaucuacuggaccauuguuaaaccuggcgauauccugcucaucaauucuaacgggaaucugauugcgccccgcggauacuuuaagaugagaacaggcaaaagcuccaucaugcggagcgacgccccgauugggacguguaucucugagugcauuaccccuaacggauccauccccaaugauaagccuuuccagaacgugaauaaaaucacauauggcgccugucccaaguacgugaagcagaacacccuuaaacuggcuacagggaugcgcaauguccccgagaagcagaccagaggaauuuuuggcgccaucgcuggcuucauugaaaacgggugggagggaaugaucgacggcugguauggguuucggcaccaaaauagcgaaggaacgggccaggccgcggaucucaaaucuacacaggccgcuauugaccaaaucaacgggaagcugaaucgcgugaucgagaaaaccaacgagaaguuccaccagauugaaaaagaguucagcgaaguugagggcagaauccaggaucuugaaaaguacguggaggacaccaagauugaucugugguccuauaacgccgagcuccuggucgcucuggaaaaucagcauacaaucgaccucaccgauucugagaugaacaaacuguuugaaaagacacggagacaacuucgcgagaaugccgaagacaugggaaacggcugcuucaaaauuuaccaccggugugacaaugccugcaucgggagcauuagaaacggaacguaugaucaugacguguaccgcgaugaggcucugaauaaccgguuucagaucaagggcguugagcucaaauccggguacaaggacuggauccuguggauuagcuucgcgaucucuugcuuucuucugugugugguccuccugggauucauuaugugggccugccagaagggcaauaucagauguaacauuugcaucuga

SEQ ID NO: 200617 - RNA, 1701 nt, Artificial Sequence
  derived and/or modified CDS sequence (opt5) from hemagglutinin__InfluenzaA__AFG98984
augaagaccaucauugcccugagcuacaucuucugccucgugcugggccaggacuuucccagaaacgauaauuccacagcuacgcuuugucuggggcaccaugccgucccuaacggaacccucguuaaaacaauuaccaaugaccaaaucgaggugacaaacgcgaccgaacuggugcagucuagcuccacaggcaagauuugcaauaacccgcaccggauccuugaugggauggacuguacccugaucgaugcucuccugggagacccccauugcgauggccugcagaaugagacgugggaccucuucgucgaacgcucuaaagccuuuagcaacuguuauccuuacgaugugcccgacuaugccucccugagaucucuuguugcuagcuccgggacccuggaguucauuaaugaaggauuuacauggaccggcgugacacagaacggcgggagcaaugccugcaagcggggaccugaucgcggcuucuuuucuagacucaacuggcuguacaaauccgggaauaccuaucccguccuuaacgugacgaugccuaauaacgacaacuucgauaagcuguacaucuggggaguucaccauccgagcacagaccaagaccagaccucucucuaugugcaggcuuccggccgggucacagugagcaccaagcgcucucagcaaaccgugauucccaauaucgggccuagacccuggguccggggacuguccagcggcauuuccaucuacuggacaauuguuaaaccuggcgauauccugcucaucaacucuaaugggaaccugauugcgccccgcggauacuuuaagaugagaacgggcaaaagcuccaucaugcggagcgacgccccgauugggaccuguaucucugagugcauuacaccuaauggauccauccccaacgauaagccuuuccagaaugugaacaaaaucaccuauggcgccugucccaaguacgugaagcagaauacacuuaaacuggcuaccgggaugcgcaacguccccgagaagcagacgagaggaauuuuuggcgccaucgcuggcuucauugaaaaugggugggagggaaugaucgacggcugguauggguuucggcaccaaaacagcgaaggaacaggccaggccgcggaucucaaaucuacccaggccgcuauugaccaaaucaaugggaagcugaaccgcgugaucgagaaaaccaaugagaaguuccaccagauugaaaaagaguucagcgaaguugagggcagaauccaggaucuugaaaaguacguggaggacacaaagauugaucugugguccuauaacgccgagcuccuggucgcucuggaaaaccagcauaccaucgaccucacagauucugagaugaauaaacuguuugaaaagacgcggagacaacuucgcgagaacgccgaagacaugggaaauggcugcuucaaaauuuaccaccggugugacaacgccugcaucgggagcauuagaaauggaaccuaugaucaugacguguaccgcgaugaggcucugaacaaucgguuucagaucaagggcguugagcucaaauccggguacaaggacuggauccuguggauuagcuucgcgaucucuugcuuucuucugugugugguccuccugggauucauuaugugggccugccagaagggcaacaucagauguaauauuugcaucuga

SEQ ID NO: 200618 - RNA, 1704 nt, Artificial Sequence
  derived and/or modified CDS sequence (opt5) from hemagglutinin__InfluenzaA__AFG98995
augaagaccaucauugcccugagcuacaucuucugccucguguuugcucaggaccugcccggcaacgauaauaacuccacagccacgcuuugucuggggcaccaugcggucccuaauggaacccucguuaaaacaauuaccaacgaccaaaucgaggugacaaaugcuaccgaacuggugcagucuagcuccacaggcaagauuugcaacaauccgcacagaauccuugaugggaucaacuguacccugauugacgcccuccugggagauccccauugcgacggcuuccagaaugagaaaugggaucuguuugucgaacggucuaaggccuucagcaacuguuauccuuacgacgugcccgauuaugcuucccuccgcucucugguugccagcuccgggacgcuugaguuuaucaaugaaggauucaacuggaccggcgugacacagaauggcgggagcaacgcuugcaaaagaggaccugacauuggcuuuuucucucggcugaauuggcucuacaaguccgggagcaccuaucccguccaaaacgugacaaugccuaacaaugauaacucugacaagcuguacaucuggggaguucaccauccguccaccgauaaagagcagacggaccuuuaugugcaggccagcggcaaggucacagugucuaccaaacgcucccagcaaacaauuauccccaauguggggagcagaccuuggguccggggacuguccucucgcauuagcaucuacuggaccaucguuaagcccggcgacauucucgugaucaacuccaauggcaaccugauugcgccuagaggguacuuuaaaaugcggaccggaaagagcucuaucaugcgcuccgaugcccccauuggcacauguagcucugagugcaucacgccgaaugggagcaucccuaacgacaagcccuuccagaaugugaacaaaauuaccuauggagcuuguccuaaguacgucaaacagaauacacugaagcucgccaccggcaugagaaacgugcccgaaaaacagacacgggggaucuuuggagcuauugccggcuucaucgagaauggcugggaagggaugauugauggaugguauggcuuucgccaccaaaacuccgaggggaccggacaggcggccgaccugaagucuacgcaggcugccaucgaucaaaucaauggcaaacuuaacagaguuauugagaagacaaacgaaaaguuccaccagaucgagaaagaguucagcgaaguggaagggcggauucaggaccuggagaaguacgucgaggauaccaaaaucgaccucugguccuauaaugcugaacugcuuguggcccuggagaaccagcauaccauugaucucacagacagcgaaaugaauaagcuguuugagaaaacccgcagacaacugcgggaaaacgccgaggauaugggcaauggaugcuucaagaucuaccacaagugugacaacgcuugcauuggcucuaucagaaaugggacauaugaccaugauguuuaccgcgacgaggcgcucaacaaucgguuucagaucaaaggaguggaacugaaguccggcuacaaagauuggauucuuuggaucagcuucgccauuucuugcuuucugcucugugucgugcugcuuggguucaucaugugggcuugccagaagggaaacauuagauguaauaucugcaucuga

SEQ ID NO: 200619 - RNA, 1701 nt, Artificial Sequence
  derived and/or modified CDS sequence (opt5) from hemagglutinin__InfluenzaA__AFG99006
augaagaccaucauugcccugagcuacaucuucugccucgugcugggccaggacuuucccagaaacgauaauuccacagcuacgcuuugucuggggcaccaugccgucccuaacggaacccucguuaaaacaauuaccaaugaccaaaucgaggugacaaacgcgaccgaacuggugcagucuagcuccacaggcaagauuugcaauaacccgcaccggauccuugaugggauggacuguacccugaucgaugcucuccugggagacccccauugcgauggccugcagaaugagacgugggaccucuucgucgaacgcucuaaagccuuuagcaacuguuauccuuacgaugugcccgacuaugccucccugagaucucuuguugcuagcuccgggacccuggaguucauuaaugaaggauuuacauggaccggcgugacacagaacggcgggagcaaugccugcaagcggggaccugaucgcggcuucuuuucuagacucaacuggcuguacaaauccgggaauaccuaucccguccuuaacgugacgaugccuaauaacgacaacuucgauaagcuguacaucuggggaguucaccauccgagcacagaccaagaccagaccucucucuaugugcaggcuuccggccgggucacagugagcaccaagcgcucucagcaaaccgugauucccaauaucgggccuagacccuggguccggggacuguccagccgcauuuccaucuacuggacaauuguuaaaccuggcgauauccugcucaucaacucuaauggcaaccugauugcccccagaggguacuuuaagaugcggacgggaaaaagcuccaucaugcgcagcgacgcgccgauuggcaccuguaucucugagugcauuacaccuaauggguccauccccaacgauaagccuuuccagaaugugaacaaaaucaccuauggagccugucccaaguacgugaagcagaauacacuuaaacuggcuaccggcaugagaaacguccccgagaagcagacgcgggggauuuuuggagccaucgcuggcuucauugaaaauggcugggaggggaugaucgacggaugguauggcuuucgccaccaaaacagcgaagggacaggacaggccgcggaucucaaaucuacccaggccgcuauugaccaaaucaauggcaagcugaacagagugaucgagaaaaccaaugagaaguuccaccagauugaaaaagaguucagcgaaguugaggggcggauccaggaucuugaaaaguacguggaggacacaaagauugaucugugguccuauaacgccgagcuccuggucgcucuggaaaaccagcauaccaucgaccucacagauucugagaugaauaaacuguuugaaaagacgagacgccaacuucgggagaacgccgaagacaugggcaauggaugcuucaaaauuuaccacagaugugacaacgccugcaucggcagcauucgcaaugggaccuaugaucaugacguguaccgggaugaggcucugaacaauagauuucagaucaagggaguugagcucaaauccggcuacaaggacuggauccuguggauuagcuucgcgaucucuugcuuucuucugugugugguccuccugggguucauuaugugggccugccagaagggaaacauccgcuguaauauuugcaucuga

SEQ ID NO: 200620 - RNA, 1701 nt, Artificial Sequence; identical to SEQ ID NO: 192836
  derived and/or modified CDS sequence (opt5) from hemagglutinin__InfluenzaA__AFG99017

SEQ ID NO: 200621 - RNA, 1701 nt, Artificial Sequence
  derived and/or modified CDS sequence (opt5) from hemagglutinin__InfluenzaA__AFG99028
augaagaccaucauugcccugagcuacaucuucugccucguguuugcucaggaccugcccggcaacgauaauuccacagccacgcuuugucuggggcaccaugcggucccuaacggaacccucguuaaaacaauuaccaaugaccaaaucgaggugacaaacgcuaccgaacuggugcagucuagcuccacaggcaagauuugcgggaauccgcacagaauccuugauggaaucaacuguacccugauugacgcccuccugggcgauccccauugcgacggguuccagaaugagaaaugggaucuguuugucgaacggucuaaggccuucagcaacuguuauccuuacgacgugcccgauuaugcuucccuccgcucucugguugccagcuccggaacgcuugaguuuaucaaugaaggcuucaacuggaccggcgugacacagaaugggggaagcucugcuugcaaaagaggcccugacaacggguuuuucucccggcugaauuggcucuacaagagcggaucuaccuaucccguccaaaacgugacaaugccuaauaacgauaacuccgacaagcuguacauuuggggcguucaccauccgagcaccgauaaagagcagacggaccuuuaugugcaggccucugggaaggucacaguguccaccaaacgcagccagcaaacagugauccccaaugucggauccagaccuuggguucggggccugucuagccgcguguccauuuacuggaccaucgugaagcccggcgacauucucgucaucaacagcaaugggaaccugaucgcgccuagaggauacuuuaaaaugcggaccggcaagucuuccauuaugcgcagcgaugcccccaucgggacauguucuagcgagugcauuacgccgaauggauccaucccuaacgacaagcccuuccagaaugugaacaaaauuaccuauggcgcuuguccuaaguacguuaaacagaauacacugaagcucgccaccgggaugagaaacgugcccgaaaaacagacacggggaaucuuuggcgcuaucgccggcuucauugagaaugggugggaaggaaugaucgauggcugguauggguuucgccaccaaaacucugagggaaccggccaggcggccgaccuuaagagcacgcaggcugccauugaucaaaucaaugggaaacugaacagagucauugagaagacaaaugaaaaguuccaccagaucgagaaagaguucuccgaaguggaaggccggauccaggaccuggagaaguacguugaggauaccaaaauugaccucuggagcuauaacgcugaacugcuuguggcccuggagaaccagcauaccaucgaucucacagacucugaaaugaauaagcuguuugagaaaacccgcagacaacugcgggaaaacgccgaggauaugggaaauggcugcuucaagauuuaccacaagugugacaacgcuugcaucggguccauuagaaauggaacauaugaccaugaugucuaccgcgacgaggcgcucaacaaucgguuucagaucaaaggcguggaacuuaagagcggguacaaagauuggauucuguggaucucuuucgccaucuccugcuuucugcucugugucgugcugcuuggauucauuaugugggcuugccagaagggcaacaucagauguaauauuugcaucuga

SEQ ID NO: 200622 - RNA, 1701 nt, Artificial Sequence
  derived and/or modified CDS sequence (opt5) from hemagglutinin__InfluenzaA__AFG99039
augaagaccaucauugcccugagcuacaucuucugccucguguuugcucaggaccugcccggcaacgauaauuccacagccacgcuuugucuggggcaccaugcggucccuaacggaacccucguuaaaacaauuaccaaugaccaaaucgaggugacaaacgcuaccgaacuggugcagucuagcuccacaggcaagauuugcgauaauccgcacagaauccuugacgggaucaacuguacccugauugaugcccuccugggagacccccauugcgauggcuuccagaaugagaaaugggaccuguuugucgaacggucuaaggccuucagcaacuguuauccuuacgaugugcccgacuaugcuucccuccgcucucugguugccagcuccgggacgcuugaguuuaucaaugaaggauucaacuggaccggcgugacacagaauggcgggagcucugcuugcaaaagaggaccugauaacggcuuuuucucccggcugaauuggcucuacaagagcgggucuaccuaucccguccaaaacguggccaugccuaauaacgacaacuccgauaagcuguacauuuggggaguucaccauccgagcacagacaaagagcagaccgaccuuuaugugcaggcgucuggcaaggucacgguguccacaaaacgcagccagcaaaccgugauccccaaugucggguccagaccuuggguucggggacugucuagccgcguguccauuuacuggacaaucgugaagcccggcgauauucucgucaucaacagcaauggcaaccugaucgccccuagaggguacuuuaaaaugcggaccggaaagucuuccauuaugcgcagcgacgcucccaucggcaccuguucuagcgagugcauuacaccgaauggguccaucccuaacgauaagcccuuccagaaugugaacaaaauuacguauggagccuguccuaaguacguuaaacagaauacccugaagcucgcuacaggcaugagaaacgugcccgaaaaacagacccgggggaucuuuggagccaucgcgggcuucauugagaauggcugggaagggaugaucgacggaugguauggcuuucgccaccaaaacucugaggggacaggacaggccgcugaucuuaagagcacccaggccgcuauugaccaaaucaauggcaaacugaacagagucauugagaagacgaaugaaaaguuccaccagaucgagaaagaguucuccgaaguggaagggcggauccaggaucuggagaaguacguugaggacacaaaaauugaucucuggagcuauaacgccgaacugcuuguggcccuggagaaccagcauaccaucgaccucaccgauucugaaaugaauaagcuguuugagaaaacacgcagacaacugcgggaaaacgcugaggacaugggcaauggaugcuucaagauuuaccacaagugugacaacgcgugcaucggcuccauuagaaaugggaccuaugaucaugacgucuaccgcgaugaggcccucaacaaucgguuucagaucaaaggaguggaacuuaagagcggcuacaaagacuggauucuguggaucucuuucgcuaucuccugcuuucugcucugugucgugcugcuuggguucauuaugugggccugccagaagggaaacaucagauguaauauuugcaucuga

SEQ ID NO: 200623 - RNA, 1701 nt, Artificial Sequence; identical to SEQ ID NO: 192836
  derived and/or modified CDS sequence (opt5) from hemagglutinin__InfluenzaA__AFG99050

SEQ ID NO: 200624 - RNA, 1701 nt, Artificial Sequence
  derived and/or modified CDS sequence (opt5) from hemagglutinin__InfluenzaA__AFG99061
augaagaccaucauugcccugagcuacaucuucugccucguguuugcucaggaccugcccggcaacgauaauuccacagccacgcuuugucuggggcaccaugcggucccuaacggaacccucguuaaaacaauuaccaaugaccaaaucgaggugacaaacgcuaccgaacuggugcagucuagcuccacaggcaagauuugcgauaauccgcacagaauccuugacgggaucaacuguacccugauugaugcccuccugggagacccccauugcgauggcuuccagaaugagaaaugggaccuguuugucgaacggucuaaggccuucagcaacuguuauccuuacgaugugcccgacuaugcuucccuccgcucucugguugccagcuccgggacgcuugaguuuaucaaugaaggauucaacuggaccggcgugacacagaauggcgggagcucugcuugcaaaagaggaccugauaacggcuuuuucucccggcugaauuggcucuacaagagcgggucuaccuaucccguccaaaacgugacaaugccuaauaacgacaacuccgauaagcuguacauuuggggaguucaccauccgagcaccgacaaagagcagacggaccuuuaugugcaggccucuggcaaggucacaguguccaccaaacgcagccagcaaacagugauccccaaugucggguccagaccuuggguucggggacugucuagccgcguguccauuuacuggaccaucgugaagcccggcgauauucucgucaucaacagcaauggcaaccugaucgcgccuagaggguacuuuaaaaugcggaccggaaagucuuccauuaugcgcagcgacgcccccaucggcacauguucuagcgagugcauuacgccgaauggguccaucccuaacgauaagcccuuccagaaugugaacaaaauuaccuauggagcuuguccuaaguacaucaaacagaauacacugaagcucgccaccggcaugagaaacguucccgaaaaacagacacgggggaucuuuggagcuauugccggcuucaucgagaauggcugggaagggaugauugacggaugguauggcuuucgccaccaaaacucugaggggaccggacaggcggccgaucuuaagagcacgcaggcugccaucgaccaaauuaauggcaaacugaacaaggugaucgagaagacaaaugaaaaauuccaccagaucgagaaggaguucuccgaagucgaagggcggauucaggaucuggagaaauacguggaggacaccaagaucgaucucuggagcuauaacgcugaacugcuuguugcccuggagaaccagcauaccauugaccucacagauucugaaaugaauaaacuguuugagaagaccagacgccaacugagagaaaacgccgaggacaugggcaauggaugcuucaagaucuaccacaaaugugacaacgcuugcauuggcuccauccggaaugggacauaugaucaugacguguacagagaugaggcgcucaacaaucgcuuucagauuaagggagucgaacugaaaagcggcuacaaggacuggauccuuuggaucucuuucgccauuuccugcuuucugcucugugugguccugcuuggguucaucaugugggcuugccagaaaggaaacauucgguguaauaucugcauuuga

SEQ ID NO: 200625 - RNA, 1701 nt, Artificial Sequence
  derived and/or modified CDS sequence (opt5) from hemagglutinin__InfluenzaA__AFG99072
augaagaccaucauugcccugagcuacaucuucugccucguguuugcucaggaccugcccggcaacgauaauuccacagccacgcuuugucuggggcaccaugcggucccuaacggaacccucguuaaaacaauuaccaaugaccaaaucgaggugacaaacgcuaccgaacuggugcagucuagcuccacaggcaagauuugcgauaauccgcacagaauccuugacgggaaaaacuguacccugaucgaugcccuccugggagacccccauugcgauggcuuccagaaugagaagugggaccuguuugucgaacggucuaaagccuucagcaacuguuauccuuacgaugugcccgacuaugcuucccuccgcucucugguugccagcuccgggacgcuugaguuuauuaaugaaggauucaacuggaccggcgugacacagaauggcgggagcucugcuugcaagagaggaccugauaacggcuuuuucucccggcugaauuggcucuacaagagcgggucuaccuaucccguccaaaacgugacaaugccuaauaacgacaacuccgaucgccuguacaucuggggaguucaccauccgagcaccgacaaagagcagacggaccuuuaugugcaggccucuggcaaggucacaguguccaccaaaagaagccagcaaacagugauucccaaugucgggucccggccuuggguucgcggacugucuagcagaguguccaucuacuggaccauugugaagcccggcgauauccucgucauuaacagcaauggcaaccugaucgcgccucggggguacuuuaaaaugcgcaccggaaagucuuccaucaugagaagcgacgcccccauuggcacauguucuagcgagugcaucacgccgaauggguccauuccuaacgauaagcccuuccagaaugugaacaaaaucaccuauggagcuuguccuaaguacguuaaacagaauacacugaagcucgccaccggcaugcggaacgugcccgaaaaacagacacgcgggauuuuuggagcuaucgccggcuucaucgagaauggcugggaagggaugauugacggaugguauggcuuuagacaccaaaacucugaggggaccggacaggcggccgaucuuaagagcacgcaggcugccaucgaccaaauuaauggcaaacugaaccgggucaucgagaagacaaaugaaaaguuccaccagauugagaaagaguucuccgaaguggaagggcgcauccaggaucuggagaaguacguugaggacaccaaaaucgaucucuggagcuauaacgcugaacugcuuguggcccuggagaaccagcauaccauugaccucacagauucugaaaugaauaagcuguuugagaaaaccagacggcaacugagagaaaacgccgaggacaugggcaauggaugcuucaagaucuaccacaagugugacaacgcuugcauuggcuccauccgcaaugggacauauaaccaugaugucuaccgggacgaggcgcucaauaacagauuucagauuaaaggaguggaacuuaagagcggcuacaaagauuggauccuguggauuucuuucgccaucuccugcuuucugcucugugucgugcugcuuggguucaucaugugggcuugccagaagggaaauauucgcuguaacaucugcauuuga

SEQ ID NO: 200626 - RNA, 1701 nt, Artificial Sequence
  derived and/or modified CDS sequence (opt5) from hemagglutinin__InfluenzaA__AFG99083
augaagaccaucauugcccugagcuacaucuucugccucguguuugcucaggaccugcccggcaacgauaauuccacagccacgcuuugucuggggcaccaugcggucccuaacggaacccucguuaaaacaauuaccaaugaccaaaucgaggugacaaacgcuaccgaacuggugcagucuagcuccacaggcaagauuugcgauaauccgcacagaauccuugacgggaucaacuguacccugauugaugcccuccugggagacccccauugcgauggcuuccagaaugagaaaugggaccuguuugucgaacggucuaaggccuucagcaacuguuauccuuacgaugugcccgacuaugcuucccuccgcucucugguugccagcuccgggacgcuugaguuuaucaaugaaggauucaacuggaccggcgugacacagaauggcgggagcucugcuugcaaaagaggaccugauaagggcuuuuucucccggcugaacuggcucuacaagagcgggucuaccuaucccguccaaaaugugacaaugccuaacaaugacaacuccgauaaacuguacauuuggggaguucaccauccgagcaccgacaaggagcagacggaccuuuaugugcaggccucuggcaaagucacaguguccaccaagcgcagccagcaaacagugauccccaacgucggguccagaccuuggguucggggacugucuagccgcguguccauuuacuggaccaucgugaaacccggcgauauucucgucaucaauagcaacggcaaucugaucgcgccuagaggguacuuuaagaugcugaccggaaagucuuccauuaugcggagcgacgcccccaucggcacauguucuagcgagugcauuacgccgaacggguccaucccuaaugauaaacccuuccagaacgugaauaagauuaccuauggagcuuguccuaaauacguuaagcagaacacacucaaacuggccaccggcaugcgcaaugugcccgaaaagcagacaagagggaucuuuggagcuaucgccggcuucauugagaacggcugggaagggaugaucgacggaugguauggcuuucggcaccaaaauucugaggggaccggacaggcggccgaucuuaaaagcacgcaggcugccauugaccaaaucaacggcaagcugaaucgcgucauugagaagacaaacgaaaaauuccaccagaucgagaaggaguucuccgaaguggaagggagaauccaugaucucgagaaauacguugaggacaccaagauugaucuguggagcuauaaugcugaacuucugguggcccucgagaaccagcacaccaucgaccugacagauucugaaaugaacaaacuguuugagaagacccggcgccagcucagagaaaaugccgaggacaugggcaacggaugcuucaagauuuaccauaaaugugacaaugcuugcaucggcuccauucggaacgggacauaugaucacgacgucuacagagaugaggcgcugaauaaccgcuuucaaaucaagggaguggaacuuaaaagcggcuacaaggacuggauucuguggaucucuuucgccaucuccugcuuucuccugugugucgugcuucugggguucauuaugugggcuugccagaaaggaaauauccgguguaacauuugcaucuga

SEQ ID NO: 200627 - RNA, 1701 nt, Artificial Sequence
  derived and/or modified CDS sequence (opt5) from hemagglutinin__InfluenzaA__AFG99094
augaagaccaucauugcccugagcuacaucuucugccucguguuugcucaggaccugcccggcaacgauaauuccacagccacgcuuugucuggggcaccaugcggucccuaacggaacccucguuaaaacaauuaccaaugaccaaaucgaggugacaaacgcuaccgaacuggugcagucuagcuccacaggcaagauuugcgauaauccgcacagaauccuugacgggaucaacuguacccugauugaugcccuccugggagacccccauugcgauggcuuccagaaugagaaaugggaccuguuugucgaacggucuaaggccuucagcaacuguuauccuuacgaugugcccgacuaugcuucccuccgcucucugguugccagcuccgggacgcuugaguuuaucaaugaaggauucaacuggaccggcgugacacagaauggcgggagcggagcuugcaaaagaggcccugauaacggguuuuucucucggcugaauuggcucuacaaguccggaagcaccuaucccguccaaaacgugacaaugccuaauaacgacaacucugauaagcuguacauuuggggcguucaccauccguccaccgacaaagagcagacggaccuuuaugugcaggccagcgggaaggucacagugucuaccaaacgcucccagcaaacagugauccccaaugucggaagcagaccuuggguucggggccuguccucucgcgugagcauuuacuggaccaucgugaagcccggcgauauucucgucaucaacuccaaugggaaccugaucgcgccuagaggauacuuuaaaaugcggaccggcaagagcucuauuaugcgcuccgacgcccccaucgggacauguagcucugagugcauuacgccgaauggaagcaucccuaacgauaagcccuuccagaaugugaacaaaauuaccuauggcgcuuguccuaaguacguuaaacagaauacacugaagcucgccaccgggaugagaaacgugcccgaaaaacagacacggggaaucuuuggcgcuaucgccggcuucauugagaaugggugggaaggaaugaucgacggcugguauggguuucgccaccaaaacuccgagggaaccggccaggcggccgaucugaagucuacgcaggcugccauugaccaaaucaaugggaaacuuaacagagucauugagaagacaaaugaaaaguuccaccagaucgagaaagaguucagcgaaguggaaggccggauccaggaucuggagaaguacguugaggacaccaaaauugaucucugguccuauaacgcugaacugcuuguggcccuggagaaccagcauaccaucgaccucacagauagcgaaaugaauaagcuguuugagaaaacccgcagacaacugcgggaaaacgccgaggacaugggaaauggcugcuucaagauuuaccacaagugugacaacgcuugcaucgggucuauuagaaauggaacauaugaucaugacgucuaccgcgaugaggcgcucaacaaucgguuucagaucaaaggcguggaacugaaguccggguacaaagacuggauucuuuggaucagcuucgccaucucuugcuuucugcucugugucgugcugcuuggauucauuaugugggcuugccagaagggcaacaucagauguaauauuugcaucuga

SEQ ID NO: 200628 - RNA, 1701 nt, Artificial Sequence
  derived and/or modified CDS sequence (opt5) from hemagglutinin__InfluenzaA__AFG99116
augaagaccaucauugcccugagcuacaucuucugccucguguuugcucagaaccugcccggcaaugacaacuccacagccacgcuuugucuggggcaccaugcggucccuaauggaacccucguuaaaacaauuaccaacgaucaaaucgaggugacaaaugcuaccgaacuggugcagucuagcuccacaggcagaauuugcgacucuccgcaccggauccuugaugggaagaacuguacccuggucgacgcccuccugggagauccccauugcgacggcuuccagaaugagaaaugggaucuguuuguggaacgcagcaaggccuucuccaacuguuauccuuacgacguucccgauuaugcuucucucagaagccugguggccuccagcgggacgcuugaguuuaucaaugaaucuuucaacuggaccggagucacacaguccggcggcagcuacgcuugcaaacgggggucugacaauuccuuuuucagccgccugaacuggcucuaugagucugaguccaaguacccugugcugaauguuaccaugcccaacaauggaaacuuugauaaacuuuauauuuggggcgugcaccauccuagcacagacaaggaacaaaccaaccuguacgucagagccuccgggcgggugacggugucuacaaagcgcagccagcagaccaucauuccgaauaucggauccagacccuggguccggggccucagcucucgcauuuccaucuacuggacaauuguuaaaccuggggauauccugcugaucaacagcaauggaaaccucauugcgcccagaggcuauuucaagauccggaccggcaaaucuagcauuaugcgcuccgacgccccuaucgggaccuguucuagcgagugcauuacacccaauggauccaucccgaacgacaagccuuuucagaaugugaacaagaucacguacggcgcuugucccaaauaugugaagcaaaauacccugaaacuugccacagggaugagaaacgucccugaaaagcagacccggggaauuuucggcgcuaucgccggguuuauugagaauggaugggagggcaugguggauggcugguacggguuccgccaccagaacagcgaaggaacaggccaggcggccgaccugaaaucuacccaagcugccaucgaucagauuaaugggaagcucaacagaguuaucgagaaaacgaaugaaaaguuccaccagaucgagaaggaauuuuccgagguggagggacggauucaagaccuggaaaaauaugucgaggauacaaagaucgaccuuuggagcuacaacgcugaacugcucguggcccuggagaaccagcauaccauugaucugaccgacucugaaaugaauaaacucuucgagaagacaagacgccagcugcgggagaacgccgaagauaugggcaaugggugcuuuaaaaucuaucacaagugugacaacgcuugcauuggcuccaucagaaauggaaccuacgaucaugacguuuaccgcgacgaggcgcuuaacaaucgguuccagauuaagggcguggaacugaaaagcggguauaaggauuggauccucuggaucuccuuugccauuucuugcuuccugcuuugugucgugcugcucggauuuaucaugugggcuugccaaaaaggcaacauuagauguaauaucugcauuuga

SEQ ID NO: 200629 - RNA, 1701 nt, Artificial Sequence
  derived and/or modified CDS sequence (opt5) from hemagglutinin__InfluenzaA__AFG99127
augaagaccaucauugcccugagcuacauccucugccugguguucgcucagaaccuucccggcaaugacaacuccacagccacgcugugucucgggcaccaugcggucccuaauggaacccugguuaaaacaauuaccaacgaucaaaucgaggugacaaaugcuaccgaacuugugcagucuagcuccacaggcagaauuugcgacucuccgcaccggauccuggaugggaagaacuguacccucgucgacgcccugcugggagauccccauugcgacggcuuucagaaugagaaaugggaucucuucguggaacgcagcaaggccuuuuccaacuguuauccuuacgacguucccgauuaugcuucucugagaagccuuguggccuccagcgggacgcuggaguucaucaaugaaucuuuuaacuggaccggagucacacaguccggcggcagcuacgcuugcaaacgggggucugacaauuccuucuuuagccgccucaacuggcuguaugagucugaguccaaguacccugugcuuaauguuaccaugcccaacaauggaaacuucgauaagcuguauauuuggggcgugcaccauccuagcacagacaaagaacaaaccaaccucuacgucagagccuccgggcgggugacggugucuacaaagcgcagccagcagaccaucauuccgaauaucggauccagacccuggguccggggccugagcucucgcauuuccaucuacuggacaauuguuaaaccuggggauauccugcucaucaacagcaauggaaaccugauugcgcccagaggcuauuuuaagauccggaccggcaaaucuagcauuaugcgcuccgacgccccuaucgggaccuguucuagcgagugcauuacacccaauggauccaucccgaacgacaagccuuuccagaaugugaacaagaucacguacggcgcuugucccaaauaugugaagcaaaauacccuuaaacuggccacagggaugagaaacgucccugaaaagcagacccggggaauuuuuggcgcuaucgccggguucauugagaauggaugggagggcaugguggauggcugguacggguuucgccaccagaacagcgaaggaacaggccaggcggccgaccucaaaucuacccaagcugccaucgaucagauuaaugggaagcugaacagaguuaucgagaaaacgaaugaaaaguuccaccagaucgagaaggaguucuccgaaguggagggacggauucaagaccuugaaaaauaugucgaggauacaaagaucgaccuguggagcuacaacgcugaacuccugguggcccuggagaaccagcauaccauugaucucaccgacucugaaaugaauaaacuguuugagaagacaagacgccagcuucgggagaacgccgaagauaugggcaaugggugcuucaaaaucuaucacaagugugacaacgcuugcauuggcuccaucagaaauggaaccuacgaucaugacguuuaccgcgacgaggcgcugaacaaucgguuucagauuaagggcguggaacucaaaagcggguauaaggauuggauccuguggaucuccuucgccauuucuugcuuucuucugugugucgugcuccugggauucaucaugugggcuugccaaaaaggcaacauuagauguaauaucugcauuuga

SEQ ID NO: 200630 - RNA, 1701 nt, Artificial Sequence
  derived and/or modified CDS sequence (opt5) from hemagglutinin__InfluenzaA__AFG99138
augaagaccaucauugcccugagcuacaucuucugccucguguuugcucagaaccugcccggcaaugacaacuccacagccacgcuuugucuggggcaccaugcggucccuaauggaacccucguuaaaacaauuaccaacgaucaaaucgaggugacaaaugcuaccgaacuggugcagucuagcuccacaggcagaauuugcgacucuccgcaccggauccuugaugggaagaacuguacccuggucgacgcccuccugggagauccccauugcgacggcuuccagaaugagaaaugggaucuguuuguggaacgcagcaaggccuucuccaacuguuauccuuacgacguucccgauuaugcuucucucagaagccugguggccuccagcgggacgcuugaguuuaucaaugaaucuuucaacuggaccggagucacacaguccggcggcagcucugcuugcaaacggggguccgacaauagcuuuuucucucgccugaacuggcucuacgaguccgagagcaaguauccugugcugaauguuaccaugcccaacaauggaaacuuugauaaacuuuacauuuggggcgugcaccauccuuccacagacaaggaacaaaccaaccuguaugucagagccucugggcgggugacggugagcacaaagcgcaaucagcagaccgucaucccgaacauuggauccagacccuggguucggggccucagcucucgcaucuccauuuacuggacaaucgugaaaccuggggauauucugcugaucaauagcaacggaaaucucaucgcgcccagaggcuacuucaagauucggaacggcaaaucuagcaucaugcgcuccgacgccccuauugggaccuguucuagcgagugcaucacccccaauggauccauuccgaacgacaagccuuuucagaaugugaacaagaucacauauggcgcuugucccaaauacgucaagcaaaauacgcugaaacuugccaccgggaugagaaacgugccugaaaagcagacacggggaaucuucggcgcuauugccggguuuaucgagaauggaugggagggcaugguugauggcugguauggguuccgccacagaaacagcgaaggaaccggccaggcggccgaccugaaaucuacacaggcugccauugaucaaaucaaugggaagcucaaccgggugauugagaaaaccaacgaaaaguuccaccagaucgagaaggaauuuuccgaggucgagggaagaauccaggaccuggaaaaauacguggaggauacgaagauugaccuuuggagcuauaaugcugaacugcucguugcccuggagaaccaacauacaaucgaucugaccgacucugaaaugaauaaacucuucgagaagacccgccggcagcugagagagaacgccgaagauaugggcaaugggugcuuuaaaauuuaccacaagugugacaacgcuugcaucggcuccauucgcaauggaacauaugaucaugacguguaccgggacgaggcgcuuaacaauagauuccagaucaagggcgucgaacugaaaagcggguacaaggauuggauucucuggaucuccuuugccaucucuugcuuccugcuuugugugguccugcucggauuuauuaugugggcuugccagaaaggcaacauccgcuguaauauuugcaucuga

SEQ ID NO: 200631 - RNA, 1701 nt, Artificial Sequence
  derived and/or modified CDS sequence (opt5) from hemagglutinin__InfluenzaA__AFG99149
augaagaccaucauugcccugagcuacauccucugccugguguucgcucagaaccuucccggcaaugacaacuccacagccacgcugugucucgggcaccaugcggucccuaauggaacccugguuaaaacaauuaccaacgaucaaaucgaggugacaaaugcuaccgaacuugugcagucuagcuccacaggcagaauuugcgacucuccgcaccggauccuggaugggaagaacuguacccucaucgacgcccugcugggagauccccauugcgacggcuuucagaaugagaaaugggaucucuucgucgaacgcagcagagccuuuuccaacuguuauccuuacgacgugcccgauuaugcuucucugcggagccuuguugccuccagcgggacgcuggaguucauuaaugaaggauuuaacuggaccggcgugacacagucuggcggguccuacgcuugcaagcgcggaagcgacaauucuuucuuuuccagacucaacuggcuguaugagagcgagucuaaauacccuguccuuaaugugaccaugcccaacaauggcaaguucgauaagcuguauaucuggggaguucaccauccuuccacagacaaagaacaaaccaaccucuacgugcgggccagcgggcgcgucacgguguccacaaagagaucucagcagaccgugauuccgaacaucggcagccggcccuggguccgcgggcuguccagcagaauuucuaucuacuggacaauuguuaaaccuggagauauccugcucaucaauuccaccggcaaccugauugcgccccggggcuauuuuaagauccgcaccgggaaaagcucuauuaugagaagcgacgccccuaucggaacauguuccucugagugcauuacgcccaauggcagcaucccgaacgacaagccuuuccagaaugugaacaagaucaccuacggggcuuguccccgguaugugaaacaaaauacacuuaagcuggccaccggaaugcgcaacgucccugaaaaacagacaagaggcauuuuuggggcuaucgccggauucauugagaauggcugggagggcaugguggaugggugguacggauuucggcaccagaacuccgaaggcaccgggcaggcggccgaccucaagagcacgcaagcugccaucgaucagauuaauggaaaacugaacagaguuaucgagaagacaaaugaaaaauuccaccagaucgagaaggaguucucugaaguggagggccgcauucaagaccuugaaaaguaugucgaggauaccaaaaucgaccugugguccuacaacgcugaacuccugguggcccuggagaaucagcauaccauugaucucacagacgccgaaaugaacaagcuguuugagaaaacccggaagcagcuuagagagaacgcugaagauauggggaauggcugcuucaaaaucuaucacaagugugacaacgcgugcauuggaagcauccgcaauggcacauacgaucaugacguuuaccgggacgaggcccugaacaauagauuucagauuaaggggguggaacucaaaucuggauauaaggauuggauccuguggaucuccuucgcuauuagcugcuuucuucugugugucgugcuccugggcuucaucaugugggccugccaaaaagggaacauucgcuguaauaucugcauuuga

SEQ ID NO: 200632 - RNA, 1701 nt, Artificial Sequence
  derived and/or modified CDS sequence (opt5) from hemagglutinin__InfluenzaA__AFG99171
augaagaccaucauugcccugagcuacaucuucugccucguguuugcucagaaccugcccggcaaugacaacuccacagccacgcuuugucuggggcaccaugcggucccuaauggaacccucguuaaaacaauuaccaacgaucaaaucgaggugacaaaugcuaccgaacuggugcagucuagcuccacaggcagaauuugcgacucuccgcaccggauccuugaugggaagaacuguacccuggucgacgcccuccugggagauccccauugcgacggcuuccagaaugagaaaugggaucuguuuguggaacgcagcaaggccuucuccaacuguuauccuuacgacguucccgauuaugcuucucucagaagccugguggccuccagcgggacgcuugaguuuaccaaugaaucuuucaacuggacaggagucacccaguccggcggcagcuacgcuugcaaacgggggucugacaauuccuuuuucagccgccugaacuggcucuaugagucugaguccaaguacccugugcugaauguuacaaugcccaacaauggaaacuuugauaaacuuuauaucuggggcgugcaccauccuagcaccgacaaggaacaaacgaaccuguacgucagagccuccgggcgggugacagugucuaccaagcgcaaucagcagacagucauuccgaacaucggaagcagacccuggguucggggccucuccagccgcauuucuaucuacuggaccauugugaaaccuggggauauccugcugauuaauuccaacggaaaucucaucgcgcccagaggcuauuucaagauccggaacggcaaaagcucuauuaugcgcagcgacgccccuaucgggaccuguuccucugagugcauuacacccaauggaagcaucccgaacgacaagccuuuucagaaugugaacaagauuacguacggcgcuugucccaaauaugucaagcaaaauacccugaaacuugccacagggaugagaaacgugccugaaaagcagacccggggaaucuucggcgcuaucgccggguuuauugagaauggaugggagggcaugguugauggcugguacggguuccgccacagaaacuccgaaggaacaggccaggcggccgaccugaaaagcacccaggcugccaucgaucaaauuaaugggaagcucaaccgggugaucgagaaaacgaacgaaaaguuccaccagauugagaaggaauuuucugaggucgagggaagaauccaggaccuggaaaaauauguggaggauacaaagaucgaccuuugguccuacaaugcugaacugcucguugcccuggagaaccaacauaccauugaucugaccgacagcgaaaugaauaaacucuucgagaagacacgccggcagcugagagagaacgccgaagauaugggcaaugggugcuuuaaaaucuaucacaagugugacaacgcuugcauuggcucuauccgcaauggaaccuacgaucaugacguguaccgggacgaggcgcuuaacaauagauuccagauuaagggcgucgaacugaaauccggguauaaggauuggauccucuggauuagcuuugccaucuccugcuuccugcuuugugugguccugcucggauuuaucaugugggcuugccagaaaggcaacauucgcuguaauaucugcauuuga

SEQ ID NO: 200633 - RNA, 1701 nt, Artificial Sequence
  derived and/or modified CDS sequence (opt5) from hemagglutinin__InfluenzaA__AFG99182
augaagaccaucauugcccugagcuacaucuucugccucguguuugcucagaaacugcccggcaacgacaauuccacagccacgcuuugucuggggcaccaugcggucccuaacggaacccucguuaagacaauuaccaaugaucaaaucgaggugacaaacgcuaccgaacuggugcagucuagcuccacaggcagaauuugcgacucuccgcaccggauccuugaugggaaaaauuguacccugaucgacgcccuccugggagauccccauugcgacggcuuccagaacgagaagugggaucuguuugucgaacgcagcaaagccuucuccaauuguuauccuuacgacgugcccgauuaugcuucucucagaagccugguugccuccagcgggacgcuugaguuuauuaacgaaggauucaauuggaccggcgugacacagucuggcggguccuacgcuugcaagcggggaagcgucaacuccuuuuucucucgccugaauuggcucuaugagagcgaguacaaguauccugcccugaacgugaccaugcccaauaacggcaaauuugacaaacuuuacaucuggggaguucaccauccuucuacagauaaggaacaaaccaaucuguacgugagagcguccgggcgggucacggugagcacaaagcgcucccagcagaccgugauuccgaacaucggcucuagacccuggguccgggggcucagcucccgcauuagcaucuauuggacaauuguuaaaccuggagacauccugcugaucaacucuaccggcaaucucauugcccccagaggcuacuucaagauccggaccgggaaguccagcauuaugcgcucugaugcuccuaucggaacauguagcuccgagugcauuacgcccaacggcucuaucccgaaugacaaaccuuuucagaacgugaauaagaucaccuauggggccugucccagauacgugaaacaaaacacacugaaacuugcuaccggaaugcggaaugucccugaaaagcagacacgcggcauuuucggggccaucgcgggauuuauugagaacggcugggagggcaugguggacgggugguauggauucagacaccagaauagcgaaggcaccgggcaggccgcugaucugaaguccacgcaagccgcuaucgaccagauuaacggaaaacucaaucggcugaucgagaagacaaacgaaaaguuccaccagaucgagaaagaauuuagcgagguugagggccgcauucaagaucuugaaaaguacguggaggacaccaaaaucgaucuguggucuuauaaugccgaacuccuggucgcccuggagaaccagcauaccauugaccucacagauuccgaaaugaauaagcuguucgagaaaaccagaaagcagcuucgggagaacgcugaagacauggggaacggcugcuuuaagaucuaccacaaaugugauaaugcgugcauuggaagcaucagaaacggcacauacgaccaugauguguaucgcgacgaggcccugaauaaccgguuccagauuaaggggguugaacucaaaucuggauacaaggacuggauccuguggaucuccuuugcuauuagcugcuuccuucugugugugguccuccugggcuuuaucaugugggccugccaaaaagggaauauuagauguaacaucugcauuuga

SEQ ID NO: 200634 - RNA, 1701 nt, Artificial Sequence
  derived and/or modified CDS sequence (opt5) from hemagglutinin__InfluenzaA__AFG99193
augaagaccaucauugcccugagcuacaucuccugccucguguucgcucagaaacugcccggcaacgacaauucuacagccacgcuuugucuggggcaccaugcggucccuaacggaacccucguuaagacaauuaccaaugaucaaaucgaggugacaaacgcuaccgaacuggugcagagcuccucuacaggcagaauuugcgacagcccgcaccggauccuugaugggaaaaauuguacccugaucgacgcccuccugggagauccccauugcgacggcuuucagaacgagaagugggaucuguucgucgaacgcuccaaagccuuuucuaauuguuauccuuacgacgugcccgauuaugcuagccucagaucccugguugccagcucugggacgcuugaguucauuaacgaaggauuuaauuggaccggcgugacacaguccggcgggagcuacgcuugcaagcggggaucugucaacuccuucuuuagccgccugaauuggcucuaugagucugaguccaaguacccugcccugaacgugaccaugcccaauaacggcaaauucgaaaagcuguauaucuggggaguucaccauccuagcacagacaaagagcaaaccaaucuguacgugagagcguccgggcgggucacggugucuacaaagcgcagccagcagaccgugauuccgaacaucggccccagaccuuggguccgggggcucuccagccgcauuucuaucuacuggacaauuguuaaacccggagauauccugcugaucaacuccaccggcaaucucauugccccuagaggcuauuuuaagauccggaccgggaaguccucuauuaugcgcagcgacgcucccaucggaacauguuccucugaaugcauuacgccgaacggcagcaucccuaaugauaaacccuuccagaacgugaauaagaucaccuacggggccuguccuagauaugugaaacaaaacacacugaaacuugcuaccggaaugcggaauguccccgagaagcagacacgcggcauuuuuggggccaucgcgggauucauugagaacggcugggaaggcaugguggacgggugguacggauuuagacaccagaauagcgagggcaccgggcaggccgcugaccuuaagagcacgcaagccgcuaucgaucagauuaacggaaaacucaaucggcugaucgaaaagacaaacgagaaguuccaccagaucgaaaaagaguucucugagguugaaggccgcauucaagaccuugagaaguauguggaagauaccaaaaucgaccugugguccuacaaugccgagcuccuggucgcccuggaaaaccagcauaccauugauaugacagacagcgagaugaauaagcucuuugagaaaaccagaaagcagcugcgggaaaacgcugaggauauggggaacggcugcuucaagaucuaucacaaaugugacaaugcgugcauuggaucuaucagaaacggcacauacgaucaugacguguaccgcgaugaagcccuuaauaaccgguuucagauuaaggggguugagcugaaauccggauauaaggacuggauccucuggaucagcuucgcuauuuccugcuuucugcuuugugugguccugcucggcuucaucaugugggccugccaaaaagggaauauuagauguaacaucugcauuuga

SEQ ID NO: 200635 - RNA, 1701 nt, Artificial Sequence
  derived and/or modified CDS sequence (opt5) from hemagglutinin__InfluenzaA__AFG99204
augaagaccaucauugcccugagcuacaucuucugccucggcuuugcucagaaacugcccgggaacgacaauuccacagccacgcuuugucugggacaccaugcggugccuaacggcacccucgucaagacaauuaccaaugaucaaaucgagguuacaaacgcuaccgaacuggugcagucuagcuccacagggagaauuugcgacucuccgcaccggauccuugauggcaaaaauuguacccugaucgacgcccuccugggagauccccauugcgacggguuccagaacgagaagugggaucuguuuguggaacgcagcaaagccuucuccaauuguuauccuuacgacguccccgauuaugcuucucucagaagccugguggccuccagcggaacgcuugaguuuauuaacgaaggcuucaauuggaccggcguuacacagucugggggauccuacgcuugcaagcggggcagcgugaacuccuuuuucucucgccugaauuggcucuauaagagcgagucuaaauacccugcccugaacgucaccaugcccaauaacgggaaguuugacaaacuuuauaucuggggagugcaccauccuuccacagauaaggagcaaaccaaucuguacguuagagcgagcggccgggugacggucuccacaaaacgcucucagcagaccgugauuccgaacaucgggagcagacccugggugcggggacucuccagccgcauuucuaucuacuggacaauugucaagccuggcgacauccugcugaucaacuccaccggcaaucucauugcccccagaggguauuucaagauccggaccggaaaaagcucuauuauccgcagcgaugcuccuauuggcacauguuccucugaaugcaucacgcccaacgggagcaucccgaaugacaagccuuuucagaacguuaauaaaauuaccuacggagccugucccagauaugugaagcaaaacacacugaaacuugcuaccggcaugcggaaugugccugagaagcagacacgcgggaucuucggagccauugcgggcuuuaucgaaaacggcugggaggggauggucgacggaugguacggcuucagacaccaaaauuccgaggggaccggacaggccgcugaucugaaaagcacgcaggccgcuauugaccagaucaacggcaagcucaaucggcugaucgaaaagacaaacgagaaauuccaccagauugaaaaggaguuuucugaaguggaggggagaauccaagaucuugagaaauauguugaagacaccaagauugaucugugguccuacaaugccgagcuccugguggcccuggaaaaccagcauaccaucgaccucacagauagcgagaugaauaaacuguucgaaaagacccgcaagcagcuucgggagaacgcugaggacaugggcaacggaugcuuuaaaauuuaucacaagugugauaaugcgugcaucggcucuauuagaaacgggacauacgaccaugaugucuaccgcgacgaagcccugaauaaccgguuccagaucaaaggaguggagcucaaguccggcuauaaagacuggauccuguggauuagcuuugcuaucuccugcuuccuucuguguguugugcuccugggguuuauuaugugggccugccaaaagggaaauaucagauguaacauuugcaucuga

SEQ ID NO: 200636 - RNA, 1701 nt, Artificial Sequence
  derived and/or modified CDS sequence (opt5) from hemagglutinin__InfluenzaA__AFG99215
augaagaccaucauugcccugagcuacaucuucugccucguguuugcucagaaacugcccggcaacgacaauuccacagccacgcuuugucuggggcaccaugcggucccuaacggaacccucguuaagacaauuaccaaugaucaaaucgaggugacaaacgcuaccgaacuggugcagucuagcuccacaggcagaauuugcgacucuccgcaccggauccuugaugggaaaaauuguacccugaucgacgcccuccugggagauccccauugcgacggcuuccagaacgagaagugggaucuguuuauugaacgcagcaaagccuucuccaauuguuauccuuacgacguccccgauuaugcuucucucagaagccugguggccuccagcgggacgcuugaguuuaucaacgaaggauucaauuggaccggcguuacacagucuggcggguccuacgcuugcaagcggggaagcgugaacuccuuuuucucucgccugaauuggcucuaugagagcgaguacaaguauccugcccugaacgucaccaugcccaauaacggcaaauuugacaaacuuuacauuuggggagugcaccauccuucuacagaaaaggagcaaaccaaucuguacguuagagcguccgggcgggugacggucagcacaaagcgcucccagcagaccgugacaccgaacaucggcucuagacccugggugcgggggcucagcucccgcauuagcaucuauuggaccauugucaaaccuggagauauccugcugaucaacucuaccggcaaucucauugcccccagaggcuacuucaagauccggacagggaaguccagcauuaugcgcucugacgcuccuaucggaacguguagcuccgaaugcauuacccccaacggcucuaucccgaaugauaaaccuuuucagaacguuaauaagaucacauauggggccugucccagauacgugaaacaaaacacccugaaacuugcuacaggaaugcggaaugugccugagaagcagacccgcggcauuuucggggccaucgcgggauuuauugagaacggcugggaaggcauggucgacgggugguauggauucagacaccagaauagcgagggcacggggcaggccgcugaccugaaguccacacaagccgcuaucgaucagauuaacggaaaacucaaucggcugaucgaaaagaccaacgagaaguuccaccagaucgaaaaagaguuuagcgagguggaaggccgcauucaagaccuugagaaguacguugaagauaccaaaaucgaccuguggucuuauaaugccgagcuccugguggcccuggaaaaccagcauacaauugaucucaccgacuccgagaugaauaagcuguucgagaaaacaagaaagcagcuucgggaaaacgcugaggauauggggaacggcugcuuuaagaucuaccacaaaugugacaaugcgugcauuggaagcaucagaaacggcacguacgaucaugacgucuaucgcgaugaagcccugaauaaccgguuccagauuaaggggguggagcucaaaucuggauacaaggacuggauccuguggaucuccuuugcuauuagcugcuuccuucuguguguugugcuccugggcuuuaucaugugggccugccaaaaagggaauauuagauguaacaucugcauuuga

SEQ ID NO: 200637 - RNA, 1701 nt, Artificial Sequence
  derived and/or modified CDS sequence (opt5) from hemagglutinin__InfluenzaA__AFG99226
augaagaccaucauugcccugagcuacaucuucugccucguguuugcucagaaacugcccggcaacgacaauuccacagccacgcuuugucuggggcaccaugcggucccuaacggaacccucguuaagacaauuaccaaugaucaaaucgaggugacaaacgcuaccgaacuggugcagucuagcuccacaggcagaauuugcgacucuccgcaccggauccuugaugggaaaaauuguacccugaucgacgcccuccugggagauccccauugcgacggcuuccagaacgagaagugggaucuguuugucgaacgcagcaaagccuucuccaauuguuauccuuacgacgugcccgauuaugcuucucucagaagccugguugccuccagcgggacgcuugaguuuauuaacgaaggauucaauuggaccggcgugacacagucuggcggguccuacgcuugcaagcggggaagcgucaacucuuucuucucccgccugaauuggcucuaugagagcgaguacaaguauccugcccugaacgugaccaugcccaauaacggcaaauuugacaaacuuuacaucuggggaguucaccauccuucuacagauaaggaacaaaccaaucuguacgugagagcguccgggcgggucacggugagcacaaagcgcucccagcagaccgugauuccgaacaucggcucuagacccuggguccgggggcucagcucccgcauuagcaucuauuggacaauuguuaaaccuggagacauccugucuaucaacuccaccggcaaucugauugcccccagaggcuacuucaagauccggaccgggaaguccucuauuaugcgcagcgaugcuccuaucggaacauguuccucugagugcauuacgcccaacggcagcaucccgaaugacaaaccuuuucagaacgugaauaagaucaccuauggggccugucccagauacgugaaacaaaacacacucaagcuggcuaccggaaugcggaaugucccugaaaaacagacacgcggcauuuucggggccaucgcgggauuuauugagaacggcugggagggcaugguggacgggugguauggauucagacaccagaauagcgaaggcaccgggcaggccgcugaucuuaagagcacgcaagccgcuaucgaccagauuaacggaaaacugaaucggcucaucgagaagacaaacgaaaaguuccaccagaucgagaaagaauuuucugagguugagggccgcauucaagaucuggaaaaguacguggaggacaccaaaaucgaucuuugguccuauaaugccgaacugcucgucgcccuggagaaccagcauaccauugaccugacagauagcgaaaugaauaagcucuuugagaaaaccagaaagcagcugcgggagaacgcugaagacauggggaacggcugcuuuaagaucuaccacaaaugugauaaugcgugcauuggaucuaucagaaacggcacauacgaccaugauguguaucgcgacgaggcccuuaauaaccgguuccagauuaaggggguugaacugaaauccggauacaaggacuggauccucuggaucagcuuugcuauuuccugcuuccugcuuugugugguccugcucggcuuuaucaugugggccugccaaaaagggaauauuagauguaacaucugcauuuga

SEQ ID NO: 200638 - RNA, 1701 nt, Artificial Sequence
  derived and/or modified CDS sequence (opt5) from hemagglutinin__InfluenzaA__AFG99237
augaagaccaucauugcccugagcuacaucuucugccucguguuugcucagaaacugcccggcaacgacaauuccacagccacgcuuugucuggggcaccaugcggucccuaacggaacccucguuaagacaauuaccaaugaucaaaucgaggugacaaacgcuaccgaacuggugcagucuagcuccacaggcagaauuugcgacucuccgcaccggauccuugaugggaaaaauuguacccugaucgacgcccuccugggagauccccauugcgacggcuuccagaacgagaagugggaucuguuugucgaacgcagcaaagccuucuccaauuguuauccuuacgacgugcccgauuaugcuucucucagaagccugguugccuccagcgggacgcuugaguuuauuaacgaagacuucaauuggaccggagugacacagucuggcggcuccuacgcuugcaagcgggagagcgucaacuccuuuuucucucgccugaauuggcucuaugagagcgaauacaaguauccugcccugaacgugaccaugcccaauaacgggaaauuugagaaacuuuacaucuggggaguucaccauccuucuacagauaaggaacaaaccaaucuguacgugagagcguccggccgggucacggugagcacaaagcgcucccagcagaccgugauuccgaacaucgggucuagacccuggguccggggacucagcucccgcauuagcaucuauuggacaauuguuaaaccuggcgacauccugcugaucaacucuaccgggaaucucauugcccccagaggauacuucaagauccggaccggcaaguccagcauuaugcgcucugaugcuccuaucggcacauguagcuccgagugcauuacgcccaacgggucuaucccgaaugacaaaccuuuucagaacgugaauaagaucaccuauggagccugucccagauacgugcggcaaaacacacugaaacuugcuaccggcaugcgcaaugucccugagaagcagacaagagggauuuucggagccaucgcgggcuuuauugaaaacgggugggagggaaugguggacggcugguauggcuuccggcaccagaauagcgaagggaccggacaggccgcugaucugaaauccacgcaagccgcuaucgaccagauuaacggcaagcucaauagacugaucgagaaaacaaacgaaaaguuccaccagaucgagaaggaguuuagcgaaguugaggggcgcauucaagaucuugaaaaauacguggaggacaccaagaucgaucuguggucuuauaaugccgaacuccuggucgcccuggagaaccagcauaccauugaccucacagauuccgagaugaauaaacuguucgaaaagacccggaaacagcuuagagagaacgcugaagacaugggaaacggcugcuuuaagaucuaccacaagugugauaaugcgugcauugggagcauccgcaacggcacauacgaccaugauguguaucgggacgaggcccugaauaacagauuccagauuaaaggaguugaacucaagucuggcuacaaagacuggauccuguggaucuccuuugcuauuagcugcuuccuucugugugugguccuccugggguuuaucaugugggccugccaaaagggaaauauucgcuguaacaucugcauuuga

SEQ ID NO: 200639 - RNA, 1701 nt, Artificial Sequence
  derived and/or modified CDS sequence (opt5) from hemagglutinin__InfluenzaA__AFG99248
augaagaccaucauugcccugagcuacaucuucugccucguguuugcucagaaacugcccggcaacgacaauuccacagccacgcuuugucuggggcaccaugcggucccuaacggaacccucguuaagacaauuaccaaugaucaaaucgaggugacaaacgcuaccgaacuggugcagucuagcuccacaggcagaauuugcgacucuccgcaccggauccuugaugggaaaaauuguacccugaucgacgcccuccugggagauccccauugcgacggcuuccagaacgagaagugggaucuguuugucgaacgcagcaaagccuauuccaauuguuacccuuaugacgugcccgauuacgcuucucucagaagccugguugccuccagcgggacgcuugaguucauuaacgaagacuuuaauuggaccggagugacacagucuggcggcucccacgcuugcaagcgggggagcgucaacucuuucuuuucccgccugaauuggcuccaugagagcgaguauaaguacccugcccugaacgugaccaugcccaauaacggaaaauucgauaaacuuuauaucuggggcguucaccacccuauuacagacagagaacaaaccaaucuguacgugcgggcgucugggcgcgucacgguguccacaaagagaagccagcagaccgugaucccgaacauuggauuucggcccuggguccgcggccucuccucuagaaucagcauuuacuggacaaucguuaagccuggggauauccugcugauuaacuccaccggaaaucucaucgcuccccggggcuauuucaaaauucgcaacggcaagagcucuaucaugagauccgacgccccuauugggaccuguagcucugagugcaucacacccaauggaagcaucccgaacgacaagccuuuucagaaugugaacaaaauuacguacggcgccuguccccgguaugugaagcaaaauacccugaaacuugcuacagggaugcgcaacgucccugaaaagcagaccagaggaaucuucggcgccauugcgggguuuaucgagaauggaugggagggcaugguggauggcugguacggguuccggcaucagaacuccgaaggaacaggccaggccgcugaccugaaaucuacccaagccgcuauugaucagaucaaugggaagcucaacagacugaucgagaaaacgaaugaaaaguuccaccagauugagaaggaauuuagcgagguugagggacgcauccaagaccuugaaaaauauguggaggauacaaagauugaccugugguccuacaacgccgaacuccuggucgcccuggagaaucagcauaccaucgaucucaccgacagcgaaaugaacaaacuguucgagaagacacggaaacagcuuagagagaacgcugaagauaugggcaaugggugcuuuaagauuuaucacaagugugacaacgcgugcaucggcucuauucgcaauggaaccuacgaucacgacguguaccgggacgaggcccugaacaauagauuccagaucaaaggcguugaacucaaguccggguauaaagauuggauccuguggauuagcuuugcuaucucuugcuuccuucugugugugguccuccugggauuuauuaugugggccugccaaaagggcaacauccgcuguaauauuugcaucuga

SEQ ID NO: 200640 - RNA, 1701 nt, Artificial Sequence
  derived and/or modified CDS sequence (opt5) from hemagglutinin__InfluenzaA__AFG99259
augaagaccaucauugcccugagcuacaucuucugccucguguuugcucagaaacugcccggcaacgacaauuccacagccacgcuuugucuggggcaccaugcggucccuaacggaacccucguuaagacaauuaccaaugaucaaguggaggugacaaacgcuaccgaacugguccagucuagcuccacaggcagaaucugcgacucuccgcaccggauucuugaugggaaaaauuguacccugaucgacgcccuccugggagauccccauugcgacggcuuccagaacgagaagugggaucuguuuguggaacgcagcaaagccuauuccaauuguuacccuuaugacguucccgauuacgcuucucucagaagccugguggccuccagcgggacgcuugaguucaucaacgaagacuuuaauuggaccggagucacacagucuggcggcuccuaugcuugcaagcgggggagcgugaacucuuucuuuucccgccugaauuggcuccacaagagcgaguacaaauauccugcccugaacguuaccaugcccaauaacggaaaguucgauaaacuuuacauuuggggcgugcaucacccuucuacagacagagagcaaaccaaucuguacguccgggcguccgggcgcgugacggugagcacaaagagaucccagcagaccgucaucccgaacauuggaucucggcccuggguucgcggccucagcuccagaaucagcauuuauuggacaaucgugaaaccuggggauauucugcugaucaacucuaccggaaaucucaucgcuccccggggcuacuuuaagauucgcaccggcaaguccagcaucaugagaucugacgccccuauugggacauguagcuccgaaugcaucacgcccaacggaucuauuccgaaugacaaaccuuuccagaacgugaauaagaucaccuauggcgccuguccccgguacgucaaacaaaacacacugaaacuugcuaccgggaugcgcaaugugccugagaaacagacaagaggaaucuuuggcgccauugcgggguucaucgaaaacggaugggagggcaugguugauggcugguauggguuucggcaccagaauagcgagggaaccggccaggccgcugaccugaaguccacgcaagccgcuauugaucagaucaacgggaaacucaauagacugauugaaaagacaaacgagaaguuccaucagaucgaaaaagaguucagcgaaguggagggacgcauccaagaccuugagaaguacgucgaagauaccaaaauugaccuguggucuuauaaugccgagcuccugguggcccuggaaaaccagcacaccaucgaucucacagacuccgagaugaauaagcuguuugaaaagacccggaagcagcuuagagagaacgcugaggauaugggcaacgggugcuucaagauuuaccauaaaugugacaaugcgugcaucggcagcauucgcaacggaacauacgaucacgacguuuaucgggacgaagcccugaauaacagauuucagaucaagggcguggagcucaaaucuggguacaaggauuggauucuguggaucuccuucgcuaucagcugcuuucuucugugugucgugcuccugggauucauuaugugggccugccaaaaaggcaauauccgcuguaacauuugcaucuga

SEQ ID NO: 200641 - RNA, 1701 nt, Artificial Sequence
  derived and/or modified CDS sequence (opt5) from hemagglutinin__InfluenzaA__AFG99270
augaagaccaucauugcccugagcuacaucuucugccucguguuugcucagaaacugcccggcaacgacaauuccacagccacgcuuugucuggggcaccaugcggucccuaacggaacccucguuaagacaauuaccaaugaucaaaucgaggugacaaacgcuaccgaacuggugcagucuagcuccacaggcagaauuugcgacucuccgcaccggauccuugaugggaaaaauuguacccugaucgacgcccuccugggagauccccauugcgacggcuuccagaacaaggagugggaucuguuugucgaacgcagcaaagccuauuccaauuguuacccuuaugacgugcccgauuacgcuucucucagaagccugguugccuccagcgggacgcuugaguucauuaacgaagacuuuaauuggaccggaguggcucagucuggcggcuccuaugccugcaagcgggggagcgucaacucuuucuuuucccgccugaauuggcuccacaagagcgaguacaaauauccugcgcugaacgugacaaugcccaauaacggaaaguucgauaaacuuuacaucuggggcguucaucacccuucuaccgacagagagcaaacaaaucuguacgugcgggccuccgggcgcgucaccgugagcacgaagagaucccagcagacagugauuccgaacaucggaucucggcccuggguccgcggccucagcuccagaauuagcaucuauuggaccauuguuaaaccuggggauauccugcugaucaacucuacaggaaaucucauugcuccccggggcuacuuuaagauccgcaccggcaaguccagcauuaugagaucugacgccccuaucgggaccuguagcuccgaaugcauuacacccaacggaucuaucccgaaugacaaaccuuuccagaacgugaaucggaucacguauggcgcuuguccccgcuacgugaagcaaaacacccugaaacuugccacagggaugagaaaugucccugagaagcagacccggggaauuuuuggcgcgaucgccggguucauugaaaacggaugggagggcaugguggauggcugguauggguuuagacaccauaauagcgagggaacaggccaggcugccgaccugaaauccacccaggcugccaucgaucaaauuaacgggaagcucaaucgccugaucgagaaaacgaacgaaaaguuccaccagaucgaaaaggaguucagcgaaguugagggacggauucaggaccuugagaaauacguggaagauacaaagaucgaccuguggucuuauaaugccgagcuccuggucgcucuggaaaaccaacauaccauugaucucaccgacuccgagaugaauaaacuguuugaaaagacaagaaaacagcuucgcgagaacgcggaggauaugggcaacgggugcuucaagaucuaccacaagugugacaaugccugcauuggcagcauccggaacggaaccuacgaucacgacguguauagagacgaagcucugaauaaccgcuuucagauuaaaggcguugagcucaagucuggguacaaagauuggauccuguggaucuccuucgccauuagcugcuuucuucugugugugguccuccugggauucaucaugugggccugccagaagggcaauauucgguguaacaucugcauuuga

SEQ ID NO: 200642 - RNA, 1701 nt, Artificial Sequence
  derived and/or modified CDS sequence (opt5) from hemagglutinin__InfluenzaA__AFG99281
augaagaccaucauugcccugagcuacaucuucugccucguguuugcucagaaacugcccggcaacgacaauuccacagccacgcuuugucuggggcaccaugcggucccuaacggaacccucguuaagacaauuaccaaugaucaaaucgaggugacaaacgcuaccgaacuggugcagucuagcuccacaggcagaauuugcgacucuccgcaccggauccuugaugggaaaaauuguacccugaucgacgcccuccugggagauccccauugcgacggcuuccagaacgagaagugggaucuguuugucgaacgcagcaaagccuucuccaauuguuauccuuacgacgugcccgauuaugcuucucucagaagccugguugccuccagcgggacgcuugaguuuauuaacgaagaguucaauuggaccggagugacacagucuggcggcuccuacgcuugcaagcgggggagcgucaacuccuuuuucucucgccugaauuggcuccacaagagcgaguauaaauacccugcccugaacgugaccaugcccaauaacggaagauuugacaaacuuuauaucuggggcguucaucacccuucuacagaucgggaacaaaccaaucuguacgugcgcgcguccgggagagucacggugagcacaaaacggucccagcagaccgugauuccgaacaucggaccccgcccuugggucagaggccucucuagccggauuuccaucuacuggacaauuguuaagcccggggacauccugcugaucaacagcaccggaaaucucauugccccucgcggcuauuucaaaauccacaccggcaagucuuccauuaugagaagcgaugcucccaucgggacauguucuagcgagugcauuacgccgaacggauccaucccuaaugacaagcccuuucagaacgugaauaaaaucaccuacggcgccuguccucgguaugugaagcaaaacacacugaaacuugcuaccgggaugcgcaauguccccgacaagcagacaagaggaauuuucggcgccaucgcgggguuuauugaaaacggaugggagggcaugguggauggcugguacggguuccggcaucaaaauucugagggaaccggccaggccgcugaccugaaaagcacgcaggccgcuaucgaucagauuaacgggaagcucaauagacugaucgaaaagacaaacgagaaguuccaccagaucgaaaaggaguuuuccgaaguugagggacgcauucaagaccuugagaaauauguggaagauaccaagaucgaccuguggagcuacaaugccgagcuccuggucgcccuggaaaaccagcauaccauugaucucacagacucugagaugaauaaacuguucgaaaagacccggaaacagcuuagagagaacgcugaggauaugggcaacgggugcuuuaagaucuaucacaagugugacaaugcgugcauuggcuccauccgcaacggaacauacgaucacgacguguaccgggacgaagcccugaauaacagauuccagauuaaaggcguugagcucaagagcggguauaaagauuggauccuguggaucucuuuugcuauuuccugcuuccuucugugugugguccuccugggauuuaucaugugggccugccaaaagggcaauauucgcuguaacaucugcauuuga

SEQ ID NO: 200643 - RNA, 1701 nt, Artificial Sequence
  derived and/or modified CDS sequence (opt5) from hemagglutinin__InfluenzaA__AFG99292
augaagaccaucauugcccugagcuacaucuucugccucguguuugcucagaaacugcccggcaacgacaauuccacagccacgcuuugucuggggcaccaugcggucccuaacggaacccucguuaagacaauuaccaaugaucaaguggaggugacaaacgcuaccgaacugguccagucuagcuccacaggcagaaucugcgacucuccgcaccggauucuugaugggaaaaauuguacccugaucgacgcccuccugggagauccccauugcgacggcuuccagaacgagaagugggaucuguuuguggaacgcagcaaagccuauuccaauuguuacccuuaugacguucccgauuacgcuucucucagaagccugguggccuccagcgggacgcuugaguucaucaacgaagacuuuaauuggaccggagucacacagucuggcggcuccuaugcuugcaagcgggggagcgugaacucuuucuuuucccgccugaauuggcuccacgagagcgaguacaaguauccugcccugaacguuaccaugcccaauaacggaaaauucgauaaacuuuacauuuggggcgugcaucacccuucuacagacagagaacaaaccaaucuguacguccgggcguccgggcgcgugacggugagcacaaagagaucccagcagaccgucaucccgaacauuggaucucggcccuggguucgcggccucagcuccagaaucagcauuuauuggacaaucgugaagccuggggauauucugcugaucaacucuaccggaaaucucaucgcuccccggggcuacuuuaaaauucgcaccggcaaguccagcaucaugagaucugacgccccuauugggacauguagcuccgagugcaucacgcccaacggaucuauuccgaaugacaagccuuuccagaacgugaauaaaaucaccuauggcgccuguccccgguacgucaagcaaaacacacugaaacuugcuaccgggaugcgcaaugugccugaaaagcagacaagaggaaucuuuggcgccauugcgggguucaucgagaacggaugggagggcaugguugauggcugguauggguuucggcaccagaauagcgaaggaaccggccaggccgcugaccugaaauccacgcaagccgcuauugaucagaucaacgggaagcucaauagacugauugagaaaacaaacgaaaaguuccaucagaucgagaaggaguucagcgaaguggagggacgcauccaagaccuugaaaaauacgucgaggauaccaagauugaccuguggucuuauaaugccgaacuccugguggcccuggagaaccagcacaccaucgaucucacagacuccgaaaugaauaaacuguuugagaagacccggaaacagcuuagagagaacgcugaagauaugggcaacgggugcuucaagauuuaccauaagugugacaaugcgugcaucggcagcauucgcaacggaacauacgaucacgacguuuaucgggacgaggcccugaauaacagauuucagaucaaaggcguggaacucaagucuggguacaaagauuggauucuguggaucuccuucgcuaucagcugcuuucuucugugugucgugcuccugggauucauuaugugggccugccaaaagggcaauauccgcuguaacauuugcaucuga

SEQ ID NO: 200644 - RNA, 1701 nt, Artificial Sequence
  derived and/or modified CDS sequence (opt5) from hemagglutinin__InfluenzaA__AFG99303
augaagaccaucauugcccugagcuacaucuucugccucguggucgcucagaaacugcccggcaacgacaauuccacagccacgcuuugucuggggcaccaugcgguuccuaacggaacccucgugaagacaauuaccaaugaucaaaucgaggugacaaacgcuaccgaacugguccagucuagcuccacaggcagaauuugcgacucuccgcaccggauccuugaugggaaaaauuguacccugaucgacgcccuccugggagauccccauugcgacggcuuucagaacaaggagugggaucuguucguggaacgcagcaaagccuauuccaauuguuacccuuaugacguucccgauuacgcuucucucagaagccugguggccuccagcgggacgcuugaguuuauuaacgaagacuucaauuggaccggagucgcucagucuggcggcuccuaugccugcaagcgggggagcgugaacucuuucuucucccgccugaauuggcuccacgagagcgaguacaaguauccugcgcugaacguuacaaugcccaauaacggaaaauuugauaagcuguacaucuggggcgugcaucacccuucuaccgacagagaacaaacaaaucuguacguccgggccuccgggcgcgugaccgugagcacgaaaagaucccagcagacagucauuccgaacaucggaucucggcccuggguucgcggccucagcuccagaauuagcaucuauuggaccauugugaagccuggggauauccugcugaucaacucuacaggaaaucucauugcuccccggggcuacuucaaaauccgcaccggcaaguccagcauuaugagaucugacgccccuaucgggaccuguagcuccgagugcauuacacccaacggaucuaucagcaaugacaagccguuucagaacgugaaucggaucacguauggcgcuuguccucgcuacgucaaacaaaacacccugaaacuugccacagggaugagaaaugugcccgaaaagcagacccggggaauuuucggcgcgaucgccggguuuauugagaacggaugggagggcaugguugauggcugguauggguucagacaccaaaauuccgaaggaacaggccaggcugccgaccuuaagagcacccaggcugccaucgaucagauuaacgggaaacucaaucgccugaucgagaagacgaacgaaaaauuucaucagaucgagaaggaauuuucugagguggagggacggauucaagaccuugaaaaguacgucgaggauacaaaaaucgaccugugguccuauaaugccgaacuccugguggcucuggagaaccagcacaccauugaucucaccgacagcgaaaugaauaagcuguucgagaaaacaagaaagcagcuucgcgagaacgcggaagauaugggcaacgggugcuuuaaaaucuaccauaagugugacaaugccugcauuggcucuauccggaacggaaccuacgaucacgacguuuauagagacgaggcucugaauaaccgcuuccagauuaagggcguggaacucaaauccggguacaaggauuggauccuguggaucagcuuugccauuuccugcuuccuucugugugucgugcuccugggauuuaucaugugggccugccaaaaaggcaauauucgguguaacaucugcauuuga

SEQ ID NO: 200645 - RNA, 1701 nt, Artificial Sequence
  derived and/or modified CDS sequence (opt5) from hemagglutinin__InfluenzaA__AFG99314
augaagaccaucauugcccugagcuacaucuucugccucguguuugcucagaaacugcccggcaacgacaauuccacagccacgcuuugucuggggcaccaugcggucccuaacggaacccucguuaagacaauuaccaaugaucaaaucgaggugacaaacgcuaccgaacuggugcagucuagcuccacaggcagaauuugcgacucuccgcaccggauccuugaugggaaaaauuguacccugaucgacgcccuccugggagauccccauugcgacagcuuccagaacgagaagugggaucuguuugucgaacgcuccaaagccuauucuaauuguuacccuuaugacgugcccgauuacgcuagccucagaucccugguugccagcucuggcacgcuugaguucauuaacgaagacuuuaauuggaccggggugacacaguccggaggcagcuaugcuugcaagcggggcucugucaacuccuucuuuagccgccugaauuggcuccacgagucugaguacaaguauccugcccugaacgugaccaugcccaauaacgggaaauucgauaaacuuuacaucuggggcauucaucacccuuccacagacagagaacaaaccaaucuguacguucgggcgagcggacgcgugacggucuccacaaagagaucucagcagaccgugaucccgaacauugggagccggcccugggugcgcggacucuccagcagaaucucuauuuauuggacaaucgucaagccuggcgauauccugcugauuaacuccaccgggaaucucaucgcuccccggggauacuuuaaacugcgcaccggcaagagcucuauuaugagaagcgacgccccuaucggcacauguuccucugagugcauuacgcccaacgggagcaucccgaaugacaagccuuuccagaacguuaauaaaaucaccuauggagccuguccccgguacgugaagcaaaacacacuuaaacuggcuaccggcaugcgcaaugugccugaaaagcagacaagagggauuuuuggagccaucgcgggcuucauugagaacgggugggagggaauggucgauggcugguauggcuuucggcaccaaaauuccgaagggaccggacaggccgcugaccucaaaagcacgcaggccgcuaucgaucagauuaacggcaagcugaauagacuuaucgagaaaacaaacgaaaaguuccaucagaucgagaaggaguucucugaaguggaggggcgcauucaagaccuggaaaaauacguugaggauaccaagaucgaccucugguccuauaaugccgaacugcugguggcccucgagaaccagcacaccauugaucugacagacagcgaaaugaauaaacuuuuugagaagacccggaaacagcugagagagaacgcugaagauaugggaaacggcugcuucaagaucuaccauaagugugacaaugcgugcauugggucuauccgcaacggcacauacgaucacgacgucuaucgggacgaggcccucaauaacagauuucagauuaaaggaguggaacugaaguccggcuacaaagauuggauccuuuggaucagcuucgcuauuuccugcuuucugcucuguguugugcugcugggguucaucaugugggccugccaaaagggaaauauucgcuguaacaucugcauuuga

SEQ ID NO: 200646 - RNA, 1701 nt, Artificial Sequence
  derived and/or modified CDS sequence (opt5) from hemagglutinin__InfluenzaA__AFG99336
augaagaccaucauugcccugagcuacaucuucugccucguguuugcucagaaacugcccggcaacgacaauuccacagccacgcuuugucuggggcaccaugcggucccuaacggaacccucguuaagacaauuaccaaugaucaaaucgaggugacaaacgcuaccgaacuggugcagucuagcuccacaggcagaauuugcgacucuccgcaccggauccuugaugggaaaaauuguacccugaucgacgcccuccugggagauccccauugcgacggcuuccagaacaaggagugggaucuguuugucgaacgcagcaaagccuauuccaauuguuacccuuaugacgugcccgauuacgcuucucucagaagccugguugccuccagcgggacgcuugaguucauuaacgaagacuuuaauuggaccggaguggcucagucuggcggcuccuaugccugcaagcgggggagcgucaacucuuucuuuucccgccugaauuggcuccacaagagcgaguacaaauauccugcgcugaacgugacaaugcccaauaacggaaaguucgauaaacuuuacaucuggggcguucaucacccuucuaccgacagagagcaaacaaaucuguacgugcgggccuccgggcgcgucaccgugagcacgaagagaucccagcagacagugauuccgaacaucggaucucggcccuggguccgcggccucagcuccagaauuagcaucuauuggaccauuguuaaaccuggggauauccugcugaucaacucuacaggaaaucucauugcuccccggggcuacuuuaagauccgcaccggcaaguccagcauuaugagaucugacgccccuaucgggaccuguagcuccgaaugcauuacacccaacggaucuaucccgaaugacaaaccuuuccagaacgugaaucggaucacguauggcgcuuguccccgcuacgugaagcaaaacacccugaaacuugccacagggaugagaaaugucccugagaagcagacccggggaauuuuuggcgcgaucgccggguucauugaaaacggaugggagggcaugguggauggcugguauggguuuagacaccagaauagcgagggaacaggccaggcugccgaccugaaauccacccaagcugccaucgaucagauuaacgggaagcucaaucgccugaucgagaaaacgaacgaaaaguuccaucagaucgaaaaggaguucagcgaaguugagggacggauucaagaccuugagaaauacguggaagauacaaagaucgaccuguggucuuauaaugccgagcuccuggucgcucuggaaaaccagcacaccauugaucucaccgacuccgagaugaauaaacuguuugaaaagacaagaaaacagcuucgcgagaacgcggaggauaugggcaacgggugcuucaagaucuaccauaagugugacaaugccugcauuggcagcauccggaacggaaccuacgaucacgacguguauagagacgaagcucugaauaaccgcuuucagauuaaaggcguugagcucaagucuggguacaaagauuggauccuguggaucuccuucgccauuagcugcuuucuucugugugugguccuccugggauucaucaugugggccugccaaaagggcaauauucgguguaacaucugcauuuga

SEQ ID NO: 200647 - RNA, 1701 nt, Artificial Sequence
  derived and/or modified CDS sequence (opt5) from hemagglutinin__InfluenzaA__AFG99347
augaagaccaucauugcccugagcuacaucuucugccucguguuugcucagaaacugcccggcaacgacaauuccacagccacgcuuugucuggggcaccaugcggucccuaacggaacccucguuaagacaauuaccaaugaucaaaucgaggugacaaacgcuaccgaacuggugcagucuagcuccacaggcagaauuugcgacucuccgcaccggauccuugaugggaaaaauuguacccugaucgacgcccuccugggagauccccauugcgacggcuuccagaacaaggagugggaucuguuugucgaacgcagcaaagccuauuccaauuguuacccuuaugacgugcccgauuacgcuucucucagaagccugguugccuccagcgggacgcuugaguucauuaacgaagacuuuaauuggaccggaguggcucagucuggcggcuccuaugccugcaagcgggggagcgucaacucuuucuuuucccgccugaauuggcuccacaagccugaguacaaauaucccgcgcugaacgugacaaugccuaauaacggaaaguucgauaaacuuuacaucuggggcguucaucacccgagcaccgacagagagcaaacaaaucuguacgugcgggccucugggcgcgucaccguguccacgaagagaagccagcagacagugauucccaacaucggaucccggccuuggguccgcggccucucuagcagaauuuccaucuauuggaccauuguuaaacccggggauauccugcugaucaacagcacaggaaaucucauugcuccucggggcuacuuuaagauccgcaccggcaagucuuccauuaugagaagcgacgcccccaucgggaccuguucuagcgaaugcauuacaccgaacggauccaucccuaaugacaaacccuuccagaacgugaaucggaucacguauggcgcuuguccucgcuacgugaagcaaaacacccugaaacuugccacagggaugagaaauguccccgagaagcagacccggggaauuuuuggcgcgaucgccggguucauugaaaacggaugggagggcaugguggauggcugguauggguuuagacaccaaaauucugagggaacaggccaggcugccgaccugaaaagcacccaggcugccaucgaucagauuaacgggaagcucaaucgccugaucgacaaaacgaacgaaaaguuccaucagaucgagaaggaguucuccgaaguugaaggacggauucaagaucuugagaaauacguggaggacacaaagaucgaucuguggagcuauaaugccgaacuccuggucgcucuggagaaccagcacaccauugaccucaccgauucugaaaugaauaaacuguuugagaagacaagaaaacagcuucgcgaaaacgcggaggacaugggcaacgggugcuucaagaucuaccauaagugugauaaugccugcauuggcuccauccggaacggaaccuacgaccacgacguguauagagaugaggcucugaauaaccgcuuucagauuaaaggcguugaacucaagagcggguacaaagacuggauccuguggaucucuuucgccauuuccugcuuucuucugugugugguccuccugggauucaucaugugggccugccaaaagggcaauauucgguguaacaucugcauuuga

SEQ ID NO: 200648 - RNA, 1701 nt, Artificial Sequence
  derived and/or modified CDS sequence (opt5) from hemagglutinin__InfluenzaA__AFG99358
augaagaccaucauugcccugagccacauccucugccugguguucgcucagaaacuucccggcaacgacaauuccacagccacgcugugucucgggcaucacgcggucccuaacggaacccugguuaagacaauuaccaaugaucaaaucgaggugacaaacgcuaccgaacuugugcagucuagcuccacaggcagaauuugcgacucuccgcaucggauccuggaugggaaaaauuguacccucaucgacgcccugcugggagauccccacugcgacggcuuucagaacaaggagugggaucucuucgucgaacgcagcaaagccuacuccaauuguuauccuuacgacgugcccgauuaugcuucucugagaagccuuguugccuccagcgggacgcuggaguuuauuaacgaagacuucaauuggaccggaguggcucaggauggcggcucuuacgccugcaagcggggguccgucaacagcuuuuucucucgccucaauuggcugcauaaacuugaguauaaguacccugcgcugaacgugacaaugcccaauaacggaaaguuugacaaacucuauaucuggggcguucaccacccuuccaccgauagcgaccaaacaucucuguacgugagagccuccgggcgggucaccgugagcacgaagcgcucccagcagacagugaccccgaauauuggaucuagacccuggguccggggccugagcucccgcaucagcauuuacuggacaaucguuaaaccuggggacauucuccugaucaacucuaucggaaaccuuauugcucccagaggcuauuucaagauccggaauggcaaguccagcauuaugcgcucugaugugccuaucgggaacuguagcuccgagugcauuacccccaauggaucuaucccgaacgacaaaccuuuucagaaugugaacagaaucaccuacggcgccuguccccgguaugucaagcaaaauacacugaaacucgcuacggggaugcgcaacgugccugaaaagcagaccagaggaauuuucggcgccaucgcgggguuuauugagaauggaugggaaggcaugguugauggcugguacggguuccggcaucagaacagcgagggaacaggccaggccgcugaccugaaauccacccaagccgcuaucgaucagauuaaugggaaacuuaacagacugaucgagaagacaaaugaaaaguuucaccagaucgagaaggaguucagcgaaguggaaggacgcauucaagaccucgagaaauaugucgaggauaccaagaucgaccuguggucuuacaacgccgaacugcucguggcccuggagaaucagcauacgauugaucuuacagacuccgaaaugaacaaacuguucgagaagacccggaaacagcucagagaaaacgcugaggauaugggcaaugggugcuuuaagaucuaucacaagugugacaacgcgugcauuggcagcauccgcaauggaaccuacgaccacgauguuuaccgggacgaggcccugaacaauagauuccagauuaaaggcguggaacuuaagucuggguauaaagauuggauccuguggaucuccuuugcuauuagcugcuuccuccugugugucgugcugcucggauuuaucaugugggccugccaaaagggcaacauucgcuguaauaucugcauuuga

SEQ ID NO: 200649 - RNA, 1701 nt, Artificial Sequence
  derived and/or modified CDS sequence (opt5) from hemagglutinin__InfluenzaA__AFG99369
augaagaccaucauugcccugagcuacaucuucugccucguguuugcucagaaacugcccggcaacgacaauuccacagccacgcuuugucuggggcaccaugcggucccuaacggaacccucguuaagacaauuaccaaugaucaaaucgaggugacaaacgcuaccgaacuggugcagucuagcuccacaggcagaauuugcgacucuccgcaccggauccuugaugggaaaaauuguacccugaucgacgcccuccugggagauccccauugcgacggcuuccagaacaaggagugggaucuguuugucgaacgcagcaaagccuauuccaauuguuacccuuaugacgugcccgauuacgcuucucucagaagccugguugccuccagcgggacgcuugaguucauuaacgaagacuuuaauugggcuggaguggcccagucuggcggcuccuaugcgugcaagcgggggagcgucaacucuuucuuuucccgccugaauuggcuccacgagagcgaguacaaguauccugcccugaacgugaccaugcccaauaacggaaaauucgauaaacuuuacaucuggggcguucaucacccuucuacagacagagaacaaaccaaucuguacgugcgggcuuccgggcgcgucacagugagcaccaagagaucccagcagacggugauuccgaacaucggaucucggcccuggguccgcggccucagcuccagaauuagcaucuauuggacaauuguuaagccuggggauauccugcugaucaacucuaccggaaaucucauugcuccccggggcuacuuuaaaauccgcacaggcaaguccagcauuaugagaucugacgccccuaucgggaccuguagcuccgagugcauuacccccaacggaucuaucccgaaugacaagccuuuccagaacgugaaucggaucacauauggcgccuguccccgcuacgugaaacaaaacacgcugaaacuugcgaccgggaugagaaaugucccugaaaagcagacacggggaauuuuuggcgccaucgcuggguucauugagaacggaugggagggcaugguggauggcugguauggguuuagacaccagaauagcgaaggaaccggccaggccgcugaccugaaguccacacaagccgccaucgaucagauuaacgggaaacucaaucgccugaucgagaagaccaacgaaaaauuccaucagaucgagaaggaguucagcgaaguugagggacggauucaagaccuugaaaaguacguggaggauacgaaaaucgaccuguggucuuauaaugcugaacuccuggucgcgcuggagaaccagcacacaauugaucucaccgacuccgaaaugaauaagcuguuugagaaaaccagaaagcagcuucgcgagaacgccgaagauaugggcaacgggugcuucaaaaucuaccauaagugugacaaugcuugcauuggcagcauccggaacggaacauacgaucacgacguguauagagacgaggcccugaauaaccgcuuucagauuaagggcguugaacucaaaucuggguacaaggauuggauccuguggaucuccuucgccaccagcugcuuucuucugugugugguccuccugggauucauuaugugggcuugccaaaaaggcaauauccgguguaacauuugcaucuga

SEQ ID NO: 200650 - RNA, 1701 nt, Artificial Sequence
  derived and/or modified CDS sequence (opt5) from hemagglutinin__InfluenzaA__AFG99380
augaagaccaucauugcccugagcuacaucuucugccucguguuugcucagaaacugcccggcaacgacaauuccacagccacgcuuugucuggggcaccaugcggucccuaacggaacccucguuaagacaauuaccaaugaucaaaucgaggugacaaacgcuaccgaacuggugcagucuagcuccacaggcagaauuugcgacucuccgcaccggauccuugaugggaaaaauuguacccugaucgacgcccuccugggagauccccauugcgacggcuuccagaacaaggagugggaucuguuugucgaacgcagcaaagccuauuccaauuguuacccuuaugacgugcccgauuacgcuucucucagaagccugguugccuccagcgggacgcuugaguucauuaacgaagacuuuaauuggaccggaguggcucagucuggcggcuccuaugccugcaagcgggggagcgucaacucuuucuuuucccgccugaauuggcuccacgagagcgaguacaaguauccugcgcugaacgugacaaugcccaauaacggaaaauucgauaaacuuuacaucuggggcguucaucacccuucuaccgacagagaacaaacaaaucuguacgugcgggccuccgggcgcgucaccgugagcacgaagagaucccagcagacagugauuccgaacaucggaucucggcccuggguccgcggccucagcuccagaauuagcaucuauuggaccauuguuaagccuggggauauccugcugaucaacucuacaggaaaucucauugcuccccggggcuacuuuaaaauccgcaccggcaaguccagcauuaugagaucugacgccccuaucgggaccuguagcuccgagugcauuacacccaacggaucuaucccgaaugacaagccuuuccagaacgugaaucggaucacguauggcgcuuguccccgcuacgugaaacaaaacacccugaaacuugccacagggaugagaaaugucccugaaaagcagacccggggaauuuuuggcgcgaucgccggguucauugagaacggaugggagggcaugguggauggcugguauggguuuagacaccagaauagcgaaggaacaggccaggcugccgaccugaaguccacccaagcugccaucgaucagauuaacgggaaacucaaucgccugaucgagaagacgaacgaaaaauuccaucagaucgagaaggaguucagcgaaguugagggacggauucaagaccuugaaaaguacguggaggauacaaaaaucgaccuguggucuuauaaugccgaacuccuggucgcucuggagaaccagcacaccauugaucucaccgacuccgaaaugaauaagcuguuugagaaaacaagaaagcagcuucgcgagaacgcggaagauaugggcaacgggugcuucaaaaucuaccauaagugugacaaugccugcauuggcagcauccggaacggaaccuacgaucacgacguguauagagacgaggcucugaauaaccgcuuucagauuaagggcguugaacucaaaucuggguacaaggauuggauccuguggaucuccuucgccauuagcugcuuucuucugugugugguccuccugggauucaucaugugggccugccaaaaaggcaauauucgguguaacaucugcauuuga

SEQ ID NO: 200651 - RNA, 1701 nt, Artificial Sequence; identical to SEQ ID NO: 200650
  derived and/or modified CDS sequence (opt5) from hemagglutinin__InfluenzaA__AFG99391

SEQ ID NO: 200652 - RNA, 1701 nt, Artificial Sequence
  derived and/or modified CDS sequence (opt5) from hemagglutinin__InfluenzaA__AFG99402
augaagaccaucauugcccugagcuacaucuucugccucguguuugcucagaaacugcccggcaacgacaauuccacagccacgcuuugucuggggcaccaugcggucccuaacggaacccucguuaagacaauuaccaaugaucaaaucgaggugacaaacgcuaccgaacuggugcagucuagcuccacaggcagaauuugcgacucuccgcaccggauccuugaugggaaaaauuguacccugaucgacgcccuccugggagauccccauugcgacggcuuccagaacgagaagugggaucuguuugucgaacgcagcaaagccuauuccaauuguuacccuuaugacgugcccgauuacgcuucucucagaagccugguugccuccagcgggacgcuugaguucauuaacgaagacuuuaauuggaccggagugacacagucuggcggcuccuaugcuugcaagcgggggagcgucaacucuuucuuuucccgccugaauuggcuccacaagagcgaguacaaauauccugcccugaacgugaccaugcccaauaacggaaaguucgauaaacuuuacaucuggggcguucaucacccugugacagacagagagcaaaccaaucuguacguccgggcgucugggcgcgugacgguguccacaaagagaagccagcagaccgucauuccgaacaucggaucccggcccuggguucgcggccucucuagcagaauuuccaucuauuggacaauugugaaaccuggggauauccugcugaucaacagcaccggaaaucucauugcuccccggggcuacuuuaagauccgcaccggcaagucuuccauuaugagaagcgacgccccuaucgggacauguucuagcgaaugcauuacgcccaacggauccaucccgaaugacaaaccuuuccagaacgugaauaagaucaccuauggcgccuguccccgguacgucaaacaaaacacacugaaacuugcuaccgggaugcgcaaugugccugagaaacagacaagaggaauuuuuggcgccaucgcgggguucauugaaaacggaugggagggcaugguugauggcugguauggguuucggcaccagaauagcgagggaaccggccaggccgcugaccugaagucuacgcaagccgcuaucgaucagauuaacgggaaacucaauagacugaucgaaaagacaaacgagaaguuccaucagaucgaaaaagaguucuccgaaguggagggacgcauucaagaccuugagaaguacgucgaagauaccaaaaucgaccuguggagcuauaaugccgagcuccugguggcccuggaaaaccagcacaccauugaucucacagacucugagaugaauaagcuguuugaaaagacccggaagcagcuuagagagaacgcugaggauaugggcaacgggugcuucaagaucuaccauaaaugugacaaugcgugcauuggcuccauccgcaacggaacauacgaucacgacguuuaucgggacgaagcccugaauaacagauuucagauuaagggcguggagcucaaaagcggguacaaggauuggauccuguggaucucuuucgcuauuuccugcuuucuucugugugucgugcuccugggauucaucaugugggccugccaaaaaggcaauauucgcuguaacaucugcauuuga

SEQ ID NO: 200653 - RNA, 1701 nt, Artificial Sequence
  derived and/or modified CDS sequence (opt5) from hemagglutinin__InfluenzaA__AFG99413
augaagaccaucauugcccugagcuacaucuucugccucguguuugcucagaaacugcccggcaacgacaauuccacagccacgcuuugucuggggcaccaugcggucccuaacggaacccucguuaagacaauuaccaaugaucaaaucgaggugacaaacgcuaccgaacuggugcagucuagcuccacaggcagaauuugcgacucuccgcaccggauccuugaugggaaaaauuguacccugaucgacgcccuccugggagauccccauugcgacggcuuccagaacaaggagugggaucuguuugucgaacgcagcaaagccuauuccaauuguuacccuuaugacgugcccgauuacgcuucucucagaagccugguugccuccagcgggacgcuugaguucauuaacgaagacuuuaauuggaccggaguggcucagucuggcggcuccuaugccugcaagcgggggagcgucaacucuuucuuuucccgccugaauuggcuccacgagagcgaguacaaguauccugcgcugaacgugacaaugcccaauaacggaaaauucgauaaacuuuacaucuggggcguucaucacccuucuaccgacagagaacaaacaaaucuguacgugcgggccuccgggcgcgucaccgugagcacgaagagaucccagcagacagugauuccgaacaucggaucucggcccuggguccgcggccucagcuccagaauuagcaucuauuggaccauuguuaagccuggggauauccugcugaucaacucuacaggaaaucucauugcuccccggggcuacuuuaaaauccgcaccggcaaguccagcauuaugagaucugacgccccuaucgggaccuguagcuccgagugcauuacacccaacggaucuaucccgaaugacaagccuuuccagaacgugaaucggaucacguauggcgcuuguccccgcuacgugaaacaaaacacccugaaacuugccacagggaugagaaaugucccugaaaagcagacccggggaauuuuuggcgcgaucgccggguucauugagaacggaugggagggcaugguggauggcugguauggguuuagacaccagaauagcgaaggaacaggccaggcugccgaccugaaguccacccaagcugccaucgaucagauuaacgggaaacucaaucgccugaucgagaagacgaacgaaaaauuccaucagaucgagaaggaguucagcgaaguugagggacggauucaagaccuugaaaaguacguggaggauacaaaaaucgaccuguggucuuauaaugccgaacuccuggucgcucuggagaaccagcacaccauugaucucaccgacuccgaaaugaauaagcuguuugagaaaacaagacgccagcuucgggagaacgcggaagauaugggcaacgggugcuucaagaucuaccauaaaugugacaaugccugcauuggcagcaucagaaacggaaccuacgaucacgacguguaucgcgacgaggcucugaauaaccgguuucagauuaagggcguugaacucaagucuggguacaaagauuggauccuguggaucuccuucgccauuagcugcuuucuucugugugugguccuccugggauucaucaugugggccugccaaaagggcaauauuagauguaacaucugcauuuga

SEQ ID NO: 200654 - RNA, 1701 nt, Artificial Sequence
  derived and/or modified CDS sequence (opt5) from hemagglutinin__InfluenzaA__AFG99424
augaagaccaucauugcccugagcuacaucuucugccucguguuugcucagaaacugcccggcaacgacaauuccacagccacgcuuugucuggggcaccaugcggucccuaacggaacccucguuaagacaauuaccaaugaucaaaucgaggugacaaacgcuaccgaacuggugcagucuagcuccacaggcagaauuugcgacucuccgcaccggauccuugaugggaaaaauuguacccugaucgacgcccuccugggagauccccauugcgacggcuuccagaacaaggagugggaucuguuugucgaacgcagcaaagccuauuccaauuguuacccuuaugacgugcccgauuacgcuucucucagaagccugguugccuccagcgggacgcuugaguucauuaacgaagacuuuaauuggaccggaguggcucagucuggcggcuccuaugccugcaagcgggggagcgucaacucuuucuuuucccgccugaauuggcuccacaagagcgaguacaaauauccugcgcugaacgugacaaugcccaauaacggaaaguucgauaaacuuuacaucuggggcguucaucacccuucuaccgacagagagcaaacaaaucuguacgugcgggccuccgggcgcgucaccgugagcacgaagagaucccagcagacagugauuccgaacaucggaucucggcccuggguccgcggccucagcuccagaauuagcaucuauuggaccauuguuaaaccuggggauauccugcugaucaacucuacaggaaaucucauugcuccccggggcuacuuuaagauccgcaccggcaaguccagcauuaugagaucugacgccccuaucgggaccuguagcuccgaaugcauuacacccaacggaucuaucccgaaugacaaaccuuuccagaacgugaaucggaucacguauggcgcuuguccccgcuacgugaagcaaaacacccugaaacuugccacagggaugagaaaugucccugagaagcagacccggggaauuuuuggcgcgaucgccggguucauugaaaacggaugggagggcaugguggauggcugguauggguuuagacaccagaauagcgagggaacaggccaggcugccgaccugaaauccacccaagcugccaucgaucagauuaacgggaagcucaaucgccugaucgagaaaacgaacgaaaaguuccaucagaucgaaaaggaguucagcgaaguugagggacggauucaagaccuugagaaauacguggaagauacaaagaucgaccuguggucuuauaaugccgagcuccuggucgcucuggaaaaccagcacaccauugaucucaccgacuccgagaugaauaaacuguuugaaaagacaagacgccagcuucgggagaacgcggaggauaugggcaacgggugcuucaaaaucuaccauaagugugacaaugccugcauuggcagcaucagaaacggaaccuacgaucacgacguguaucgcgacgaagcucugaauaaccgguuucagauuaagggcguugagcucaaaucuggguacaaggauuggauccuguggaucuccuucgccauuagcugcuuucuucugugugugguccuccugggauucaucaugugggccugccaaaaaggcaauauuagauguaacaucugcauuuga

SEQ ID NO: 200655 - RNA, 1701 nt, Artificial Sequence
  derived and/or modified CDS sequence (opt5) from hemagglutinin__InfluenzaA__AFG99435
augaagaccaucauugcccugagcuacaucuucugccucguguuugcucagaaacugcccggcaacgacaauuccacagccacgcuuugucuggggcaccaugcggucccuaacggaacccucguuaagacaauuaccaaugaucaaaucgaggugacaaacgcuaccgaacuggugcagaauagcagcacaggcagaauuugcgacuccccgcaccggauccuugaugggaaaaacuguacccugaucgacgcccuccugggagauccccauugcgacggccugcagaauaaggagugggaucucuucgucgaacgcucuaaagccuauagcaacuguuacccuuaugacgugcccgauuacgcuucccugagaucucuuguugccagcuccgggacgcuggaguuuaccaaggaagacuucaauuggacaggaguggcucagagcggcggcucuuaugccugcaagcggggguccgucaacagcuuuuucucucgccucaauuggcugcacgaguccgaguacaaauauccugcgcuuaacgugaccaugcccaauaacggaaaguuugauaaacuguacauuuggggcguucaucacccuagcacagacagagaacaaaccaaucucuacgugcgggccucugggcgcgucacgguguccacaaagagaagccagcagaccgugaucccgaacauuggaucccggcccuggguccgcggccugucuagcagaaucuccauuuauuggacaaucguuaaaccuggggauauucugcucaucaacagcaccggaaaucugaucgcuccccggggcuacuucaagauucgcaccggcaagucuuccaucaugagaagcgacgccccuauugggacauguucuagcgagugcaucacgcccaacggauccauuccgaaugacaaaccuuuucagaacgugaaucggaucaccuauggcgcuuguccccgcuacgugaagcaaaacacacuuaaacuggccaccgggaugagaaaugucccugaaaagcagacacggggaaucuucggcgcgauugccggguuuaucgagaacggaugggagggcaugguggauggcugguauggguucagacaccaaaauucugaaggaaccggccaggcugccgaccucaaaagcacgcaggcugccauugaucagaucaacgggaagcugaaucgccuuauugagaaaacaaacgaaaaguuucaucagaucgagaaggaguucuccgaaguugagggacggauccaagaccuggaaaaauacguggaggauaccaagauugaccucuggagcuauaaugccgaacugcuggucgcucucgagaaccagcacaccaucgaucugacagacucugaaaugaauaaacuuuucgagaagaccagaaaacagcugcgcgagaacgcggaagauaugggcaacgggugcuuuaagauuuaccauaagugugacaaugccugcaucggcuccauucggaacggaacauacgaucacgacguguauagagacgaggcucucaauaaccgcuuccagaucaaaggcguugaacugaagucuggguacaaagauuggauucuuuggaucucuuuugccaucuccugcuuccugcucugugugguccugcugggauuuauuaugugggccugccaaaagggcaauauccgguguaacauuugcaucuga

SEQ ID NO: 200656 - RNA, 1701 nt, Artificial Sequence; identical to SEQ ID NO: 200655
  derived and/or modified CDS sequence (opt5) from hemagglutinin__InfluenzaA__AFG99446

SEQ ID NO: 200657 - RNA, 1701 nt, Artificial Sequence
  derived and/or modified CDS sequence (opt5) from hemagglutinin__InfluenzaA__AFG99457
augaagaccaucauugcccugagcuacauccucugccugguguucgcucagaaacuucccggcaacgacaauuccacagccacgcugugucucgggcaccaugcggucccuaacggaacccugguuaagacaauuaccaaugaucaaaucgaggugacaaacgcuaccgaacuugugcagucuagcuccacaggcagaauuugcgacucuccgcaccggauccuggauggggagaauuguacccucaucgacgcccugcugggagauccccauugcgacggcuuucagaacaaagaaugggaucucuucgucgagcgcagcaaggccuauuccaauuguuacccuuaugacgugcccgauuacgcuucucugagaagccuuguugccuccagcgggacgcuggaauuuauuaacgaggacuucaauuggaccggaguggcucagucuggcggcuccuaugccugcaaacgggggagcgucaacagcuuuuucucccgccucaauuggcugcacaagagcgaguacaaguauccugcgcuuaacgugacaaugcccaauaacggaaaauuugauaagcuguacaucuggggcguucaucacccuucuaccgacagagaucaaacaucccucuacgugcgggccagcgggcgcgucaccguguccacgaaaagaucucagcagacagugauuccgaauaucggaagccggcccuggguccgcggccaguccagcagaauuucuaucuauuggaccauuguuaagccuggggacauccugcugaucaacuccacaggaaaccucauugcuccccggggcuacuucaaaauccgcaauggcaagagcucuauuaugagaagcgacgccccuaucgggaccuguuccucugaaugcauuacccccaacggaagcaucccgaaugauaagccuuuucaaaacgugaaucggaucacauauggcgcuuguccccgcuacgugaaacagaacacgcugaaacuugccaccgggaugagaaaugucccugagaaacagacacggggaauuuucggcgcgaucgccggguuuauugaaaacggaugggagggcaugguggacggcugguauggguucagacaccaaaauuccgagggaaccggccaggcugccgaucugaagucuacacaggcugccaucgaccagauuaacgggaaacucaaucgccugaucgaaaagaccaacgagaaauuucaucaaaucgaaaaggaguucucugaaguugagggacggauucaggaucuugagaaguacguggaagacacgaaaaucgaucugugguccuauaaugccgagcuccuggucgcucuggaaaaccagcacacaauugaccucaccgauagcgagaugaauaagcuguucgaaaagaccagaaagcagcuucgcgagaacgcggaggacaugggcaacgggugcuuuaaaaucuaccauaagugugauaaugccugcauuggcucuauccggaacggaacauacgaccacgacguguauagagaugaagcucugaauaaccgcuuccaaauuaagggcguugagcucaaauccggguacaaggacuggauccuguggaucagcuuugccauuuccugcuuccuucugugugugguccuccugggauuuaucaugugggccugccagaaaggcaauauucgguguaacaucugcauuuga

SEQ ID NO: 200658 - RNA, 1701 nt, Artificial Sequence
  derived and/or modified CDS sequence (opt5) from hemagglutinin__InfluenzaA__AFG99468
augaagaccaucauugcccugagcuacaucuucugccucguguuugcucagaaacugcccggcaacgacaauuccacagccacgcuuugucuggggcaccaugcggucccuaacggaacccucguuaagacaauuaccaaugaucaaaucgaggugacaaacgcuaccgaacuggugcagucuagcuccacaggcagaauuugcgacucuccgcaccggauccuugaugggaaaaauuguacccugaucgacgcccuccugggagauccccauugcgacggcuuccagaacaaggagugggaucuguuugucgaacgcagcaaagccuauuccaauuguuacccuuaugacgugcccgauuacgcuucucucagaagccugguugccuccagcgggacgcuugaguucauuaacgaagacuuuaauuggaccggaguggcucagucuggcggcuccuaugccugcaagcgggggagcgucaacucuuucuuuucccgccugaauuggcuccacgagagcgaguacaaguauccugcgcugaacgugacaaugcccaauaacggaaaauucgauaaacuuuacaucuggggcguucaucacccuucuaccgacagagaacaaacaaaucuguacgugcgggccuccgggcgcgucaccgugagcacgaagagaucccagcagacagugauuccgaacaucggaucucggcccuggguccgcggccucagcuccagaauuagcaucuauuggaccauuguuaagccuggggauauccugcugaucaacucuacaggaaaucucauugcuccccggggcuacuuuaaaauccgcaccggcaaguccagcauuaugagaucugacgccccuaucgggaccuguagcuccgagugcauuacacccaacggaucuaucccgaaugacaagccuuuccagaacgugaaucggaucacguauggcgcuuguccccgcuacgugaaacaaaacacccugaaacuugccacagggaugagaaaugucccugaaaagcagacccggggaauuuuuggcgcgaucgccggguucauugagaacggaugggagggcaugguggauggcugguauggguuuagacaccagaauagcgaaggaacaggccaggcugccgaccugaaguccacccaagcugccaucgaucagauuaacgggaaacucaaucgccugaucgagaagacgaacgaaaaauuccaucagaucgagaaggaguucagcgaaguugagggacggauucaagaccuugaaaaguacguggaggauacaaaaaucgaccuguggucuuauaaugccgaacuccuggucgcucuggagaaccagcacaccauugaucucaccgacuccgaaauggauaagcuguuugagaaaacaagaaagcagcuucgcgagaaugcggaagacaugggcaacgggugcuucaaaaucuaccauaagugugauaacgccugcauuggcagcauccggaauggaaccuacgaccacgacguguauagagaugaggcucugaacaaucgcuuucagauuaagggcguugaacucaaaucuggguacaaggacuggauccuguggaucuccuucgccauuagcugcuuucuucugugugugguccuccugggauucaucaugugggccugccaaaaaggcaacauucgguguaauaucugcauuuga

SEQ ID NO: 200659 - RNA, 1701 nt, Artificial Sequence
  derived and/or modified CDS sequence (opt5) from hemagglutinin__InfluenzaA__AFG99490
augaagaccaucauugcccugagcuacauccucugccugguguucgcucagaaacuucccggcaacgacaauuccacagccacgcugugucucgggcaccaugcggucccuaacggaacccugguuaagacaauuaccaaugaucaaaucgaggugacaaacgcuaccgaacuugugcagucuagcuccacaggcagaauuugcgacucuccgcaccggauccuggaugggaaaaauuguacccucaucgacgcccugcugggagauccccauugcgacggcuuucagaacaaggagugggaucucuucauugaacgcagcaaagccuauuccaauuguuacccuuaugacguccccgauuacgcuucucugagaagccuuguggccuccagcgggacgcuggaguuuaucaacgaagacuucaauuggaccggaguugcucagucuggcgaguccuaugccugcaagcggggcagcgugaaguccuuuuucucucgccucaacuggcugcacgagagcgaauacaaauauccugcgcuuaaugucacaaugcccaacaaugggaaguuugauaaacuguacauuuggggagugcaucacccuucuaccgacagagagcaaacaucccucuacguucgggccagcggccgcgugaccgucuccacgaagagaucucagcagacagugaucccgaacauugggagccggcccugggugcgcggacuguccagcagaaucucuauuuauuggaccaucgucaaaccuggcgauauccugcucauuaauuccacagggaaccugaucgcuccccggggauacuucaagauucgcaccggcaagagcucuaucaugagaagcgacgccccuauuggcaccuguuccucugaaugcaucacacccaacgggagcaucccgaaugacaaaccuuuucagaacguuaaucggauuacguauggagcuuguccccgcuacgugaagcaaaacacccuuaaacuggccacaggcaugagaaaugugccugagaagcagacccgggggaucuucggagcgauugccggcuuuaucgagaacgggugggaaggaauggucgauggcugguauggcuucagacaccaaaauuccgaggggacaggacaggcugccgaccucaaaagcacccaggcugccauugaucagaucaacggcaagcugaaucgccuuaucgagaaaacgaacgaaaaguuucaucagauugaaaaggaguucucugagguggaagggcggauccaagaccuggagaaauacguugaagauacaaagauugaccucugguccuauaaugccgagcugcugguggcucucgaaaaccagcacaccaucgaucugaccgacagcgagaugaauaaacuuuucgagaagacaagaaaacagcugcgcgaaaacgcggaggauaugggaaauggcugcuuuaagauuuaccauaagugugacaacgccugcaucgggucuauucggaacggcaccuacgaucacgacgucuauagagacgaagcucucaauaaccgcuuccagaucaaaggaguggagcugaaguccggcuacaaagauuggauccuuuggauuagcuuugccaucuccugcuuccugcucuguguugugcugcugggguuuauuaugugggccugccaaaagggaaauauccgguguaacauuugcaucuga

SEQ ID NO: 200660 - RNA, 1701 nt, Artificial Sequence
  derived and/or modified CDS sequence (opt5) from hemagglutinin__InfluenzaA__AFG99501
augaagaccaucauugcccugagcuacaucuucugccucguggucgcucagaaacugcccggcaacgacaauuccacagccacgcuuugucuggggcaccaugcgguuccuaacggaacccucgugaagacaauuaccaaugaucaaaucgaggugacaaacgcuaccgaacugguccagucuagcuccacaggcagaauuugcgacucuccgcaccggauccuugaugggaaaaauuguacccugaucgacgcccuccugggagauccccauugcgacggcuuucagaacaaggagugggaucuguucguggaacgcagcaaagccuauuccaauuguuacccuuaugacguucccgauuacgcuucucucagaagccugguggccuccagcgggacgcuugaguuuauuaacgaagacuucaauuggaccggagucgcucagucuggcggcuccuauacaugcaagcgggggagcgugaacucuuucuucucccgccugaauuggcuccacgagagcgaguacaaguauccugcccugaacguuaccaugcccaauaacggaaaauuugauaagcuguacaucuggggcgugcaucacccuucuacagacagagaacaaaccaaucuguacguccgggcguccgggcgcgugacggugagcacaaaaagaucccagcagaccgucauuccgaacaucggaucucggcccuggguucgcggccucagcuccagaauuagcaucuauuggacaauugugaagccuggggauauccugcugaucaacucuaccggaaaucucauugcuccccggggcuacuucaaaauccgcaccggcaaguccagcauuaugagaucugacgccccuaucgggacauguagcuccgagugcauuacgcccaacggaucuaucagcaaugacaagccguuucagaacgugaaucggaucaccuauggcgccuguccucgcuacgucaaacaaaacacacugaaacuugcuaccgggaugagaaaugugcccgaaaagcagacacggggaauuuucggcgccaucgcgggguuuauugagaacggaugggagggcaugguugauggcugguauggguucagacaccaaaauuccgaaggaaccggccaggccgcugaccuuaagagcacgcaggccgcuaucgaucagauuaacgggaaacucaaucgccugaucgagaagacaaacgaaaaauuucaucagaucgagaaggaauuuucugagguggagggacggauucaagaccuugaaaaguacgucgaggauaccaaaaucgaccugugguccuauaaugccgaacuccugguggcccuggagaaccagcacaccauugaucucacagacagcgaaaugaauaagcuguucgagaaaaccagaaagcagcuucgcgagaacgcugaagauaugggcaacgggugcuuuaaaaucuaccauaagugugacaaugcgugcauuggcucuauccggaacggaacauacgaucacgacguuuauagagacgaggcccugaauaaccgcuuccagauuaagggcguggaacucaaauccggguacaaggauuggauccuguggaucagcuuugcuauuuccugcuuccuucugugugucgugcuccugggauuuaucaugugggccugccaaaaaggcaauauucgguguaacaucugcauuuga

SEQ ID NO: 200661 - RNA, 1701 nt, Artificial Sequence
  derived and/or modified CDS sequence (opt5) from hemagglutinin__InfluenzaA__AFG99512
augaagaccaucauugcccugagcuacauccucugccugguguucgcucagaaacuucccggcaacgacaauuccacagccacgcugugucucgggcaccaugcggucccuaacggaacccugguuaagacaauuaccaaugaucaaaucgaggugacaaacgcuaccgaacuugugcagucuagcuccacaggcagaauuugcgacucuccgcaccggauccuggaugggaaaaauuguacccucaucgacgcccugcugggagauccccauugcgacggcuuucagaacaaggagugggaucucuucgucgaacgcagcaaagccuauuccaauuguuacccuuaugacgugcccgauuacgcuucucugagaagccuuguugccuccagcgggacgcuggaguuuauuaacgaagacuucaauuggaccggaguggcucagucuggcgauuccuaugccugcaagcggggcagcgucaagucuuucuucucccgccucaacuggcugcacgagagcgaguacaaauauccugcgcuuaaugugacaaugcccaacaaugacaaguuugauaaacuguacaucuggggaguucaucacccuucuaccgacagagaacaaacaucccucuacauucgggccagcgggcgcgugaccgucuccacgaagagaucucagcagacagugaucccgaacauuggcagccggcccugggugcgcgggcuguccagcagaaucucuauuuauuggaccaucgucaaaccuggagacauccugcucauuaauuccacaggcaaccugaucgcuccccggggguacuucaagauucgcaccggaaagagcucuaucaugagaagcgaugccccuauuggcaccuguuccucugagugcaucacacccaacggcagcaucccgaaugacaaaccuuuucagaacguuaaucggauuacguauggggcuuguccccgcuacgugaagcaaaacacccuuaaacuggccacaggaaugagaaaugugccugaaaagcagacccggggcaucuucggggcgauugccggauuuaucgagaacggcugggaggggauggucgauggaugguauggcuucagacaccaaaauuccgaaggcacagggcaggcugccgaccucaaaagcacccaggcugccauugaucagaucaacggaaagcugaaucgccuuaucgagaaaacgaacgaaaaguuucaucagauugagaaggaauuuucugagguggagggccggauccaagaccuggaaaaauacguugaggauacaaagauugaccucugguccuauaaugccgaacugcugguggcucucgagaaccagcacaccaucgaucugaccgacagcgaaaugaauaaacuuuucgagaagacaagaaaacagcugcgcgagaacgcggaagauauggggaauggaugcuuuaagauuuaccauaagugugacaacgccugcaucggcucuauucggaacgggaccuacgaccacgaugucuauagagacgaggcucucaauaaccgcuuccagaucaaaggcguggaacugaaguccggauacaaagauuggauccuuuggauuagcuuugccaucuccugcuuccugcucuguguugugcugcugggcuuuauuaugugggccugccaaaaggggaauauccgguguaacauuugcaucuga

SEQ ID NO: 200662 - RNA, 1701 nt, Artificial Sequence
  derived and/or modified CDS sequence (opt5) from hemagglutinin__InfluenzaA__AFG99523
augaagaccaucauugcccugagcuacaucuucugccucguguuugcucagaaacugcccggcaacgacaauuccacagccacgcuuugucuggggcaccaugcggucccuaacggaacccucguuaagacaauuaccaaugaucaaaucgaggugacaaacgcuaccgaacuggugcagucuagcuccacaggcagaauuugcgacucuccgcaccggauccuugaugggaaaaauuguacccugaucgacgcccuccugggagauccccauugcgacggcuuccagaacaaggagugggaucuguuugucgaacgcagcaaagccuauuccaauuguuacccuuaugacgugcccgauuacgcuucucucagaagccugguugccuccagcgggacgcuugaguucauuaacgaagacuuuaauuggaccggaguggcucagucuggcggcuccuaugccugcaagcgggggagcgucaacucuuucuuuucccgccugaauuggcuccacgagagccaauacaaguauccugcgcugaacgugacaaugcccaauaacggaaaauucgauaaacuuuacaucuggggcguucaucacccuucuaccgacagagagcagacaaaucuguacgugcgggccuccgggcgcgucaccgugagcacgaaaagaucccagcagacagugauuccgaacaucggaucucggcccuggguccgcggccucagcuccagaauuagcaucuauuggaccauuguuaagccuggggauauccugcugaucaacucuacaggaaaucucauugcuccccggggcuacuuuaaaauccgcaccggcaaguccagcauuaugagaucugacgccccuaucgggaccuguagcuccgaaugcauuacacccaacggaucuaucccgaaugacaagccuuuccaaaacgugaaucggaucacguauggcgcuuguccccgcuacgugaaacagaacacccugaaacuugccacagggaugagaaaugucccugagaagcagacccggggaauuuuuggcgcgaucgccggguucauugaaaacggaugggagggcaugguggauggcugguauggguuuagacaccagaauagcgagggaacaggccaagcugccgaccugaaguccacccaggcugccaucgaucagauuaacgggaaacucaaucgccugaucgaaaagacgaacgagaaauuccaucaaaucgaaaaggaguucagcgaaguugagggacggauucaggaccuugagaaguacguggaagauacaaaaaucgaccuguggucuuauaaugccgagcuccuggucgcucuggaaaaccagcacaccauugaucucaccgacuccgagaugaauaagcuguuugaaaagacaagaaagcagcuucgcgagaacgcggaggauaugggcaacgggugcuucaaaaucuaccauaagugugacaaugccugcauuggcagcauccggaacggaaccuacgaucacgacguguauagagacgaagcucugaauaaccgcuuucaaauuaagggcguugagcucaaaucuggguacaaggauuggauccuguggaucuccuucgccauuagcugcuuucuucugugugugguccuccugggauucaucaugugggccugccagaaaggcaauauucgguguaacaucugcauuuga

SEQ ID NO: 200663 - RNA, 1701 nt, Artificial Sequence; identical to SEQ ID NO: 200559
  derived and/or modified CDS sequence (opt5) from hemagglutinin__InfluenzaA__AFG99534

SEQ ID NO: 200664 - RNA, 1701 nt, Artificial Sequence; identical to SEQ ID NO: 200559
  derived and/or modified CDS sequence (opt5) from hemagglutinin__InfluenzaA__AFG99545

SEQ ID NO: 200665 - RNA, 1701 nt, Artificial Sequence
  derived and/or modified CDS sequence (opt5) from hemagglutinin__InfluenzaA__AFG99556
augaagaccaucauugcccugagcuacauccucugccugguguucgcucagaaacuucccggcaacgacaauuccacagccacgcugugucucgggcaccaugcggucccuaacggaacccugguuaagacaauuaccaaugaucaaaucgaggugacaaacgcuaccgaacuugugcagucuagcuccacaggcagaauuugcgacucuccgcaccggauccuggaugggaaaaauuguacccucaucgacgcccugcugggagauccccauugcgacggcuuucagaacaaggagugggaucucuucgucgaacgcagcaaagccuauuccaauuguuacccuuaugacgugcccgauuacgcuucucugagaagccuuguugccuccagcgggacgcuggaguuuaccaacgaagacuucaauuggacaggaguggcucagucuggcgaguccuaugccugcaagcggggcagcgucaagucuuucuucucccgccucaacuggcugcacgagagcgauuacaaauauccugcgcuuaaugugaccaugcccaacaaugggaaguuugacaaacuguacauuuggggaguucaucacccuucuacagauagagaacaaaccucccucuacgugcgggccagcggccgcgucacgguguccacaaagagaucucagcagaccgugaucccgaacauugggagccggcccuggguccgcggacuguccagcagaaucucuauuuauuggacaaucguuaaaccuggcgacauucugcucaucaauuccaccgggaaccugaucgcuccccggggauacuucaagauucgcaccggcaagagcucuaucaugagaagcgacgccccuauuggcacauguuccucugagugcaucacgcccaacgggagcauuccgaaugauaaaccuuuucagaacgugaaucggaucaccuauggagcuuguccccgcuacgugaagcaaaacacacuuaaacuggccaccggcaugagaaaugucccugaaaagcagacacgggggaucuucggagcgauugccggcuuuaucgagaacgggugggagggaaugguggacggcugguauggcuucagacaccaaaauuccgaagggaccggacaggcugccgaucgcaaaagcacgcaggcugccauugaccagaucaacggcaagcucaaucggcugauugagaaaacaaacgaaaaguuucaucagaucgagaaggaauuuucugagguugaggggagaauccaagaucuugaaaaauacguggaggacaccaagauugaucugugguccuauaaugccgaacuccuggucgcucuggagaaccagcacaccaucgaccucacagauagcgaaaugaauaaacuguucgagaagacccgcaaacagcuucgggagaacgcggaagacaugggaaauggcugcuuuaagauuuaccauaagugugauaacgccugcaucgggucuauuagaaacggcacauacgaccacgacguguaucgcgaugaggcucugaauaaccgguuccagaucaaaggaguugaacucaaguccggcuacaaagacuggauucuguggaucagcuuugccaucuccugcuuccuucugugugugguccuccugggguuuauuaugugggccugccaaaagggaaauaucagauguaacauuugcaucuga

SEQ ID NO: 200666 - RNA, 1701 nt, Artificial Sequence; identical to SEQ ID NO: 200559
  derived and/or modified CDS sequence (opt5) from hemagglutinin__InfluenzaA__AFG99567

SEQ ID NO: 200667 - RNA, 1701 nt, Artificial Sequence; identical to SEQ ID NO: 200559
  derived and/or modified CDS sequence (opt5) from hemagglutinin__InfluenzaA__AFG99578

SEQ ID NO: 200668 - RNA, 1701 nt, Artificial Sequence; identical to SEQ ID NO: 200559
  derived and/or modified CDS sequence (opt5) from hemagglutinin__InfluenzaA__AFG99589

SEQ ID NO: 200669 - RNA, 1701 nt, Artificial Sequence
  derived and/or modified CDS sequence (opt5) from hemagglutinin__InfluenzaA__AFG99600
augaagaccaucauugcccugagcuacauccucugccugguguucgcucagaaacuucccggcaacgacaauuccacagccacgcugugucucgggcaccaugcggucccuaacggaacccugguuaagacaauuaccaaugaucaaaucgaggugacaaacgcuaccgaacuugugcagucuagcuccacaggcagaauuugcgacucuccgcaccggguccuggaugggaaaaauuguacccucaucgacgcccugcugggagauccccauugcgacggcuuucagaacaaggagugggaucucuucguggaacgcagcaaagccuauuccaauuguuacccuuaugacguucccgauuacgcuucucugagaagccuuguggccuccagcgggacgcuggaguuuaccaacgaagacuucaauuggacaggagucgcucagucuggcgaguccuaugccugcaagcggggcagcgugaagucuuucuucucccgccucaacuggcugcacgagagcgauuacaaauauccugcgcuuaauguuaccaugcccaacaaugggaaguuugacaaacuguacaucuggggagugcaucacccuucuacagauagagaacaaaccucccucuacguccgggccagcggccgcgugacgguguccacaaagagaucucagcagaccgucauuccgaacaucgggagccggcccuggguucgcggacuguccagcagaauuucuaucuauuggacaauugugaaaccuggcgacauccugcucauuaauuccaccgggaaccugaucgcuccccggggauacuucaagauccgcauuggcaagagcucuaucaugagaagcgacgccccuauuggcaccuguuccucugagugcaucacacccaacgggagcauuccgaaugauaaaccuuuucagaacgugaaucggaucacguauggagcuuguccccgcuacgucaagcaaaacacccuuaaacuggccacaggcaugagaaaugugccugaaaagcagacccgggggaucuucggagcgauugccggcuuuaucgagaacgggugggagggaaugguugacggcugguauggcuucagacaccaaaauuccgaagggacaggacaggcugccgaucucaaaagcacccaggcugccauugaccagaucaacggcaagcugaaucgccuuauugagaaaacgaacgaaaaguuucaucagaucgagaaggaauuuucugagguggaggggcggauccaagaucuggaaaaauacgucgaggacacaaagauugaucucugguccuauaaugccgaacugcugguggcucucgagaaccagcacaccaucgaccugaccgauagcgaaaugaauaaacuuuucgagaagacaagaaaacagcugcgcgagaacgcggaagacaugggaaauggcugcuuuaagauuuaccauaagugugauaacgccugcaucgggucuauucggaacggcaccuacgaccacgacguuuauagagaugaggcucucaauaaccgcuuccagaucaaaggaguggaacugaaguccggcuacaaagacuggauucuuuggaucagcuuugccaucuccugcuuccugcucugugucgugcugcugggguuuauuaugugggccugccaaaagggaaauauccgguguaacauuugcaucuga

SEQ ID NO: 200670 - RNA, 1701 nt, Artificial Sequence; identical to SEQ ID NO: 200559
  derived and/or modified CDS sequence (opt5) from hemagglutinin__InfluenzaA__AFG99611

SEQ ID NO: 200671 - RNA, 1701 nt, Artificial Sequence; identical to SEQ ID NO: 200559
  derived and/or modified CDS sequence (opt5) from hemagglutinin__InfluenzaA__AFG99622

SEQ ID NO: 200672 - RNA, 1701 nt, Artificial Sequence; identical to SEQ ID NO: 200559
  derived and/or modified CDS sequence (opt5) from hemagglutinin__InfluenzaA__AFG99633

SEQ ID NO: 200673 - RNA, 1701 nt, Artificial Sequence
  derived and/or modified CDS sequence (opt5) from hemagglutinin__InfluenzaA__AFG99644
augaagaccaucauugcccugagcuacauccucugccugguguucgcucagaaacuucccggcaacgacaauuccacagccacgcugugucucgggcaccaugcggucccuaacggaacccugguuaagacaauuaccaaugaucaaaucgaggugacaaacgcuaccgaacuugugcaaaauucuagcacaggcagaauuugcgacuccccgcaccggauccuggaugggaaaaacuguacccucaucgacgcccugcugggagauccccauugcgacgauuuucagaauaaggagugggaccucuucgucgaacgcucuaaagccuauagcaacuguuacccuuaugaugugcccgacuacgcuucccugagaucucuuguugccgcuagcggcacgcuggaguuuauuaaugaagauuucaacuggaccgggguggcccaguccggagagagcuaugcgugcaagcggggcucugucaaguccuuuuucagccgccucaauuggcugcacgagucugaauacaaauauccugcccuuaacgugacaaugcccaauaacggcaaguuugacaaacuguacaucuggggaguucaucacccuuccaccgauagagagcagacaagccucuacgugcgggcuucugggcgcgucaccguguccacgaagagaagccagcagacagugauuccgaauaucggcucccggcccuggguccgcgggcugucuagcagaauuuccaucuauuggaccauuguuaaaccuggagacauccugcucaucaacagcacaggcaaccugauugcuccccggggguacuucaagauccgcaccggaaagucuuccauuaugagaagcgacgccccuaucggcaccuguucuagcgaaugcauuacacccaauggcuccaucccgaacgauaaaccuuuucagaaugugaaccggaucacguauggggccuguccccgcuacgugaagcaaaauacccuuaaacuggcgacaggaaugagaaacgucccugagaagcagacccggggcauuuucggggccaucgcuggauuuauugagaauggcugggaagggaugguggacggaugguauggcuucagacaccagaacucugagggcacagggcaggccgcugaucucaaaagcacccaagccgccaucgaccagauuaauggaaagcugaaccgccuuaucgaaaagacgaaugagaaguuucaucagaucgaaaaggaguucuccgagauugaaggccggauccaaaaccuggagaaauacguugaagauacaaagauugaccucuggagcuauaaugcugagcugcugguggcgcucgaaaaccagcacaccaucgaucugaccgacucugagaugaauaaacuuuucgagaagacaagaaaacagcugcgcgaaaacgccgaggauauggggaacggaugcuuuaagauuuaccauaagugugacaaugcuugcaucggcuccauucggaacgggaccuacgaucacgacgucuauagagacgaagcccucaauaaccgcuuccagaucaaaggcguggagcugaaaagcggauacaaagauuggauccuuuggauuucuuuugccaucuccugcuuccugcucuguguugugcugcugggcuuuauuaugugggcuugccaaaaggggaauauccgguguaacauuugcaucuga

SEQ ID NO: 200674 - RNA, 1701 nt, Artificial Sequence
  derived and/or modified CDS sequence (opt5) from hemagglutinin__InfluenzaA__AFG99655
augaagaccaucauugcccugagcuacauccucugccugguguucgcucagaaacuucccggcaacgacaauuccacagccacgcugugucucgggcaccaugcggucccuaacggaacccugguuaagacaauuaccaaugaucaaaucgaggugacaaacgcuaccgaacuugugcaaaauucuagcacaggcagaauuugcgacuccccgcaccggauccuggaugggaaaaacuguacccucaucgacgcccugcugggagauccccauugcgacgauuuucagaauaaggagugggaccucuucgucgaacgcucuaaagccuauagcaacuguuacccuuaugaugugcccgacuacgcuucccugagaucucuuguugccagcuccggcacgcuggaguuuauuaaugaagauuucaacuggaccgggguggcucagagcggagagucuuaugccugcaagcggggcuccgucaagagcuuuuucucucgccucaauuggcugcacgaguccgaauacaaauauccugcgcuuaacgugacaaugcccaauaacggcaaguuugacaaacuguacaucuggggaguucaucacccuagcaccgauagagagcagacaucucucuacgugcgggccuccgggcgcgucaccgugagcacgaagagaucccagcagacagugauuccgaauaucggcucucggcccuggguccgcgggcugagcuccagaauuagcaucuauuggaccauuguuaaaccuggagacauccugcucaucaacucuacaggcaaccugauugcuccccggggguacuucaagauccgcaccggaaaguccagcauuaugagaucugacgccccuaucggcaccuguagcuccgaaugcauuacacccaauggcucuaucccgaacgauaaaccuuuucagaaugugaaccggaucacguauggggcuuguccccgcuacgugaagcaaaauacccuuaaacuggccacaggaaugagaaacgucccugagaagcagacccggggcauuuucggggcgaucgccggauuuauugagaauggcugggaagggaugguggacggaugguauggcuucagacaccagaacagcgagggcacagggcaggcugccgaucucaaauccacccaagcugccaucgaccagauuaauggaaagcugaaccgccuuaucgagaaaacgaaugaaaaguuucaucagaucgaaaaggaguucagcgagauugaaggccggauccaagaucuggagaaauacguugaagacacaaagauugaucucuggucuuauaacgccgagcugcugguggcucucgaaaaucagcacaccaucgaccugaccgauuccgagaugaacaaacuuuucgagaagacaagaaaacagcugcgcgaaaaugcggaggacauggggaacggaugcuuuaagauuuaccauaagugugauaacgccugcaucggcagcauucggaaugggaccuacgaccacgacgucuauagagaugaagcucucaacaaucgcuuccagaucaaaggcguggagcugaagucuggauacaaagacuggauccuuuggauuuccuuugccaucagcugcuuccugcucuguguugugcugcugggcuuuauuaugugggccugccaaaaggggaacauccgguguaauauuugcaucuga

SEQ ID NO: 200675 - RNA, 1701 nt, Artificial Sequence; identical to SEQ ID NO: 200674
  derived and/or modified CDS sequence (opt5) from hemagglutinin__InfluenzaA__AFG99666

SEQ ID NO: 200676 - RNA, 1701 nt, Artificial Sequence; identical to SEQ ID NO: 194410
  derived and/or modified CDS sequence (opt5) from hemagglutinin__InfluenzaA__AFG99677

SEQ ID NO: 200677 - RNA, 1701 nt, Artificial Sequence; identical to SEQ ID NO: 200559
  derived and/or modified CDS sequence (opt5) from hemagglutinin__InfluenzaA__AFG99688

SEQ ID NO: 200678 - RNA, 1701 nt, Artificial Sequence
  derived and/or modified CDS sequence (opt5) from hemagglutinin__InfluenzaA__AFG99701
augaagaccaucauugcccugagcuacauccucugccugguguucgcucagaaacuucccggcaacgacaauuccacagccacgcugugucucgggcaccaugcggucccuaacggaacccugguuaagacaauuaccaaugaucaaaucgaggugacaaacgcuaccgaacuugugcagucuagcuccacaggcagaauuugcgacucuccgcaccggauccuggaugggaaaaauuguacccucaucgacgcccugcugggagauccccauugcgacggcuuucagaacaaggagugggaucucuucgucgaacgcagcaaugccuauuccaacuguuacccuuaugacgugcccgauuacgcuucucugagaagccuuguugccuccagcgggacgcuggaguuuaccaaugaagacuucaacuggacaggaguggcucagucuggcgaguccuaugccugcaaacggggcagcgucaagucuuucuucucccgccucaauuggcugcacgagagcgauuacaaguauccugcgcuuaacgugaccaugcccaauaacgggaaauuugacaagcuguacauuuggggaguucaucacccuucuacagauagagaacaaaccucccucuacgugcgggccagcggccgcgucacgguguccacaaaaagaucucagcagaccgugaucccgaauauugggagccggcccuggguccgcggacuguccagcagaaucucuauuuauuggacaaucguuaagccuggcgacauucugcucaucaacuccaccgggaaccugaucgcuccccggggauacuucaaaauucgcaccggcaagagcucuaucaugagaagcgacgccccuauuggcacauguuccucugagugcaucacgcccaaugggagcauuccgaacgauaagccuuuucagaaugugaaccggaucaccuauggagcuuguccccgcuacgugaaacaaaauacacuuaagcuggccaccggcaugagaaacgucccugaaaaacagacacgggggaucuucggagcgauugccggcuuuaucgagaaugggugggagggaaugguggacggcugguauggcuucagacaccagaacuccgaagggaccggacaggcugccgaucucaagagcacgcaagcugccauugaccagaucaauggcaaacugaaccgccuuauugagaagacaaaugaaaaauuucaucagaucgagaaggaauuuucugagguugaggggcggauccaagaucuggaaaaguacguggaggacaccaaaauugaucucugguccuauaacgccgaacugcuggucgcucucgagaaucagcacaccaucgaccugacagauagcgaaaugaacaaacuuuucgagaagaccagaaagcagcugcgcgagaaugcggaagacaugggaaacggcugcuuuaaaauuuaccauaagugugauaacgccugcaucgggucuauucggaauggcacauacgaccacgacguguauagagaugaggcucucaacaaucgcuuccagaucaagggagccgaacugaaauccggcuacaaggacuggauucuuuggaucagcuuugccaucuccugcuuccugcucuguguugugcugcugggguuuauuaugugggcuugccaaaaaggaaacauccgguguaauauuugcaucuga

SEQ ID NO: 200679 - RNA, 1701 nt, Artificial Sequence
  derived and/or modified CDS sequence (opt5) from hemagglutinin__InfluenzaA__AFG99712
augaagaccaucauugcccugagcuacauccucugccugguguucgcucagaaacuucccggcaacgacaauuccacagccacgcugugucucgggcaccaugcggucccuaacggaacccugguuaagacaauuaccaaugaucaaaucgaggugacaaacgcuaccgaacuugugcagucuagcuccacaggcagaauuugcgacucuccgcaccggauccuggaugggaaaaauuguacccucaucgacgcccugcugggagauccccauugcgacggcuuucagaacaaggagugggaucucuucgucgaacgcagcaaagccuauuccaauuguuacccuuaugaggugcccgacuacgcuucucugagaagccuuguugccuccagcgggacgcuggaauuuaccaacgaggauuucaauuggacaggaguggcucagucuggcgaguccuaugccugcaagcggggcagcgucaaguccuuuuucucucgccucaacuggcugcacgaaagcgacuacaaauauccugcgcuuaaugugaccaugcccaacaaugggaaguuugauaaacuguacauuuggggaguucaucacccuucuacagacagagagcaaaccucccucuacgugcgggccagcggccgcgucacgguguccacaaagagaucucagcagaccgugaucccgaacauugggagccggcccuggguccgcggacuguccagcagaaucucuauuuauuggacaaucguuaaaccuggcgauauucugcucaucaauuccaccgggaaccugaucgcuccccggggauacuucaagauucgcaccggcaagagcucuaucaugagaagcgacgccccuauuggcacauguuccucugaaugcaucacgcccaacgggagcauuccgaaugacaaaccuuuucagaacgugaaucggaucaccuauggagcuuguccccgcuacgugaagcaaaacacacuuaaacuggccaccggcaugagaaaugucccugagaagcagacacgggggaucuucggagcgauugccggcuuuaucgagaacgggugggaaggaaugguggauggcugguauggcuucagacaccaaaauuccgaggggaccggacaggcugccgaccucaaaagcacgcaggcugccauugaucagaucaacggcaagcugaaucgccuuauugagaaaacaaacgaaaaguuucaucagaucgaaaaggaguucucugagguugaagggcggauccaagaccuggagaaauacguggaagauaccaagauugaccucugguccuauaaugccgagcugcuggucgcucucgaaaaccagcacaccaucgaucugacagacagcgagaugaauaaacuuuucgagaagaccagaaaacagcugcgcgaaaacgcggaggauaugggaaauggcugcuuuaagauuuaccauaagugugacaacgccugcaucgggucuauucggaacggcacauacgaucacgacguguauagagacgaagcucucaauaaccgcuuccagaucaaaggaguugagcugaaguccggcuacaaagauuggauucuuuggaucagcuuugccaucuccugcuuccugcucugugugguccugcugggguuuauuaugugggccugccaaaagggaaauauccgguguaacauuugcaucuga

SEQ ID NO: 200680 - RNA, 1701 nt, Artificial Sequence; identical to SEQ ID NO: 200559
  derived and/or modified CDS sequence (opt5) from hemagglutinin__InfluenzaA__AFG99723

SEQ ID NO: 200681 - RNA, 1701 nt, Artificial Sequence; identical to SEQ ID NO: 200674
  derived and/or modified CDS sequence (opt5) from hemagglutinin__InfluenzaA__AFG99734

SEQ ID NO: 200682 - RNA, 1701 nt, Artificial Sequence
  derived and/or modified CDS sequence (opt5) from hemagglutinin__InfluenzaA__AFG99745
augaagaccaucauugcccugagcuacauccucugccugguguucgcucagaaacuucccggcaacgacaauuccacagccacgcugugucucgggcaccaugcggucccuaacggaacccugguuaagacaauuaccaaugaucaaaucgaggugacaaacgcuaccgaacuugugcagucuagcuccacaggcagaauuugcgacucuccgcaccggauccuggaugggaaaaauuguacccucaucgacgcccugcugggagauccccauugcgacggcuuucagaacaaggagugggaucucuucgucgaacgcagcaaagccuauuccaauuguuacccuuaugacgugcccgauuacgcuucucugagaagccuuguugccuccagcgggacgcuggaguuuauuaacgaagacuucaauuggaccggaguggcucagucuggcgauuccuaugccugcaagcggggcagcgucaaguccuuuuucucucgccucaacuggcugcacgagagcgaguacaaauauccugcgcuuaaugugacaaugcccaacaaugacaaguuugauaaacuguacaucuggggaguucaucacccuucuaccgaaagagagcaaacaucccucuacauucgggccagcgggcgcgugaccgucuccacgaagagaucucagcagacagugaucccgaacauuggcagcaaacccugggugcgggggcuguccagccgcaucucuauuuauuggaccaucgucaagccuggagacauccugcucauuaauuccacaggcaaccugaucgcucccagaggguacuucaagauucggaccggaaaaagcucuaucaugcgcagcgacgccccuauuggcaccuguuccucugaaugcaucacacccaacggcagcaucccgaaugauaagccuuuucagaacguuaauagaauuacguauggggcuuguccccgguacgugaaacaaaacacccuuaagcuggccacaggaaugcgcaaugugccugagaaacagaccagaggcaucuucggggcgauugccggauuuaucgagaacggcugggaagggauggucgacggaugguauggcuuccggcaccaaaauuccgagggcacagggcaggcugccgaucucaagagcacccaggcugccauugaccagaucaacggaaaacugaauagacuuaucgaaaagacgaacgagaaguuucaucagauugaaaaagaguucucugagguggaaggccgcauccaagaucuggagaaguacguugaagacacaaaaauugaucucugguccuauaaugccgagcugcugguggcucucgaaaaccagcacaccaucgaccugaccgauagcgagaugaauaaacuuuucgagaagacacggaagcagcugagagaaaacgcggaggacauggggaauggaugcuuuaagauuuaccauaaaugugauaacgccugcaugggcucuauccgcaacgggaccuacgaccacgacgucuaucgggaugaagcucucaauaacagauuccagauuaagggcguggagcugaaauccggauacaaggacuggauccuuuggaucagcuuugccauuuccugcuuccugcucuguguugugcugcugggcuuuaucaugugggccugccaaaaagggaauauucgcuguaacaucugcauuuga

SEQ ID NO: 200683 - RNA, 1701 nt, Artificial Sequence; identical to SEQ ID NO: 200559
  derived and/or modified CDS sequence (opt5) from hemagglutinin__InfluenzaA__AFG99756

SEQ ID NO: 200684 - RNA, 1701 nt, Artificial Sequence
  derived and/or modified CDS sequence (opt5) from hemagglutinin__InfluenzaA__AFG99767
augaagaccaucauugcccugagcuacauccucugccugguguucgcucagaaacuucccggcaacgacaauuccacagccacgcugugucucgggcaccaugcggucccuaacggaacccugguuaagacaauuaccaaugaucaaaucgaggugacaaacgcuaccgaacuugugcagucuagcuccacaggcagaauuugcgacucuccgcaccggauccuggaugggaaaaauuguacccucaucgacgcccugcugggagauccccauugcgacgauuuucagaacaaggagugggaccucuucgucgaacgcagcaaagccuauuccaauuguuacccuuaugaugugcccgacuacgcuucucugagaagccuuguugccuccagcggcacgcuggaguuuauuaacgaagauuucaauuggaccgggguggcucagucuggagaguccuaugccugcaagcggggcagcgucaaguccuuuuucucucgccucaacuggcugcacgagagcgaauacaaauauccugcgcuuaaugugacaaugcccaacaaugacaaguuugauaaacuguacaucuggggcguucaucacccuucuaccgacagagagcaaacaucccucuacauucgggccagcgggcgcgugaccgucuccacgaagagaucucagcagacagugaucccgaacauuggaagccggcccugggugcgcggccuguccagcagaaucucuauuuauuggaccaucgucaaaccuggggacauccugcucauuaauuccacaggaaaccugaucgcuccccggggcuacuucaagauucgcaccgggaaaagcucuaucaugagaagcgaugccccuauuggaaccuguuccucugaaugcaucacacccaacggcagcaucccgaaugacaaaccuuuucagaacguuaaucggauuacguauggcgcuuguccccgcuacgugaagcaaaacacccuuaaacuggccacagggaugagaaaugugccugagaagcagacccggggaaucuucggcgcgauugccggguuuaucgagaacggaugggaaggcauggucgaugggugguauggauucagacaccaaaauuccgagggcacaggccaggcugccgaccucaaaagcacccaggcugccauugaucagaucaacgggaagcugaaucgccuuaucgaaaagacgaacgagaaguuucaucagauugaaaaggaguucucugagguggaaggacggauccaagaccuggagaaauacguugaagauacaaagauugaccucugguccuauaaugccgagcugcugguggcucucgaaaaccagcacaccaucgaucugaccgacagcgagaugaauaaacuuuucgagaagacaagaaaacagcugcgcgaaaacgcggaggauaugggcaaugggugcuuuaagauuuaccauaagugugacaacgccugcaucggaucuauucggaacggcaccuacgaccacgaugucuauagagacgaagcucucaauaaccgcuuccagaucaaagggguggagcugaaguccggcuacaaagauuggauccuuuggauuagcuuugccaucuccugcuuccugcucuguguugugcugcugggauuuauuaugugggccugccaaaagggcaauauccgguguaacauuugcaucuga

SEQ ID NO: 200685 - RNA, 1701 nt, Artificial Sequence
  derived and/or modified CDS sequence (opt5) from hemagglutinin__InfluenzaA__AFG99778
augaagaccaucauugcccugagcuacauccucugccugguguucgcucagaaacuucccggcaacgacaauuccacagccacgcugugucucgggcaccaugcggucccuaacggaacccugguuaagacacuuaccaaugaucaaauugaggugacaaacgcuaccgaacuggugcagucuagcuccacaggcaaaaucugcgacucuccgcaccggauucucgaugggaagaauuguacccugaucgacgcccugcucggagauccccauugcgacggccugcagaacaaagagugggaucuuuuugucgaaagaagcaaggccuauuccaauuguuacccuuaugacgugcccgauuacgcuucucugcgcagccucguugccuccagcgggacgcuggaguucaucaacgaagacuuuaauuggaccggaguggcucaggauggcggcucuuaugccugcaagagaggguccgucaacagcuucuuuucucggcuuaauuggcugcacaaauccgaguacaaguauccugcgcucaacgugacaaugcccaauaacggaaaaguugacaagcuguacauuuggggcgugcaucacccuagcaccgaucgcgaccaaacaucucuguacgucagagccuccgggcgggugaccgugagcacgaaacgcucccagcagacagucaucccgaauauuggaucuagacccuggguucggggccagagcucccgcaucagcauuuauuggaccaucgugaagccuggggacauucuccugaucaacucuacaggaaaccuuaucgcucccagaggcuacuucaagauucggaauggcaaauccagcaucaugcgcucugaugccccuauugggaccuguagcuccgagugcaucacccccaacggaucuauuccgaaugacaagccuuuucaaaacgugaauagaaucacauauggcgcuuguccccgguacgucaaacagaacacgcugaagcucgccaccgggaugcgcaaugugccugaaaaacagacaagaggaaucuucggcgcgauugccggguuuaucgagaacggaugggaaggcaugguugauggcugguauggguuccggcaccagaauagcgagggaaccggccaagcugccgaccugaaguccacacaggcugccauugaucagaucaacgggaaacuuaauagacugauugagaagaccaacgaaaaguuucaucaaaucgagaaagaguucagcgaaguggaaggacgcauccaggaccucgagaaguacgucgaggauacgaaaauugaccuguggucuuauaaugccgaacugcucguggcucuggagaaccagcacacaaucgaucuuaccgacuccgaaaugaauaagcuguuugagaaaacccggaagcagcucagagaaaacgcggaggauaugggcaacgggugcuucaagauuuaccauaaaugugacaaugccugcaucggcagcauucgcaacggaacauacgaccacgauguuuaucgggacgaggcucugaauaacagauuccaaaucaagggcguggaacuuaaaucuggguacaaggauuggauucuguggaucuccuuugccaucagcugcuuccuccugugugucgugcugcucggauuuauuaugugggccugccagaaaggcaauauccgcuguaacauuugcaucuga

SEQ ID NO: 200686 - RNA, 1701 nt, Artificial Sequence; identical to SEQ ID NO: 200559
  derived and/or modified CDS sequence (opt5) from hemagglutinin__InfluenzaA__AFG99789

SEQ ID NO: 200687 - RNA, 1701 nt, Artificial Sequence; identical to SEQ ID NO: 200674
  derived and/or modified CDS sequence (opt5) from hemagglutinin__InfluenzaA__AFG99800

SEQ ID NO: 200688 - RNA, 1701 nt, Artificial Sequence
  derived and/or modified CDS sequence (opt5) from hemagglutinin__InfluenzaA__AFG99811
augaagaccaucauugcccugagcuacauccucugccugguguucucccagaaacuucccggcaacgacaauucuacagcuacgcugugucucgggcaccaugccgucccuaacggaacccugguuaagacaauuaccaaugaucaaaucgaggugacaaacgcgaccgaacuugugcagaauagcuccacaggcagaauuugcgacucuccgcaccggauccuggaugggaaaaacuguacccucaucgacgcucugcugggagauccccauugcgacgauuuucagaauaaggagugggaccucuucgucgaacgcagcaaagccuauuccaacuguuacccuuaugaugugcccgacuacgccucucugagaagccuuguugcuuccagcggcacgcuggaguuuauuaaugaagauuucaacuggaccgggguggcccagucuggagaguccuaugcuugcaagcggggcagcgucaaguccuuuuucucucgccucaauuggcugcacgagagcgaauacaaauauccugcccuuaacgugacaaugcccaauaacggcaaguuugacaaacuguacaucuggggaguucaucacccuucuaccgauagagagcaaacaucccucuacgugcgggcgagcgggcgcgucaccguguccacgaagagaucucagcagacagugauuccgaauaucggcagccggcccuggguccgcgggcuguccagcagaauuucuaucuauuggaccauuguuaaaccuggagacauccugcucaucaacuccacaggcaaccugauugcuccccggggguacuucaagauccgcaccggaaagagcucuauuaugagaagcgacgccccuaucggcaccuguuccucugaaugcauuacacccaauggcagcaucccgaacgauaaaccuuuucagaaugugaaccggaucacguauggggccuguccccgcuacgugaagcaaaauacccuuaaacuggcuacaggaaugagaaacgucccugagaagcagacccggggcauuuucggggccaucgcgggauuuauugagaauggcugggaagggaugguggacggaugguauggcuucagacaccagaacuccgagggcacagggcaggccgcugaucucaaaagcacccaagccgcuaucgaccagauuaauggaaagcugaaccgccuuaucgagaaaacgaaugaaaaguuucaucagaucgaaaaggaguucucugagauugaaggccggauccaagaucuggagaaauacguugaagacacaaagauugaucucugguccuauaacgccgagcugcugguggcccucgaaaaucagcacaccaucgaccugaccgauagcgagaugaacaaacuuuucgagaagacaagaaaacagcugcgcgaaaaugcugaggacauggggaacggaugcuuuaagauuuaccauaagugugauaacgcgugcaucggcucuauucggaaugggaccuacgaccacgacgucuauagagaugaagcccucaacaaucgcuuccagaucaaaggcguggagcugaaguccggauacaaagacuggauccuuuggauuagcuuugcuaucuccugcuuccugcucuguguugugcugcugggcuuuauuaugugggccugccaaaaggggaacauccgguguaauauuugcaucuga

SEQ ID NO: 200689 - RNA, 1701 nt, Artificial Sequence; identical to SEQ ID NO: 200559
  derived and/or modified CDS sequence (opt5) from hemagglutinin__InfluenzaA__AFG99822

SEQ ID NO: 200690 - RNA, 1701 nt, Artificial Sequence; identical to SEQ ID NO: 200559
  derived and/or modified CDS sequence (opt5) from hemagglutinin__InfluenzaA__AFG99833

SEQ ID NO: 200691 - RNA, 1701 nt, Artificial Sequence; identical to SEQ ID NO: 200559
  derived and/or modified CDS sequence (opt5) from hemagglutinin__InfluenzaA__AFG99844

SEQ ID NO: 200692 - RNA, 1701 nt, Artificial Sequence
  derived and/or modified CDS sequence (opt5) from hemagglutinin__InfluenzaA__AFG99855
augaagaccaucauugcccugagcuacauccucugccugguguucgcucagaaacuucccggcaacgacaauuccacagccacgcugugucucgggcaccaugcggucccuaacggaacccugguuaagacaauuaccaaugaucaaaucgaggugacaaacgcuaccgaacuugugcagucuagcuccacaggcagaauuugcgacucuccgcaccggauccuggaugggaaaaauuguacccucaucgacgcccugcugggagauccccauugcgacggcuuucagaacaaggagugggaucucuucgucgaacgcagcaaagccuauuccaauuguuacccuuaugacgugcccgauuacgcuucucugagaagccuuguugccuccagcgggacgcuggaguuuaccaacgaagacuucaauuggacaggaguggcucagucuggcgaguccuaugccugcaagcggggcagcgucaaguccuuuuucucucgccucaacuggcugcacgagagcgauuacaaauauccugcgcuuaaugugaccaugcccaacaaugggaaguuugacaaacuguacauuuggggaguucaucacccuucuacagauagagaacaaaccucccucuacgugcgggccagcggccgcgucacgguguccacaaagagaucucagcagaccgugaucccgaacauugggagccggcccuggguccgcggacuguccagcagaaucucuauuuauuggacaaucguuaaaccuggcgacauucugcucaucaauuccaccgggaaccugaucgcuccccggggauacuucaagauucgcaccggcaagagcucuaucaugagaagcgacgccccuauuggcacauguuccucugagugcaucacgcccaacgggagcauuccgaaugauaaaccuuuucagaacgugaaucggaucaccuauggagcuuguccccgcuacgugaagcaaaacacacuuaaacuggccaccggcaugagaaaugucccugggaagcagacacggggaaucuucggcgcgauugccggguuuaucgaaaacggaugggagggcaugguggacggcugguauggguucagacaccaaaauuccgagggaaccggccaggcugccgaucucaaaagcacgcaggcugccauugaccagaucaacgggaagcugaaucgccuuauugagaaaacaaacgaaaaguuucaucagaucgaaaaggaguucucugaaguugagggacggauccaagaucuggagaaauacguggaagacaccaagauugaucucugguccuauaaugccgagcugcuggucgcucucgaaaaccagcacaccaucgaccugacagauagcgagaugaauaaacuuuucgaaaagaccagaaaacagcugcgcgagaacgcggaggacaugggcaaugggugcuuuaagauuuaccauaagugugauaacgccugcaucggcucuauucggaacggaacauacgaccacgacguguauagagaugaagcucucaauaaccgcuuccagaucaaaggcguugagcugaaguccggguacaaagacuggauucuuuggaucagcuuugccaucuccugcuuccugcucugugugguccugcugggauuuauuaugugggccugccaaaagggcaauauccgguguaacauuugcaucuga

SEQ ID NO: 200693 - RNA, 1701 nt, Artificial Sequence; identical to SEQ ID NO: 200559
  derived and/or modified CDS sequence (opt5) from hemagglutinin__InfluenzaA__AFG99866

SEQ ID NO: 200694 - RNA, 1701 nt, Artificial Sequence; identical to SEQ ID NO: 200559
  derived and/or modified CDS sequence (opt5) from hemagglutinin__InfluenzaA__AFG99877

SEQ ID NO: 200695 - RNA, 1701 nt, Artificial Sequence
  derived and/or modified CDS sequence (opt5) from hemagglutinin__InfluenzaA__AFG99888
augaagaccaucauugcccugagcuacauccucugccugguguucgcucagaaacuucccggcaacgacaauuccacagccacgcugugucucgggcaccaugcggucccuaacggaacccugguuaagacaauuaccaaugaucaaaucgaggugacaaacgcuaccgaacuugugcagucuagcuccacaggcagaauuugcgacucuccgcaccggauccuggaugggaaaaauuguacccucaucgacgcccugcugggagauccccauugcgacggcuuucagaacaaggagugggaucucuucgucgaacgcagcaaagccuauuccaauuguuacccuuaugacgugcccgauuacgcuucucugagaagccuuguugccuccagcgggacgcuggaguuuauuaacgaagacuucaauuggaccggaguggcucagucuggcgaguccuaugccugcaagcggggcagcgucaaguccuuuuucucucgccucaacuggcugcacgagagcgaauacaaauauccugcgcuuaaugugacaaugcccaacaaugauaaguuugacaaacuguacaucuggggaguucaucacccuucuaccgauagagagcaaacaucccucuacauucgggccagcgggcgcgugaccgucuccacgaagagaucucagcagacagugaucccgaacauuggcagccggcccugggugcgcgggcuguccagcagaaucucuauuuauuggaccaucgucaaaccuggagacauccugcucauuaauuccacaggcaaccugaucgcuccccggggguacuucaagauucgcaccggaaagagcucuaucaugagaagcgacgccccuauuggcaccuguaacuccgaaugcaucacacccaauggcucuaucccgaacgauaaaccuuuucagaauguuaaccggauuacguauggggcuuguccccgcuacgugaagcaaaauacccuuaaacuggccacaggaaugagaaacgugccugagaagcagacccggggcaucuucggggcgauugccggauuuaucgagaauggcugggaagggauggucgacggaugguauggcuucagacaccagaacagcgagggcacagggcaggcugccgaucucaaauccacccaagcugccauugaccagaucaauggaaagcugaaccgccuuaucgagaaaacgaaugaaaaguuucaucagauugaaaaggaguucagcgagguggaaggccggauccaagaucuggagaaauacguugaagacacaaagauugaucucuggucuuauaacgccgagcugcugguggcucucgaaaaucagcacaccaucgaccugaccgauuccgagaugaacaaacuuuucgagaagacaagaaaacagcugcgcgaaaaugcggaggacauggggaacggaugcuuuaagauuuaccauaagugugauaacgccugcaucggcagcauucggaaugggaccuacaaccacgacgucuauagagacgaagcucucaauaaccgcuuccagaucaaaggcguggagcugaagucuggauacaaagauuggauccuuuggauuuccuuugccaucagcugcuuccugcucuguguugugcugcugggcuuuauuaugugggccugccaaaaggggaauauccgguguaacauuugcaucuga

SEQ ID NO: 200696 - RNA, 1701 nt, Artificial Sequence; identical to SEQ ID NO: 200559
  derived and/or modified CDS sequence (opt5) from hemagglutinin__InfluenzaA__AFG99899

SEQ ID NO: 200697 - RNA, 1701 nt, Artificial Sequence; identical to SEQ ID NO: 200559
  derived and/or modified CDS sequence (opt5) from hemagglutinin__InfluenzaA__AFG99910

SEQ ID NO: 200698 - RNA, 1701 nt, Artificial Sequence; identical to SEQ ID NO: 200559
  derived and/or modified CDS sequence (opt5) from hemagglutinin__InfluenzaA__AFG99921

SEQ ID NO: 200699 - RNA, 1701 nt, Artificial Sequence
  derived and/or modified CDS sequence (opt5) from hemagglutinin__InfluenzaA__AFG99932
augaagaccaucauugcccugagcuacauccucugccugguguucgcucagaaacuucccggcaacgacaauuccacagccacgcugugucucgggcaccaugcggucccuaacggaacccugguuaagacaauuaccaaugaucaaaucgaggugacaaacgcuaccgaacuugugcagucuagcuccacaggcagaauuugcgacucuccgcaccggauccuggaugggaaaaauuguacccucaucgacgcccugcugggagauccccauugcgacggcuuucagaacaaggagugggaucucuucgucgaacgcagcaaagccuauuccaauuguuacccuuaugacgugcccgauuacgcuucucugagaagccuuguugccuccagcgggacgcuggaguuuauuaacgaagacuucaauuggaccggaguggcucagucuggcgaguccuaugccugcaagcggggcagcgucaaguccuuuuucucucgccucaacuggcugcacgagagcgaauacaaauauccugcgcuuaaugugacaaugcccaacaaugauaaguuugacaaacuguacaucuggggaguucaucacccuucuaccgauagagagcaaacaucccucuacauucgggccagcgggcgcgugaccgucuccacgaagagaucucagcagacagugaucccgaacauuggcagccggcccugggugcgcgggcuguccagcagaaucucuauuuauuggaccaucgucaaaccuggagacauccugcucauuaauuccacaggcaaccugaucgcuccccggggguacuucaagauucgcaccggaaagagcucuaucaugagaagcgacgccccuauuggcaccuguuccucugaaugcaucacacccaacggcagcaucccgaaugauaaaccuuuucagaacguuaaucggauuacguauggggcuuguccccgcuacgugaagcaaaacacccuuaaacuggccacaggaaugagaaaugugccugagaagcagacccggggcaucuucggggcgauugccggauuuaucgagaacggcugggaagggauggucgacggaugguauggcuucagacaccaaaauuccgagggcacagggcaggcugccgaucucaaaagcacccaggcugccauugaccagaucaacggaaagcugaaucgccuuaucgagaaaacgaacgaaaaguuucaucagauugaaaaggaguucucugagguggaaggccggauccaagaucuggagaaauacguugaagacacaaagauugaucucugguccuauaaugccgagcugcugguggcucucgaaaaccagcacaccaucgaccugaccgauagcgagaugaauaaacuuuucgagaagacaagaaaacagcugcgcgaaaacgcggaggacauggggaauggaugcuuuaagauuuaccauaagugugauaacgccugcaucggcucuauucggaacgggaccuacgaccacgacgucuauagagaugaagcucucaauaaccgcuuccagaucaaaggcguggagcugaaguccggauacaaagacuggauccuuuggauuagcuuugccaucuccugcuuccugcucuguguugugcugcugggcuuuauuaugugggccugccaaaaggggaauauccgguguaacauuugcaucuga

SEQ ID NO: 200700 - RNA, 1701 nt, Artificial Sequence; identical to SEQ ID NO: 200559
  derived and/or modified CDS sequence (opt5) from hemagglutinin__InfluenzaA__AFG99943

SEQ ID NO: 200701 - RNA, 1701 nt, Artificial Sequence
  derived and/or modified CDS sequence (opt5) from hemagglutinin__InfluenzaA__AFG99954
augaagaccaucauugcccugagcuacauccucugccugguguucgcucagaaacuucccggcaacgacaauuccacagccacgcugugucucgggcaccaugcggucccuaacggaacccugguuaagacaauuaccaaugaucaaaucgaggugacaaacgcuaccgaacuugugcagucuagcuccacaggcagaauuugcgacucuccgcaccggauccuggaugggaaaaauuguacccucaucgacgcccugcugggagauccccauugcgacggcuuucagaacaaggagugggaucucuucgucgaacgcagcaaagccuauuccaauuguuacccuuaugacgugcccgauuacgcuucucugagaagccuuguugccuccagcgggacgcuggaguuuauuaacgaagacuucaauuggaccggaguggcucagucuggcgauuccuaugccugcaagcggggcagcgucaaguccuuuuucucucgccucaacuggcugcacgagagcgaguacaaauauccugcgcuuaaugugacaaugcccaacaaugacaaguuugauaaacuguacaucuggggaguucaucacccuucuaccgaaagagagcaaacaucccucuacauucgggccagcgggcgcgugaccgucuccacgaagagaucucagcagacagugaucccgaacauuggcuucaaacccugggugcgggggcugagcucccgcaucagcauuuauuggaccaucgucaagccuggagacauccugcucauuaauucuacaggcaaccugaucgcucccagaggguacuuuaagauucggaccggaaaauccagcaucaugcgcucugacgccccuauuggcaccuguagcuccgaaugcaucacacccaacggcucuaucccgaaugauaagccuuuccagaacguuaauagaauuacguauggggcuuguccccgguacgugaaacaaaacacccuuaagcuggccacaggaaugcgcaaugugccugagaaacagaccagaggcaucuuuggggcgauugccggauucaucgagaacggcugggaagggauggucgacggaugguauggcuuucggcaccagaauagcgagggcacagggcaggcugccgaucucaaguccacccaagcugccauugaccagaucaacggaaaacugaauagacuuaucgaaaagacgaacgagaaguuccaucagauugaaaaagaguucagcgagguggaaggccgcauccaagaucuggagaaguacguugaagacacaaaaauugaucucuggucuuauaaugccgagcugcugguggcucucgaaaaccagcacaccaucgaccugaccgauuccgagaugaauaaacuuuuugagaagacacggaagcagcugagagaaaacgcggaggacauggggaauggaugcuucaagauuuaccauaaaugugauaacgccugcaucggcagcauucgcaacgggaccuacgaccacgacgucuaucgggaugaagcucucaauaacagauuucagaucaagggcguggagcugaaaucuggauacaaggacuggauccuuuggauuuccuucgccaucagcugcuuucugcucuguguugugcugcugggcuucauuaugugggccugccaaaaagggaauauccgcuguaacauuugcaucuga

SEQ ID NO: 200702 - RNA, 1701 nt, Artificial Sequence
  derived and/or modified CDS sequence (opt5) from hemagglutinin__InfluenzaA__AFG99965
augaagaccaucauugcccugagcuacauccucugccuggcuuucgcccagaaacuucccggcaacgacaauuccacagcgacgcugugucucgggcaccaugcugugccuaacggaacccuggucaagacaauuaccaaugaucaaaucgagguuacaaacgccaccgaacuugugcagucuagcuccacaggcagaauuugcgacucuccgcaccggauccuggaugggaaaaauuguacccucaucgacgcccugcugggagauccccauugcgacggcuuucagaacaaggagugggaucucuucguggaacgcagcaaagccuauuccaauuguuacccuuaugacguccccgauuacgccucucugagaagccuuguggcuuccagcgggacgcuggaguuuaccaacgaagacuucaauuggacaggaguugcccagucuggcgaguccuaugcgugcaagcggggcagcgugaagucuuucuucucccgccucaacuggcugcacgagagcgauuacaaauauccugcccuuaaugucaccaugcccaacaaugggaaguuugacaaacuguacauuuggggagugcaucacccuucuacagauagagaacaaaccucccucuacguucgggcuagcggccgcgugacggucuccacaaagagaucucagcagaccgugaucccgaacauugggagccggcccugggugcgcggacuguccagcagaaucucuauuuauuggacaaucgucaaaccuggcgacauucugcucaucaauuccaccgggaaccugaucgcuccccggggauacuucaagauucgcaccggcaagagcucuaucaugagaagcgacgcuccuauuggcacauguuccucugagugcaucacgcccaacgggagcauuccgaaugauaaaccuuuucagaacguuaaucggaucaccuauggagccuguccccgcuacgugaagcaaaacacacuuaaacuggcgaccggcaugagaaaugugccugaaaagcagacacgggggaucuucggagccauugcuggcuuuaucgagaacgggugggagggaauggucgacggcugguauggcuucagacaccaaaauuccgaagggaccggacaggccgcugaucucaaaagcacgcaggccgccauugaccagaucaacggcaagcugaaucgccuuauugagaaaacaaacgaaaaguuucaucagaucgagaaggaauuuucugagguggaggggcggauccaagaucuggaaaaauacguugaggacaccaagauugaucucugguccuauaaugcugaacugcugguggcgcucgagaaccagcacaccaucgaccugacagauagcgaaaugaauaaacuuuucgagaagaccagaaaacagcugcgcgagaacgccgaagacaugggaaauggcugcuuuaagauuuaccauaagugugauaacgcuugcaucgggucuauucggaacggcacauacgaccacgacgucuauagagaugaggcccucaauaaccgcuuccagaucaaaggaguggaacugaaguccggcuacaaagacuggauucuuuggaucagcuuugccaucuccugcuuccugcucuguguugugcugcugggguuuauuaugugggcuugccaaaagggaaauauccgguguaacauuugcaucuga

SEQ ID NO: 200703 - RNA, 1701 nt, Artificial Sequence; identical to SEQ ID NO: 200559
  derived and/or modified CDS sequence (opt5) from hemagglutinin__InfluenzaA__AFG99976

SEQ ID NO: 200704 - RNA, 1701 nt, Artificial Sequence
  derived and/or modified CDS sequence (opt5) from hemagglutinin__InfluenzaA__AFG99987
augaagaccaucauugcccugagcuacauccucugccugguguucgcucagaaacuucccggcaacgacaauuccacagccacgcugugucucgggcaccaugcggucccuaacggaacccugguuaagacaauuaccaaugaucaaaucgaggugacaaacgcuaccgaacuugugcagucuagcuccacaggcagaauuugcgacucuccgcaccggauccuggaugggaaaaauuguacccucaucgacgcccugcugggagauccccauugcgacggcuuucagaacaaggagugggaucucuucgucgaacgcagcaaagccuauuccaauuguuacccuuaugacgugcccgauuacgcuucucugagaagccuuguugccuccagcgggacgcuggaguuuauuaacgaagacuucaauuggaccggaguggcucagaacggcgauucuuaugccugcaagcggggcuccgucaagagcuuuuucucucgccucaauuggcugcacgaguccgaguacaaauauccugcgcuuaacgugacaaugcccaauaacgacaaguuugauaaacuguacaucuggggaguucaucacccuagcaccgacagagaacaaacaucucucuacauucgggccuccgggcgcgugaccgucagcacgaagagaucccagcagacagugaucccgaauauuggcucucggcccugggugcgcgggcugagcuccagaaucagcauuuauuggaccaucgucaaaccuggagacauccugcucauuaacucuacaggcaaccugaucgcuccccggggguacuucaagauucgcaccggaaaguccagcaucaugagaucugaugccccuauuggcaccuguagcuccgagugcaucacacccaauggcucuaucccgaacgacaaaccuuuucagaauguuaaccggauuacguauggggcuuguccccgcuacgugaagcaaaauacccuuaaacuggccacaggaaugagaaacgugccugaaaagcagacccggggcaucuucggggcgauugccggauuuaucgagaauggcugggaggggauggucgauggaugguauggcuucagacaccagaacagcgaaggcacagggcaggcugccgaccucaaauccacccaagcugccauugaucagaucaauggaaagcugaaccgccuuaucgagaaaacgaaugaaaaguuucaucagauugagaaggaguucagcgaaguggagggccggauccaagaccuggaaaaauacguugaggauacaaagauugaccucuggucuuauaacgccgaacugcugguggcucucgagaaucagcacaccaucgaucugaccgacuccgaaaugaacaaacuuuucgagaagacaagaaaacagcugcgcgagaaugcggaagauauggggaacggaugcuuuaagauuuaccauaagugugacaacgccugcaucggcagcauucggaaugggaccuacgaccacgaugucuauagagacgaggcucucaacaaucgcuuccagaucaaaggcguggaacugaagucuggauacaaagauuggauccuuuggauuuccuuugccaucagcugcuuccugcucuguguugugcugcugggcuuuauuaugugggccugccaaaaggggaacauccgguguaauauuugcaucuga

SEQ ID NO: 200705 - RNA, 1701 nt, Artificial Sequence
  derived and/or modified CDS sequence (opt5) from hemagglutinin__InfluenzaA__AFG99998
augaagaccaucauugcccugagcuacauccucugccugguguucgcucagaaacuucccggcaacgacaauuccacagccacgcugugucucgggcaccaugcggucccuaacggaacccugguuaagacaauuaccaaugaucaaaucgaggugacaaacgcuaccgaacuugugcagucuagcuccacaggcagaauuugcgacucuccgcaccggauccuggaugggaaaaauuguacccucaucgacgcccugcugggagauccccauugcgacggcuuucagaacaaggagugggaucucuucgucgaacgcagcaaagccuauuccaauuguuacccuuaugacgugcccgauuacgcuucucugagaagccuuguugccuccagcgggacgcuggaguuuauuaacgaagacuucaauuggaccggaguggcucaggauggcggcucuuaugccugcaagcggggguccgucaacagcuuuuucucucgccucaauuggcugcacaaacuugaguacaaguauccugcgcugaacgugacaaugcccaauaacggaaaguuugacaaacucuacaucuggggcguucaucacccuuccaccgauagcgaccaaacaucucuguacgugagagccuccgggcgggucaccgugagcacgaagcgcucccagcagacagugaccccgaauauuggaucuagacccuggguccggggccugagcucccgcaucagcauuuauuggacaaucguuaaaccuggggacauucuccugaucaacucuaccggaaaccuuaucgcucccagaggcuacuucaagauucggaauggcaaguccagcaucaugcgcucugaugccccuauugggaacuguagcuccgagugcaucacccccaauggaucuauuccgaacgacaaaccuuuucagaaugugaacagaaucacauauggcgcuuguccccgguacgugaagcaaaauacgcugaaacucgccaccgggaugcgcaacgucccugaaaagcagacaagaggaaucuucggcgcgauugccggguuuaucgagaauggaugggaaggcaugguggauggcugguauggguuccggcaccagaacagcgagggaaccggccaggcugccgaccugaaauccacacaagcugccauugaucagaucaaugggaaacuuaacagacugauugagaagaccaaugaaaaguuucaucagaucgagaaggaguucagcgaaguugaaggacgcauccaagaccucgagaaauacguggaggauacgaagauugaccuguggucuuauaacgccgaacugcucgucgcucuggagaaucagcacacaaucgaucuuaccgacuccgaaaugaacaaacuguucgagaagacccggaaacagcucagagaaaacgcggaggauaugggcaaugggugcuuuaagauuuaccauaagugugacaacgccugcaucggcagcauucgcaauggaacauacgaccacgauguguaucgggacgaggcucugaacaauagauuccagaucaaaggcguugaacuuaagucuggguacaaagauuggauucuguggaucuccuuugccaucagcugcuuccuccugugugugguccugcucggauuuauuaugugggccugccaaaagggcaacauccgcuguaauauuugcaucuga

SEQ ID NO: 200706 - RNA, 1701 nt, Artificial Sequence; identical to SEQ ID NO: 200674
  derived and/or modified CDS sequence (opt5) from hemagglutinin__InfluenzaA__AFH00021

SEQ ID NO: 200707 - RNA, 1701 nt, Artificial Sequence
  derived and/or modified CDS sequence (opt5) from hemagglutinin__InfluenzaA__AFH00032
augaagaccaucauugcccugagcuacauccucugccugguguucgcucagaaacuucccggcaacgacaauuccacagccacgcugugucucgggcaccaugcggucccuaacggaacccugguuaagacaauuaccaaugaucaaaucgaggugacaaacgcuaccgaacuugugcagucuagcuccacaggcaaaauuugcgacucuccgcacagaauccuggaugggaagaauuguacccucaucgacgcccugcugggagauccccauugcgacgauuuucagaacaaagagugggaccucuucgucgaacggagcaaggccuauuccaauuguuacccuuaugaugugcccgacuacgcuucucugcgcagccuuguugccuccagcggcacgcuggaguuuauuaacgaagauuucaauuggaccgggguggcucagucuggagacuccuaugccugcaagagaggcagcgucaaaucuuucuucucccggcucaacuggcugcacgagagcgaguacaaguauccugcgcuuaaugugacaaugcccaacaaugauaaauuugacaagcuguacaucuggggcguucaucacccuucuaccgaccgcgaacaaacaucccucuacauuagagccagcgggcgggugaccgucuccacgaaacgcucucagcagacagugaucccgaacauuggaagcagacccugggugcggggccuguccagccgcaucucuauuuauuggaccaucgucaagccuggggauauccugcucauuaauuccacaggaaaccugaucgcucccagaggcuacuucaagauucggaccgggaaaagcucuaucaugcgcagcgacgccccuauuggaaccuguuccucugagugcaucacacccaacggcagcaucccgaaugauaagccuuuucagaacguuaauagaauuacguauggcgcuuguccccgguacgugaaacaaaacacccuuaagcuggccacagggaugcgcaaugugccugaaaaacagaccagaggaaucuucggcgcgauugccggguuuaucgagaacggaugggagggcauggucgacgggugguauggauuccggcaccaaaauuccgaaggcacaggccaggcugccgaucucaagagcacccaggcugccauugaccagaucaacgggaaacugaauaaacuuaucgagaagacgaacgaaaaguuucaucagauugagaaggaauuuucugagguggagggaagaauccaagaucuggaaaaauacguugaggacacaaagauugaucucugguccuauaaugccgaacugcugguggcucucgagaaccagcacaccaucgaccugaccgauagcgaaaugaauaaacuuuucgagaagacacgcaagcagcugcgggagaacgcggaagacaugggcaaugggugcuuuaaaauuuaccauaagugugacaacgccugcaucggaucuauuagaaacggcaccuacgaucacgacgucuaucgcgaugaggcucucaauaaccgguuccagaucaaagggguggaacugaaguccggcuacaaagacuggauccuuuggauuagcuuugccaucuccugcuuccugcucuguguugugcugcugggauuuauuaugugggccugccaaaagggcaauaucagauguaacauuugcaucuga

SEQ ID NO: 200708 - RNA, 1701 nt, Artificial Sequence
  derived and/or modified CDS sequence (opt5) from hemagglutinin__InfluenzaA__AFH00043
augaagaccaucauugcccugagcuacauccucugccugguguucgcucagaaacuucccggcaacgacaauuccacagccacgcugugucucgggcaccaugcggucccuaacggaacccugguuaagacaauuaccaaugaucaaaucgaggugacaaacgcuaccgaacuugugcagucuagcuccacaggcaaaauuugcgacucuccgcacagaauccuggaugggaagaauuguacccucaucgacgcccugcugggagauccccauugcgacgauuuucagaacaaagagugggaccucuucgucgaacggagcaaggccuauuccaauuguuacccuuaugaugugcccgacuacgcuucucugcgcagccuuguugccuccagcggcacgcuggaguuuauuaacgaagauuucaauuggaccgggguggcucagucuggagacuccuaugccugcaagagaggcagcgucaaaucuuucuucucccggcucaacuggcugcacgagagcgaguacaaguauccugcgcuuaaugugacaaugcccaacaaugauaaauuugacaagcuguacaucuggggcguucaucacccuucuaccgaccgcgaacaaacaucccucuacauuagagccagcgggcgggugaccgucuccacgaaacgcucucagcagacagugaucccgaacauuggaagcagacccugggugcggggccuguccagccgcaucucuauuuauuggaccaucgucaagccuggggauauccugcucauuaauuccacaggaaaccugaucgcucccagaggcuacuucaagauucggaccgggaaaagcucuaucaugcgcagcgacgccaccauuggaacauguuccucugagugcaucacgccuaacggcagcauccccaaugauaagccguuucagaacguuaauagaauuaccuauggcgcuuguccucgguacgugaaacaaaacacacuuaagcuggccaccgggaugcgcaaugugcccgaaaaacagacaagaggaaucuucggcgcgauugccggguuuaucgagaacggaugggagggcauggucgacgggugguauggauuccggcaccaaaauuccgaaggcaccggccaggcugccgaucucaagagcacgcaggcugccauugaccagaucaacgggaaacugaauaaacuuaucgagaagacaaacgaaaaguuucaucagauugagaaggaauuuucugagguggagggaagaauccaagaucuggaaaaauacguugaggacaccaagauugaucucugguccuauaaugccgaacugcugguggcucucgagaaccagcacaccaucgaccugacagauagcgaaaugaauaaacuuuucgagaagacccgcaagcagcugcgggagaacgcggaagacaugggcaaugggugcuuuaaaauuuaccauaagugugacaacgccugcaucggaucuauuagaaacggcacauacgaucacgacgucuaucgcgaugaggcucucaauaaccgguuccagaucaaagggguggaacugaaguccggcuacaaagacuggauccuuuggauuagcuuugccaucuccugcuuccugcucuguguugugcugcugggauuuauuaugugggccugccaaaagggcaauaucagauguaacauuugcaucuga

SEQ ID NO: 200709 - RNA, 1701 nt, Artificial Sequence
  derived and/or modified CDS sequence (opt5) from hemagglutinin__InfluenzaA__AFH00054
augaagaccaucauugcccugagcuacauccucugccugguguucgcucagaaacuucccggcaacgacaauuccacagccacgcugugucucgggcaccaugcggucccuaacggaacccugguuaagacaauuaccaaugaucaaaucgaggugacaaacgcuaccgaacuugugcagucuagcuccacaggcagaauuugcgacucuccgcaccggauccuggaugggaaaaauuguacccucaucgacgcccugcugggagauccccauugcgacggcuuucagaacaaggagugggaucucuucgucgaacgcagcaaagccuauuccaauuguuacccuuaugacgugcccgauuacgcuucucugagaagccuuguugccuccagcgggacgcuggaguuuauuaacgaagacuucaauuggaccggaguggcucagaacggcgauucuuaugccugcaagcggggcuccgucaagagcuuuuucucucgccucaauuggcugcacgaguccgaguacaaauauccugcgcuuaacgugacaaugcccaauaacgacaaguuugauaaacuguacaucuggggaguucaucacccuagcaccgacagagaacaaacaucucucuacauucgggccuccgggcgcgugaccgucagcacgaagagaucccagcagacagugaucccgaauauuggcucucggcccugggugcgcgggcugagcuccagaaucagcauuuauuggaccaucgucaaaccuggagacauccugcucauuaacucuacaggcaaccugaucgcuccccggggguacuucaagauucgcaccggaaaguccagcaucaugagaucugaugccccuauuggcaccuguagcuccgagugcaucacacccaauggcucuaucccgaacgacaaaccuuuucagaauguuaaccggauuacguauggggcuuguccccgcuacgugaagcaaaauacccuuaaacuggccacaggaaugagaaacgugccugaaaagcagacccggggcaucuucggggcgauugccggauuuaucgagaauggcugggaggggauggucgauggaugguauggcuucagacaccagaacagcgaaggcacagggcaggcugccgaccucaaauccacccaagcugccauugaucagaucaauggaaagcugaaccgccuuaucgagaaaacgaaugaaaaguuucaucagauugagaaggaguucagcgaaguggagggccggauccaagaccuggaaaaauacguugaggauacaaagauugaccucuggucuuauaacgccgaacugcugguggcucucgagaaucagcacaccaucgaucugaccgacuccgaaaugaacaaacuuuucgagaagacaagaaaacagcugcgcgagaaugcggaagauauggggaacggaugcuuuaagauuuaccauaagugugacaacgccugcaucggcagcauucggaaugggaccuacgaccacgaugucuauagagacgaggcucucaacaaucgcuuccacaucaaaggcguggaacugaagucuggauacaaagauuggauccuuuggauuuccuuugccaucagcugcuuccugcucuguguugugcugcugggcuuuauuaugugggccugccagaaggggaacauccgguguaauauuugcaucuga

SEQ ID NO: 200710 - RNA, 1701 nt, Artificial Sequence
  derived and/or modified CDS sequence (opt5) from hemagglutinin__InfluenzaA__AFH00065
augaagaccaucauugcccugagcuacauccucugccugguguucgcucagaaacuucccggcaacgacaauuccacagccacgcugugucucgggcaccaugcggucccuaacggaacccugguuaagacaauuaccaaugaucaaaucgaggugacaaacgcuaccgaacuugugcagucuagcuccacaggcagaauuugcgacucuccgcaccggauccuggaugggaaaaauuguacccucaucgacgcccugcugggagauccccauugcgacggcuuucagaacaaggagugggaucucuucgucgaacgcagcaaagccuauuccaauuguuacccuuaugacgugcccgauuacgcuucucugagaagccuuguugccuccagcgggacgcuggaguuuauuaacgaagacuucaauuggaccggaguggcucaggauggcggcucuuaugccugcaagcggggguccgucaacagcuuuuucucucgccucaauuggcugcacaaacuugaguacaaguauccugcgcugaacgugacaaugcccaauaacggaaaguuugacaaacucuacaucuggggcguucaucacccuuccaccgauagcgaccaaacaucucuguacgugagagccuccgggcgggucaccgugagcacgaagcgcucccagcagacagugauuccgaauaucggaucuagacccuggguccggggccagccuagccgcauuuccaucuauuggaccauuguuaaacccggggacauccugcucaucaacagcacaggaaaccugauugcuccuagaggcuacuucaagauccggaauggcaagucuuccauuaugcgcagcgaugcccccaucgggaacuguucuagcgagugcauuaccccgaauggauccaucccuaacgacaaacccuuucaaaaugugaacagaaucaccuauggcgcuuguccucgguacgugaagcagaauacacuuaaacuggccacggggaugcgcaacguccccgaaaagcagaccagaggaauuuucggcgcgaucgccggguuuauugagaauggaugggaaggcaugguggauggcugguauggguuccggcaccagaacucugagggaacaggccaagcugccgaccucaaaagcacccaggcugccaucgaucagauuaaugggaagcugaacagacuuaucgagaaaacaaaugaaaaguuucaucaaaucgagaaggaguucuccgaaguugaaggacgcauucaggaccuggagaaauacguggaggauaccaagaucgaccucuggagcuauaacgccgaacugcuggucgcucucgagaaucagcacacgauugaucugacagacucugaaaugaacaaacuuuucgagcggaccagaaagcagcugcgcgaaaacgcggaggauaugggcaaugggugcuuuaaaaucuaccauaagugugacaacgccugcauuggcuccauccggaauggaaccuacgaccacgauguguauagagacgaggcucucaacaaucgcuuccaaauuaagggcguugaacugaaaagcggguacaaggauuggauccuuuggaucucuuuugccauuuccugcuuccugcucugugugguccugcugggauuuaucaugugggccugccagaaaggcaacauucgguguaauaucugcauuuga

SEQ ID NO: 200711 - RNA, 1701 nt, Artificial Sequence
  derived and/or modified CDS sequence (opt5) from hemagglutinin__InfluenzaA__AFH00076
augaagaccaucauugcccugagcuacauccucugccugguguucgcucagaaacuucccggcaacgacaauuccacagccacgcugugucucgggcaccaugcggucccuaacggaacccugguuaagacaauuaccaaugaucaaaucgaggugacaaacgcuaccgaacuugugcagucuagcuccacaggcaaaauuugcgacucuccgcacagaauccuggaugggaagaauuguacccucaucgacgcccugcugggagauccccauugcgacgauuuucagaacaaagagugggaccucuucgucgaacggagcaaggccuauuccaauuguuacccuuaugaugugcccgacuacgcuucucugcgcagccuuguugccuccagcggcacgcuggaguuuauuaacgaagauuucaauuggaccgggguggcucagucuggagacuccuaugccugcaagagaggcagcgucaaaucuuucuucucccggcucaacuggcugcacgagagcgaguacaaguauccugcgcuuaaugugacaaugcccaacaaugauaaauuugacaagcuguacaucuggggcguucaucacccuucuaccgaccgcgaacaaacaucccucuacauuagagccagcgggcgggugaccgucuccacgaaacgcucucagcagacagugaucccgaacauuggaagcagacccugggugcggggccuguccagccgcaucucuauuuauuggaccaucgucaagccuggggauauccugcucauuaauuccacaggaaaccugaucgcucccagaggcuacuucaagauucggaccgggaaaagcucuaucaugcgcagcgacgccccuauuggaaccuguaacuccgagugcaucacacccaauggcucuaucccgaacgauaagccuuuucagaauguuaacagaauuacguauggcgcuuguccccgguacgugaaacaaaauacccuuaagcuggccacagggaugcgcaacgugccugaaaaacagaccagaggaaucuucggcgcgauugccggguuuaucgagaauggaugggagggcauggucgacgggugguauggauuccggcaccagaacagcgaaggcacaggccaggcugccgaucucaaguccacccaagcugccauugaccagaucaaugggaaacugaacagacuuaucgagaagacgaaugaaaaguuucaucagauugagaaagaauuuagcgagguggagggacgcauccaagaucuggaaaaguacguugaggacacaaaaauugaucucuggucuuauaacgccgaacugcugguggcucucgagaaucagcacaccaucgaccugaccgauuccgaaaugaacaaacuuuucgagaagacacggaagcagcugagagagaaugcggaagacaugggcaacgggugcuuuaagauuuaccauaaaugugacaacgccugcaucggaagcauucgcaauggcaccuacgaucacgacgucuaucgggaugaggcucucaacaauagauuccagaucaaggggguggaacugaaaucuggcuacaaggacuggauccuuuggauuuccuuugccaucagcugcuuccugcucuguguugugcugcugggauuuauuaugugggccugccaaaaaggcaacauccgcuguaauauuugcaucuga

SEQ ID NO: 200712 - RNA, 1701 nt, Artificial Sequence
  derived and/or modified CDS sequence (opt5) from hemagglutinin__InfluenzaA__AFH00087
augaagaccaucauugcccugagcuacauccucugccugguguucgcucagaaacuucccggcaacgacaauuccacagccacgcugugucucgggcaccaugcggucccuaacggaacccugguuaagacaauuaccaaugaucaaaucgaggugacaaacgcuaccgaacuugugcagucuagcuccacaggcagaauuugcgacucuccgcaccggauccuggaugggaaaaauuguacccucaucgacgcccugcugggagauccccauugcgacggcuuucagaacaaggagugggaucucuucgucgaacgcagcgaggccuauuccucuuguuacccuuaugacgugcccgauuacgcuagccugagaucccuuguugccagcucugggacgcuggaauuuauuaaugaggacuucaacuggaccggaguggcucaggauggcaaauccuaugccugcaagcggggcagcgucaauuccuuuuucucucgccucaacuggcugcacaaacuugaguacaaguauccugcgcugaaugugacaaugcccaacaaugggaaguuugacaaacucuacaucuggggaguucaucacccuagcaccgauucugaccaaacaucccuguacgugagagccagcggccgggucaccguguccacgaagcgcucucagcagacagugauuccgaacaucgggagcagacccuggguccggggacaguccagccgcauuggcaucuauuggaccauuguuaaaccuggggacauccugcucaucaauucuacaggaaaccugauugcucccagaggcuacuucaagauccggaacggcaaguccagcauuaugcgcucugaugccccuaucgggaauuguagcuccgaaugcauuacccccaacggaucuaucccgaaugacaaaccuuuucaaaacgugaauaagaucaccuauggcgcuugucccagauacgugaaacagaacacacuuaagcuggccacggggaugcggaaugucccugagaaacagacccgcggaauuuucggcgcgaucgccggguuuauugaaaacggaugggagggcaugguggauggcugguauggguucagacaccagaauagcgagggaacaggccaagcugccgaccucaaguccacccaggcugccaucgaucagauuaacgggaaacugaaucggcuuaucgaaaagacaaacgagaaguuucaucaaaucgaaaaagaguucagcgaaguugagggacgcauucaggaccuggagaaguacguggaagauaccaaaaucgaccucuggucuuauaaugccgagcugcuggucgcucucgaaaaccagcacacgauugaucugacagacuccgagaugaauaaacuuuucgaaagaacccggaagcagcugagagagaacgcggaggauaugggcaacgggugcuuuaagaucuaccauaagugugacaaugccugcauuggcagcauccgcaacggaaccuacgaccacgauguguaucgggacgaagcucucaauaacagauuccaaauuaaaggcguugagcugaagucuggguacaaagauuggauccuuuggaucuccuuugccauuagcugcuuccugcucugugugguccugcugggauuuaucaugugggccugccagaagggcaauauucgcuguaacaucugcauuuga

SEQ ID NO: 200713 - RNA, 1701 nt, Artificial Sequence
  derived and/or modified CDS sequence (opt5) from hemagglutinin__InfluenzaA__AFH00098
augaagaccaucauugcccugagcuacauccucugccugguguucgcucagaaacuucccggcaacgacaauuccacagccacgcugugucucgggcaccaugcggucccuaacggaacccugguuaagacaauuaccaaugaucaaaucgaggugacaaacgcuaccgaacuugugcagucuagcuccacaggcagaauuugcgacucuccgcaccggauccuggaugggaaaaauuguacccucaucgacgcccugcugggagauccccauugcgacggcuuucagaacaaggagugggaucucuucgucgaacgcagcaaagccuauuccaauuguuacccuuaugacgugcccgauuacgcuucucugagaagccuuguugccuccagcgggacgcuggaguuuauuaacgaagacuucaauuggaccggaguggcucaggauggcggcucuuaugccugcaagcggggguccgucaacagcuuuuucucucgccucaauuggcugcacaaacuugaguacaaguauccugcgcugaacgugacaaugcccaauaacggaaaguuugacaaacucuacaucuggggcguucaucacccuuccaccgauagcgaccaaacaucucuguacgugagagccuccgggcgggucaccgugagcacgaagcgcucccagcagacagugauuccgaauaucggaucuagacccuggguccggggccugccuagccgcauuuccaucuauuggaccauuguuaaacccggggacauccuccugaucaacagcacaggaaaccuuauugcuccuagaggcuacuucaagauccggaauggcaagucuuccauuaugcgcagcgaugcccccaucgggaacuguucuagcgagugcauuaccccgaauggauccaucccuaacgacaaacccuuucagaaugugaacagaaucaccuauggcgcuuguccucgguacgugaagcaaaauacacugaaacucgccacggggaugcgcaacguccccgaaaagcagaccagaggaauuuucggcgcgaucgccggguuuauugagaauggaugggaaggcaugguggauggcugguauggguuccggcaccagaacucugagggaacaggccaggcugccgaccugaaaagcacccaagcugccaucgaucagauuaaugggaaacuuaacagacugaucgagaagacaaaugaaaaguuucaucagaucgagaaggaguucuccgaaguugaaggacgcauucaagaccucgagaaauacguggaggauaccaagaucgaccuguggagcuauaacgccgaacugcucgucgcucuggagaaucagcacacgauugaucuuacagacucugaaaugaacaaacuguucgagcggaccagaaagcagcuccgcgaaaacgcggaggauaugggcaaugggugcuuuaaaaucuaccauaagugugacaacgccugcauuggcuccauccggaauggaaccuacgaccacgauguguauagagacgaggcucugaacaaucgcuuccagauuaagggcguugaacuuaaaagcggguacaaggauuggauccuguggaucucuuuugccauuuccugcuuccuccugugugugguccugcucggauuuaucaugugggccugccaaaaaggcaacauucgguguaauaucugcauuuga

SEQ ID NO: 200714 - RNA, 1701 nt, Artificial Sequence
  derived and/or modified CDS sequence (opt5) from hemagglutinin__InfluenzaA__AFH00109
augaagaccaucauugcccugagcuacauccucugccugguguucgcucagaaacuucccggcaacgacaauuccacagccacgcugugucucgggcaccaugcggucccuaacggaacccugguuaagacaauuaccaaugaucaaaucgaggugacaaacgcuaccgaacuugugcagucuagcuccacaggcagaauuugcgacucuccgcaccggauccuggaugggaaaaauuguacccucaucgacgcccugcugggagauccccauugcgacggcuuucagaacaaggagugggaucucuucgucgaacgcagcaaagccuauuccaauuguuacccuuaugacgugcccgauuacgcuucucugagaagccuuguugccuccagcgggacgcuggaguuuauuaacgaagacuucaauuggaccggaguggcucaggauggcaagucuuauacaugcaagcggggcuccgucaacagcuuuuucucucgccucaauuggcugcacaaacuugaguacaaguauccugcccugaacgugaccaugcccaauaacgggaaauuugacaagcucuacaucuggggaguucaucacccuuccacagauagcgaccaaaccucucuguacgugagagcguccggccgggucacggugagcacaaaacgcucccagcagaccgugauuccgaauaucggguucagacccuggguccggggacugucuagccgcauuuccaucuauuggacaauuguuaagccuggcgacauccuccugaucaacagcaccgggaaccuuauugcccccagaggauacuuuaagauccggaauggcaaaucuuccauuaugcgcagcgaugcuccuaucggcaacuguucuagcgagugcauuacccccaauggguccaucccgaacgacaagccuuuccagaaugugaacagaaucacauauggagccuguccccgguacgugaaacaaaauacgcugaagcucgcuaccggcaugcgcaacgucccugaaaaacagacaagagggauuuuuggagccaucgcgggcuucauugagaaugggugggaaggaaugguggauggcugguauggcuuucggcaccagaacucugaggggaccggacaggccgcugaccuuaagagcacacaagccgcuaucgaucagauuaauggcaaacugaacagacugaucgagaagaccaaugaaaaguuccaucagaucgagaaagaguucuccgaaguugaagggcgcauucaagaccucgagaaguacguggaggauacgaaaaucgaccuguggagcuauaacgccggacugcucgucgcccuggaaaaucagcacacaauugaucuuaccgacucugagaugaacaagcuguuugaacggaccagaaaacagcuccgcgagaacgcugaagauaugggcaaugggugcuucaagaucuaccauaagugugacaacgcgugcauuggcuccauccggaauggaacauacgaccacgauguguauagagacgaggcccugaacaaucgcuuucagauuaaaggcguugagcuuaagagcggguacaaagauuggauccuguggaucucuuucgcuauuuccugcuuucuccugugugugguccugcucggauucaucaugugggccugccaaaagggcaacauucgguguaauaucugcauuuga

SEQ ID NO: 200715 - RNA, 1701 nt, Artificial Sequence
  derived and/or modified CDS sequence (opt5) from hemagglutinin__InfluenzaA__AFH00120
augaagaccaucauugcccugagcuacauccucugccugguguucgcucagaaacuucccggcaacgacaauuccacagccacgcugugucucgggcaccaugcggucccuaacggaacccugguuaagacaauuaccaaugaucaaaucgaggugacaaacgcuaccgaacuugugcagucuagcuccacaggcagaauuugcgacucuccgcaccggauccuggaugggaaaaauuguacccucaucgacgcccugcugggagauccccauugcgacggcuuucagaacaaggagugggaucucuucgucgaacgcagcaaagccuauuccaauuguuacccuuaugacgugcccgauuacgcuucucugagaagccuuguugccuccagcgggacgcuggaguuuauuaacgaagacuucaauuggaccggaguggcucaggauggcaagucuuaugccugcaagcggggcuccgucaacagcuuuuucucucgccucaauuggcugcacaaacuugaguacaaguauccugcgcugaacgugacaaugcccaauaacgggaaauuugacaagcucuacaucuggggaguucaucacccuuccaccgauagcgaccaaacaucucuguacgugagagccuccggccgggucaccgugagcacgaaacgcucccagcagacagugauuccgaauaucggguucagacccuggguccggggacugucuagccgcauuuccaucuauuggaccauuguuaagccuggcgacauccuccugaucaacagcacagggaaccuuauugcucccagaggauacuuuaagauccggaauggcaaaucuuccauuaugcgcagcgaugccccuaucggcaacuguucuagcgagugcauuacccccaauggguccaucccgaacgacaagccuuuccagaaugugaacagaaucaccuauggagcuuguccccgguacgugaaacaaaauacacugaagcucgccacgggcaugcgcaacgucccugaaaaacagaccagagggauuuuuggagcgaucgccggcuucauugagaaugggugggaaggaaugguggauggcugguauggcuuucggcaccagaacucugaggggacaggacaggcugccgaccuuaagagcacccaagcugccaucgaucagauuaauggcaaacugaacagacugaucgagaagacaaaugaaaaguuccaucagaucgagaaagaguucuccgaaguugaagggcgcauucaagaccucgagaaguacguggaggauaccaaaaucgaccuguggagcuauaacgccggacugcucgucgcucuggaaaaucagcacacgauugaucuuacagacucugagaugaacaagcuguuugaacggaccagaaaacagcuccgcgagaacgcggaagauaugggcaaugggugcuucaagaucuaccauaagugugacaacgccugcauuggcuccauccggaauggaaccuacgaccacgauguguauagagacgaggcucugaacaaucgcuuucagauuaaaggcguugagcuuaagagcggguacaaagauuggauccuguggaucucuuucgccauuuccugcuuucuccugugugugguccugcucggauucacaaugugggccugccaaaagggcaacauccgguguaauauuugcaucuga

SEQ ID NO: 200716 - RNA, 1701 nt, Artificial Sequence; identical to SEQ ID NO: 200570
  derived and/or modified CDS sequence (opt5) from hemagglutinin__InfluenzaA__AFH00131

SEQ ID NO: 200717 - RNA, 1701 nt, Artificial Sequence
  derived and/or modified CDS sequence (opt5) from hemagglutinin__InfluenzaA__AFH00153
augaagaccaucauugcccugagcuacauccucugccugguguucgcucagaaacuucccggcaacgacaauuccacagccacgcugugucucgggcaccaugcggucccuaacggaacccugguuaagacaauuaccaaugaucaaaucgaggugacaaacgcuaccgaacuugugcagucuagcuccacaggcagaauuugcgacucuccgcaccggauccuggaugggaaaaauuguacccucaucgacgcccugcugggagauccccauugcgacggcuuucagaacaaggagugggaucucuucgucgaacgcagcaaagccuauuccaauuguuacccuuaugacgugcccgauuacgcuucucugagaagccuuguugccuccagcgggacgcuggaguuuauuaacgaagacuucaauuggaccggaguggcucaggauggcaagucuuaugccugcaagcggggcuccgucaacagcuuuuucucucgccucaauuggcugcacaaacuugaguacaaguauccugcgcugaacgugacaaugcccaauaacgggaaauuugacaagcucuacaucuggggaguucaucacccuuccaccgauagcgaccaaacaucucuguacauuagagccuccggccgggugaccgucagcacgaaacgcucccagcagacagugaucccgaauauugggucuagacccugggugcggggacugagcucccgcaucagcauuuauuggaccaucgucaagccuggcgacauccuccugauuaacucuacagggaaccuuaucgcucccagaggauacuucaagauucggaauggcaaauccagcaucaugcgcucugaugccccuauuggcaacuguagcuccgagugcaucacccccaaugggucuaucccgaacgacaagccuuuucagaauguuaacagaauuaccuauggagcuuguccccgguacgugaaacaaaauacacugaagcucgccacgggcaugcgcaacgugccugaaaaacagaccagagggaucuucggagcgauugccggcuuuaucgagaaugggugggaaggaauggucgauggcugguauggcuuccggcaccagaacagcgaggggacaggacaggcugccgaccugaaguccacccaagcugccauugaucagaucaauggcaaacuuaacagacugaucgagaagacaaaugaaaaguuucaucagauugagaaagaguucagcgaaguggaagggcgcauccaagaccucgagaaguacguugaggauaccaaaauugaccuguggucuuauaacgccgaacugcucguggcucuggagaaucagcacacgaucgaucuuacagacuccgaaaugaacaagcuguucgagcggaccagaaaacagcuccgcgaaaacgcggaggauaugggaaauggcugcuuuaagauuuaccauaagugugacaacgccugcaucgggagcauucggaauggcaccuacgaccacgaugucuauagagacgaggcucugaacaaucgcuuccagaucaaaggaguggaacuuaagucuggcuacaaagauuggauccuguggauuuccuuugccaucagcugcuuccuccuguguguugugcugcucggguuuauuaugugggccugccaaaagggaaacauccgguguaauauuugcaucuga

SEQ ID NO: 200718 - RNA, 1701 nt, Artificial Sequence
  derived and/or modified CDS sequence (opt5) from hemagglutinin__InfluenzaA__AFH00164
augaagaccaucauugcccugagcuacauccucugccugguguucgcucagaaacuucccggcaacgacaauuccacagccacgcugugucucgggcaccaugcggucccuaacggaacccugguuaagacaauuaccaaugaucaaaucgaggugacaaacgcuaccgaacuugugcagucuagcuccacaggcagaauuugcgacucuccgcaccggauccuggaugggaaaaauuguacccucauggacgcccugcugggagauccccauugcgacggcuuucagaacaaggagugggaucucuucgucgaacgcagcaaagccuauuccaauuguuacccuuaugacgugcccgauuacgcuucucugagaagccuuguugccuccagcgggacgcuggaguuuaucaacgaagacuucaauuggaccggaguggcucagaacggcgauucuuaugccugcaagcggggcuccgucaagagcuuuuucucucgccucaauuggcugcacgaguccgaguacaaauauccugcgcuuaacgugacaaugcccaauaacgacaaguuugauaaacuguacauuuggggaguucaucacccuagcaccgacagagaacaaacaucucucuacauccgggccuccgggcgcgugaccgucagcacgaagagaucccagcagacagugauuccgaauaucggcucucggcccugggugcgcgggcugagcuccagaauuagcaucuauuggaccauugucaaaccuggagacauccugcucaucaacucuacaggcaaccugauugcuccccggggguacuucaagauccgcaccggaaaguccagcauuaugagaucugaugccccuaucggcaccuguagcuccgagugcauuacacccaauggcucuaucccgaacgacaaaccuuuucagaauguuaaccggaucacguauggggcuuguccccgcuacgugaagcaaaauacccuuaaacuggccacaggaaugagaaacgugccugaaaagcagacccggggcauuuucggggcgaucgccggauuuauugagaauggcugggaggggauggucgauggaugguauggcuucagacaccagaacagcgaaggcacagggcaggcugccgaccucaaauccacccaagcugccaucgaucagauuaauggaaagcugaaccgccuuaucgagaaaacgaaugaaaaguuucaucagaucgagaaggaguucagcgaaguggagggccggauucaagaccuggaaaaauacguugaggauacaaagaucgaccucuggucuuauaacgccgaacugcugguggcucucgagaaucagcacaccauugaucugaccgacuccgaaaugaacaaacuuuucgagaagacaagaaaacagcugcgcgagaaugcggaagauauggggaacggaugcuuuaagaucuaccauaagugugacaacgccugcauuggcagcauccggaaugggaccuacgaccacgaugucuauagagacgaggcucucaacaaucgcuuccagauuaaaggcguggaacugaagucuggauacaaagauuggauccuuuggaucuccuuugccauuagcugcuuccugcucuguguugugcugcugggcuuuaucaugugggccugccaaaaggggaacauucgguguaauaucugcauuuga

SEQ ID NO: 200719 - RNA, 1701 nt, Artificial Sequence
  derived and/or modified CDS sequence (opt5) from hemagglutinin__InfluenzaA__AFH00175
augaagaccaucauugcccugagcuacauccucugccugguguucgcucagaaacuucccggcaacgacaauuccacagccacgcugugucucgggcaccaugcggucccuaacggaacccugguuaagacaauuaccaaugaucaaaucgaggugacaaacgcuaccgaacuugugcagucuagcuccacaggcagaauuugcgacucuccgcaccggauccuggaugggaaaaauuguacccucaucgacgcccugcugggagauccccauugcgacggcuuucagaacaaggagugggaucucuucgucgaacgcagcaaagccuauuccaauuguuacccuuaugacgugcccgauuacgcuucucugagaagccuuguugccuccagcgggacgcuggaguuuauuaacgaagacuucaauuggaccggaguggcucaggauggcaagucuuaugccugcaagcggggcuccgucaagagcuuuuucucucgccucaacuggcugcacaaacuugaguacaaauauccugcgcugaaugugacaaugcccaacaaugggaaguuugacaaacucuacaucuggggaguucaucacccuuccaccgauagcgaccaaacaucucuguacgugagagccuccggccgggucaccgugagcacgaagaagucccagcagacagugauuccgaacaucgggucucgccccugggucagaggacagagcucccggauuagcaucuauuggaccauuguuaaaccuggcgacauccugcucaucaauucuacagggaaccugauugcuccccgcggauacuucaagaucagaaacggcaaauccagcauuaugcggucugaugccccuaucggcaauuguagcuccgagugcauuacccccaacgggucuaucccgaaugacaagccuuuucaaaacgugaaucgcaucaccuauggagcuugucccagauacgugaaacagaacacacuuaagcuggccacgggcaugcggaaugucccugaaaaacagacccgcgggauuuucggagcgaucgccggcuuuauugagaacgggugggaaggaaugguggauggcugguauggcuucagacaccagaauagcgaggggacaggacaagcugccgaccucaaguccacccaggcugccaucgaucagauuaacggcaagcugaaucggcuuaucgagaaaacaaacgaaaaguuucaucaaaucgagaaagaguucagcgaaguugaagggcgcauucaggaccuggagaaguacguggaggauaccaaaaucgaccucuggucuuauaaugccgaacugcuggucgcucucgagaaccagcacacgauugaucugacagacuccgaaaugaauaaacuuuucgagagaacccggaagcagcugagagaaaacgcggaggauaugggaaacggcugcuuuaagaucuaccauaagugugacaaugccugcauugggagcauccgcaacggcaccuacgaccacgauguguaucgggacgaggcucucaauaacagauuccaaauuaaaggaguugaacugaagucuggcuacaaagauuggauccuuuggaucuccuuugccauuagcugcuuccugcucugugugguccugcugggguuuaucaugugggccugccagaagggaaauauucgcuguaacaucugcauuuga

SEQ ID NO: 200720 - RNA, 1701 nt, Artificial Sequence
  derived and/or modified CDS sequence (opt5) from hemagglutinin__InfluenzaA__AFH00186
augaagaccaucauugcccugagccacauccucugccugguguucgcucagaaacuucccggcaacgacaauuccacagccacgcugugucucgggcaucacgcggucccuaacggaacccugguuaagacaauuaccaaugaucaaaucgaggugacaaacgcuaccgaacuugugcagucuagcuccacaggcagaauuugcgacucuccgcaucggauccuggaugggaaaaauuguacccucaucgacgcccugcugggagauccccacugcgacggcuuucagaacaaggagugggaucucuucgucgaacgcagcaaagccuacuccaauuguuauccuuacgacgugcccgauuaugcuucucugagaagccuuguugccuccagcgggacgcuggaguuuauuaacgaagacuucaauuggaccggaguggcucaggauggcggcucuuacgccugcaagcggggguccgucaacagcuuuuucucucgccucaauuggcugcauaaacuugaguauaaguacccugcgcugaacgugacaaugcccaauaacggaaaguuugacaaacucuauaucuggggcguucaccacccuuccaccgauagcgaccaaacaucucuguacgugagagccuccgggcgggucaccgugagcacgaagcgcucccagcagacagugaccccgaauauuggaucuagacccuggguccggggccagagcucccgcaucagcauuuacuggacaaucguuaaaccuggggacauucugcucaucucuuccaccggaaaccugaucgcucccagaggcuauuucaagauucggaacggcaagagcucuaucaugcgcagcgaugugccuauugggaauuguuccucugagugcaucacccccaacggaagcauuccgaaugacaaaccuuuucaaaacgugaauagaaucacauacggcgccuguccccgguaugucaagcagaacacgcuuaaacuggcuaccgggaugcgcaaugugccugaaaagcagacaagaggaaucuucggcgccauugcgggguuuaucgagaacggaugggaaggcaugguugauggcugguacggguuccggcaucaaaauuccgagggaaccggccaggccgcugaccucaaaagcacacaggccgcuauugaucagaucaacgggaagcugaauagacuuauugagaaaaccaacgaaaaguuucaccaaaucgagaaggaguucucugaaguggaaggacgcauccaggaccuggagaaauaugucgaggauacgaagauugaccucugguccuacaaugccgaacugaucguggcccuggagaaccagcauacaauugaucucaccgacagcgaaaugaauaaacuguucgagaagacccggaaacagcuuagagaaaacgcugaggauaugggcaacgggugcuuuaagaucuaucacaagugugacaaugcgugcauuggcucuauccgcaacggaacauacgaccacgauguuuaccgggacgaggcccugaauaacagauuccaaauuaaaggcguggaacucaaguccggguauaaagauuggauccuguggaucagcuuugcuauuuccugcuuccuucugugugucgugcuccugggauuuaucaugugggccugccagaagggcaauauucgcuguaacaucugcauuuga

SEQ ID NO: 200721 - RNA, 1701 nt, Artificial Sequence
  derived and/or modified CDS sequence (opt5) from hemagglutinin__InfluenzaA__AFH00197
augaagaccaucauugcccugagcuacauccucugccugguguucgcucagaaacuucccggcaacgacaauuccacagccacgcugugucucgggcaccaugcggucccuaacggaacccugguuaagacaauuaccaaugaucaaaucgaggugacaaacgcuaccgaacuugugcagucuagcuccacaggcagaauuugcgacucuccgcaccggauccuggaugggaaaaauuguacccucaucgacgcccugcugggagauccccauugcgacggcuuucagaacaaggagugggaucucuucgucgaacgcagcaaagccuauuccaauuguuacccuuaugacgugcccgauuacgcuucucugagaagccuuguugccuccagcgggacgcuggaguuuauuaacgaagacuucaauuggaccggaguggcucaggauggcggcucuuauacaugcaagcggggguccgucaacagcuuuuucucucgccucaauuggcugcacaaacuugaguacaaguauccugcccugaacgugaccaugcccaauaacggaaaguuugacaaacucuacaucuggggcguucaucacccuuccacagauagcgaccaaaccucucuguacgugagagcguccgggcgggucacggugagcacaaagauuucccagcagaccgugaucccgaauauuggaucucgccccugggucagaggccugagcucccggaucagcauuuauuggacaaucguuaaaccuggggacauccuccugauuaacucuaccggaaaccuuaucgcuccccgcggcuacuucaagauuagaaauggcaaguccagcaucaugcggucugaugccccuauugggaacuguagcuccgagugcaucacccccaauggaucuaucccgaacgacaaaccuuuucagaaugugaaccgcauuacauauggcgccugucccagauacgugaagcaaaauacgcugaaacucgcuaccgggaugcggaacgucccugaaaagcagacacgcggaaucuucggcgccauugcgggguuuaucgagaauggaugggaaggcaugguggauggcugguauggguucagacaccagaacagcgagggaaccggccaggccgcugaccugaaauccacacaagccgcuauugaucagaucaaugggaaacuuaaccggcugaucgagaagaccaaugaaaaguuucaucagauugagaaggaguucagcgaaguugaaggaagaauccaagaccucgagaaauacguggaggauacgaagauugaccuguggucuuauaacgccgaacugcucgucgcccuggagaaucagcacacaaucgaucuuaccgacuccgaaaugaacaaacuguucgagcgcacccggaagcagcucagagaaaacgcugaggauaugggcaaugggugcuuuaaaauuuaccauaagugugacaacgcgugcaucggcagcauucgcaauggaacauacgaccacgauguguaucgggacgaggcccugaacaauagauuccagaucaagggcguugaacuuaaaucuggguacaaggauuggauccuguggauuuccuuugcuaucagcugcuuccuccugugugugguccugcucggauuuauuaugugggccugccaaaaaggcaacauccgcuguaauauuugcaucuga

SEQ ID NO: 200722 - RNA, 1701 nt, Artificial Sequence
  derived and/or modified CDS sequence (opt5) from hemagglutinin__InfluenzaA__AFH00208
augaagaccaucauugcccugagcuacauccucugccugguguucgcucagaaacuucccggcaacgacaauuccacagccacgcugugucucgggcaccaugcggucccuaacggaacccugguuaagacaauuaccaaugaucaaaucgaggugacaaacgcuaccgaacuugugcagucuagcuccacaggcagaauuugcgacucuccgcaccggauccuggaugggaaaaauuguacccucaucgacgcccugcugggagauccccauugcgacggcuuucagaacaaggagugggaucucuucgucgaacgcagcaaagccuauuccaauuguuacccuuaugacgugcccgauuacgcuucucugagaagccuuguugccuccagcgggacgcuggaguuuauuaacgaagacuucaauuggaccggaguggcucagaacggcgauucuuaugccugcaagcggggcuccgucaagagcuuuuucucucgccucaauuggcugcacgaguccgaguacaaauauccugcgcuuaacgugacaaugcccaauaacgacaaguuugauaaacuguacaucuggggaguucaucacccuagcaccgacagagaacaaacaucucucuacauucgggccuccgggcgcgugaccgucagcacgaagagaucccagcagacagugaucccgaauauuggcucucggcccugggugcgcgggcugagcuccagaaucagcauuuauuggaccaucgucaaaccuggagacauccugcucauuaacucuacaggcaaccugaucgcuccccggggguacuucaagauucgcaccggaaaguccagcguuaugagaucugaugccccuaucggcaccuguagcuccgagugcauuacacccaauggcucuaucccgaacgacaaaccuuuucagaaugugaaccggaucacguauggggcuuguccccgcuacgugaagcaaaauacccuuaaacuggccacaggaaugagaaacgucccugaaaagcagacccggggcauuuucggggcgaucgccggauuuauugagaauggcugggaggggaugguggauggaugguauggcuucagacaccagaacagcgaaggcacagggcaggcugccgaccucaaauccacccaagcugccaucgaucagauuaauggaaagcugagccgccuuaucgagaaaacgaacgaaaaguuucaucagaucgagaaggaguucucugaaguugagggccggauucaagaccuggaaaaauacguggaggauacaaagaucgaccucugguccuauaaugccgaacugcuggucgcucucgagaaccagcacaccauugaucugaccgacagcgaaaugaauaaacuuuucgagaagacaagaaaacagcugcgcgagaacgcggaagauauggggaauggaugcuuuaagaucuaccauaagugugacaacgccugcauuggcucuauccggaacgggaccuacgaccacgauguguauagagacgaggcucucaauaaccgcuuccagauuaaaggcguugaacugaaguccggauacaaagauuggauccuuuggaucagcuuugccauuuccugcuuccugcucugugugguccugcugggcuuuaucaugugggccugccaaaaggggaauauucgguguaacaucugcauuuga

SEQ ID NO: 200723 - RNA, 1701 nt, Artificial Sequence
  derived and/or modified CDS sequence (opt5) from hemagglutinin__InfluenzaA__AFH00219
augaagaccaucauugcccugagcuacauccucugccugguguucgcucagaaacuucccggcaacgacaauuccacagccacgcugugucucgggcaccaugcggucccuaacggaacccugguuaagacaauuaccaaugaucaaaucgaggugacaaacgcuaccgaacuugugcagucuagcuccacaggcagaauuugcgacucuccgcaccggauccuggaugggaaaaauuguacccucaucgacgcccugcugggagaucccaacugcgacggcuuucagaauaaggagugggaucucuucgucgaacgcagcaaagccuauuccaacuguuacccuuaugacgugcccgauuacgcuucucugagaagccuuguugccuccagcgggacgcuggaguuuaccaaugaagacuucaacuggacaggaguggcucaggauggcggcucuuaugccugcaagcggggguccgucaauagcuuuuucucucgccucaacuggcugcauaaacuugaguacaaguauccugcgcugaaugugaccaugcccaacaauggaaaguuugacaaacucuacauuuggggcguucaccauccuuccacagauagcgaccaaaccucucuguacgugagagccuccgggcgggucacggugagcacaaagcgcucccagcagaccgugacaccgaacaucggaucuagacccuggguccggggccugagcucccgcauuagcaucuauuggaccauuguuaaaccuggggacauccuccugauuaacucuaccggaaaucuuaucgcucccagaggcuacuucaagauccggaacggcaaguccagcauuaugcgcucugaugccccuaucgggacauguagcuccgagugcauuacgcccaauggaucuaucccgaacgacaaaccuuuucagaaugugaacagaauuaccuauggcgcuuguccccgguacgugaagcaaaauacacugaaacucgccaccgggaugcgcaacgucccugaaaagcagacaagaggaaucuucggcgcgaucgccggguuuauugagaauggaugggaaggcaugguggauggcugguauggguuccggcaccagaacagcgagggaaccggccaggcugccgaccugaaauccacgcaagcugccaucgaucagauuaaugggaaacuuaacagacugaucgacaagacaaaugagaaguuucaccagauugaaaaggaguucagcgaaguugagggacgcauccaagaucucgaaaaauacguggaggacaccaagaucgaucuguggucuuauaacgccgagcugcucgucgcucuggaaaaucagcauaccauugaccuuacagauuccgagaugaacaaacuguucgaaaagacccggaaacagcucagagagaacgcggaagacaugggcaaugggugcuuuaagaucuaccacaagugugacaacgccugcauuggcagcauccgcaauggaacauacgaucaugacguguaucgggaugaggcucugaacaauagauuccagauuaaaggcguugagcuuaagucuggguacaaagacuggauccuguggauuuccuuugccaucagcugcuuccuccugugugugguccugcucggauuuaucaugugggccugccaaaagggcaacauucgcuguaauaucugcauuuga

SEQ ID NO: 200724 - RNA, 1701 nt, Artificial Sequence
  derived and/or modified CDS sequence (opt5) from hemagglutinin__InfluenzaA__AFH00230
augaagaccaucauugcccugagcuacauccucugccugguguucgcucagaaacuucccggcaacgacaauuccacagccacgcugugucucgggcaccaugcggucccuaacggaacccugguuaagacaauuaccaaugaucaaaucgaggugacaaacgcuaccgaacuugugcagucuagcuccacaggcagaauuugcgacucuccgcaccggauccuggaugggaaaaauuguacccucaucgacgcccugcugggagauccccauugcgacggcuuucagaacaaggagugggaucucuucgucgaacgcagcaaagccuauuccaauuguuacccuuaugacgugcccgauuacgcuucucugagaagccuuguugccuccagcgggacgcuggaguuuauuaacgaagacuucaauuggaccggaguggcucaggauggcaagucuuaugccugcaagcggggcuccgucaagagcuuuuucucucgccucaacuggcugcacaaacuugaguacaaauauccugcgcugaaugugacaaugcccaacaaugggaaguuugacaaacucuacaucuggggaguucaucacccuuccaccaacagcgaucaaacaucucuguacgugagagccuccggccgggucaccgugagcacgaagcgcucccagcagacagugauuccgaauaucggguucagacccuggguccggggacugucuagccgcauuuccaucuauuggaccauuguuaagccuggcgacauccuccugaucaacagcacagggaaccuuauugcucccagaggauacuuuaaaauccggaauggcaagucuuccauuaugcgcagcgacgccccuaucggcaacuguucuagcgagugcauuacccccaauggguccaucccgaacgauaaaccuuuccagaaugugaacagaaucaccuauggagcuuguccccgguacgugaagcaaaauacacugaaacucgccacgggcaugcgcaacgucccugaaaagcagaccagagggauuuuuggagcgaucgccggcuucauugagaaugggugggaaggaaugguggacggcugguauggcuuucggcaccagaacucugaggggacaggacaggcugccgaucugaaaagcacccaagcugccaucgaccagauuaauggcaaacuuaacagacugaucgagaagacaaaugaaaaguuccaucagaucgagaaggaguucuccgaaguugaagggcgcauucaagaucucgagaaauacguggaggacaccaagaucgaucuguggagcuauaacgccggacugcucgucgcucuggaaaaucagcacacgauugaccuuacagauucugagaugaacaaacuguuugaacggaccagaaagcagcuccgcgagaacgcggaagacaugggcaaugggugcuucaagaucuaccauaaaugugauaacgccugcauuggcuccauccggaauggaaccuacgaccacgacguguauagagaugaggcucugaacaaucgcuuucagauuaagggcguugagcuuaaaagcggguacaaggacuggauccuguggaucucuuucgccauuuccugcuuucuccugugugugguccugcucggauucaucaugugggccugccaaaaaggcaacauucgguguaauaucugcauuuga

SEQ ID NO: 200725 - RNA, 1701 nt, Artificial Sequence; identical to SEQ ID NO: 193096
  derived and/or modified CDS sequence (opt5) from hemagglutinin__InfluenzaA__AFH00241

SEQ ID NO: 200726 - RNA, 1701 nt, Artificial Sequence
  derived and/or modified CDS sequence (opt5) from hemagglutinin__InfluenzaA__AFH00252
augaagaccaucauugcccugagcuacauccucugccugguguucgcucagaaacuucccggcaacgacaauuccacagccacgcugugucucgggcaccaugcggucccuaacggaacccugguuaagacaauuaccaaugaucaaaucgaggugacaaacgcuaccgaacuugugcagucuagcuccacaggcagaauuugcgacucuccgcaccggauccuggaugggaaaaauuguacccucaucgacgcccugcugggagauccccauugcgacgauuuucagaacaaggagugggaccucuucgucgaacgcagcaaagccuauuccaauuguuacccuuaugaugugcccgacuacgcuucucugagaagccuuguugccuccagcggcacgcuggaguuuauuaacgaagauuucaauuggaccgggguggcucagucuggagacuccuaugccugcaagcggggcagcgucaagucuuucuucucccgccucaacuggcugcacgagagcgaguacaaauauccugcgcuuaaugugacaaugcccaacaaugauaaguuugacaaacuguacaucuggggcguucaucacccuucuaccgacagagaacaaacaucccucuacauucgggccagcgggcgcgugaccgucuccacgaagagaucucagcagacagugaucccgaacauuggaagccggcccugggugcgcggccuguccagcagaaucucuauuuauuggaccaucgucaaaccuggggauauccugcucauuaauuccacaggaaaccugaucgcuccccggggcuacuucaagauucgcaccgggaaguccucuaucaugagaagcgacgccccuauuggaaccuguuccucugagugcaucacacccaacggcagcaucccgaaugauaaaccuuuucagaacguuaaucggauuacguauggcgcuuguccccgcuacgugaagcaaaacacccuuaaacuggccacagggaugagaaaugugccugaaaagcagacccggggaaucuucggcgcgauugccggguuuaucgagaacggaugggagggcauggucgacgggugguauggauucagacaccagaauagcgaaggcacaggccaggcugccgaucucaaaagcacccaagcugccauugaccagaucaacgggaagcugaaucgccuuaucgagaaaacgaacgaaaaguuucaucagauugagaaggaauuuucugagguggagggacggauccaagaucuggaaaaauacguugaggacacaaagauugaucucugguccuauaaugccgaacugcugguggcucucgagaaccagcacaccaucgaccugaccgauagcgaaaugaauaaacuuuucgagaagacaagaaaacagcugcgcgagaacgcggaagacaugggcaaugggugcuuuaagauuuaccauaagugugacaacgccugcaucggaucuauucggaacggcaccuacgaucacgacgucuauagagaugaggcucucaauaaccgcuuccagaucaaagggguggaacugaaguccggcuacaaagacuggauccuuuggauuagcuuugccaucuccugcuuccugcucuguguugugcugcugggauuuauuaugugggccugccaaaagggcaauauccgguguaacauuugcaucuga

SEQ ID NO: 200727 - RNA, 1701 nt, Artificial Sequence
  derived and/or modified CDS sequence (opt5) from hemagglutinin__InfluenzaA__AFH00263
augaagaccaucauugcccugagcuacauccuccaccugguguucgcucagaaacuucccggcaacgacaauuccacagccacgcugugccucgggcaucacgcggucccuaacggaacccugguuaagacaauuaccaaugaucaaaucgaggugacaaacgcuaccgaacuugugcagucuagcuccacaggcagaauuugugacucuccgcaucggauccuggaugggaaaaauugcacccucaucgacgcccugcugggagaucccaacugugacggcuuucagaauaaggagugggaucucuucgucgaacgcagcaaagccuauuccaacugcuacccuuaugacgugcccgauuacgcuucucugagaagccuuguugccuccagcgggacgcuggaguuuaccaaugaagacuucaacuggacaggaguggcucaggauggcggcucuuaugccuguaagcggggguccgucaauagcuuuuucucucgccucaacuggcugcacaaacuugaguacaaguauccugcgcugaaugugaccaugcccaacaauggaaaguuugacaaacucuacauuuggggcguucaucacccuuccacagauagcgugcaaaccucucuguacgucagagccuccgggaaggugacggugagcacaaaacggucccagcagaccgucacaccgaacaucggaucuaagcccuggguucgcggccugagcuccagaauuagcaucuauuggaccauugugaagccuggggacauccuccugauuaacucuaccggaaaucuuaucgcuccccggggcuacuucaaaauccgcaacggcaaguccagcauuaugagaucugacgccccuaucgggacaugcagcuccgaguguauuacgcccaauggaucuaucccgaacgauaaaccuuuucagaaugugaaccggauuaccuauggcgcuugcccccgcuacgucaagcaaaauacacugaaacucgccaccgggaugagaaacgugccugaaaagcagacacggggaaucuucggcgcgaucgccggguuuauugagaauggaugggaaggcaugguugacggcugguauggguuccgccaccagaacagcgagggaaccggccaggcugccgaucugaaauccacgcaagcugccaucgaccagauuaaugggaaacuuaacagacugaucgagaagacaaaugaaaaguuucaucagauugagaaggaguucagcgaaguggaaggacggauccaagaucucgagaaauacgucgaggacaccaagaucgaucuguggucuuauaacgccgaacugcucguggcucuggagaaucagcacaccauugaccuuacagauuccgaaaugaacaaacuguucgagaagaccagaaagcagcuccgcgaaaacgcggaggacaugggcaauggguguuuuaaaaucuaccauaagugcgauaacgccuguauuggcagcauccggaauggaacauacgaccacgacguuuauagagaugaggcucugaacaaucgcuuccagauuaaaggcguggaacuuaagucuggguacaaagacuggauccuguggauuuccuuugccaucagcugcuuccuccugugcgucgugcugcucggauuuaucaugugggccugucaaaagggcaacauucggugcaauaucuguauuuga

SEQ ID NO: 200728 - RNA, 1701 nt, Artificial Sequence
  derived and/or modified CDS sequence (opt5) from hemagglutinin__InfluenzaA__AFH00274
augaagaccaucauugcccugagcuacauccucugccugguguucgcucagaaacuucccggcaacgacaauuccacagccacgcugugucucgggcaccaugcggucccuaacggaacccugguuaagacaauuaccaaugaucaaaucgaggugacaaacgcuaccgaacuugugcagucuagcuccacaggcagaauuugcgacucuccgcaccggauccuggaugggaaaaauuguacccucaucgacgcccugcugggagauccccauugcgacggcuuucagaacaaggagugggaucucuucgucgaacgcagcaaagccuauuccaauuguuacccuuaugacgugcccgauuacgcuucucugagaagccuuguugccuccagcgggacgcuggaguuuauuaacgaagacuucaauuggaccggaguggcucaggauggcaagucuuaugccugcaagcggggcuccgucaacagcuuuuucucucgccucaauuggcugcacaaacuugaguacaaguauccugcgcugaacgugacaaugcccaauaacgggaaauuugacaagcucuacaucuggggaguucaucacccuuccaccgauagcgaccaaacaucucuguacgugagagccuccggccgggucaccgugagcacgaaacgcucccagcagacagugauuccgaauaucggguucagacccuggguccggggacugucuagcggcauuuccaucuauuggaccauuguuaagccuggggacauccuccugaucaacagcacaggaaaccuuauugcuccccgcggcuacuuuaagaucagaaauggcaaaucuuccauuaugcggagcgaugccccuaucgggaacuguucuagcgagugcauuacccccaauggauccaucccgaacgacaagccuuuccagaaugugaaccgcaucaccuauggcgcuugucccagauacgugaaacaaaauacacugaagcucgccacggggaugcggaacgucccugaaaaacagacccgcggaauuuuuggcgcgaucgccggguucauugagaauggaugggaaggcaugguggauggcugguauggguuuagacaccagaacucugagggaacaggccaggcugccgaccuuaagagcacccaagcugccaucgaucagauuaaugggaaacugaaccggcugaucgagaagacaaaugaaaaguuccaucagaucgagaaagaguucuccgaaguugaaggacgcauucaagaccucgagaaguacguggaggauaccaaaaucgaccuguggagcuauaacgccggccugcucgucgcucuggaaaaucagcacacgauugaucuuacagacucugagaugaacaagcuguuugaaagaacccggaaacagcucagagagaacgcggaagauauggggaauggcugcuucaagaucuaccauaagugugacaacgccugcauuggauccauccgcaauggcaccuacgaccacgauguguaucgggacgaggcucugaacaauagauuucagauuaaagggguugagcuuaagagcggauacaaagauuggauccuguggaucucuuucgccauuuccugcuuucuccugugugugguccugcucggcuucaucaugugggccugccaaaaggggaacauucgcuguaauaucugcauuuga

SEQ ID NO: 200729 - RNA, 1701 nt, Artificial Sequence
  derived and/or modified CDS sequence (opt5) from hemagglutinin__InfluenzaA__AFH00285
augaagaccaucauugcccugagcuacauccucugccugguguucgcucagaaacuucccggcaacgacaauuccacagccacgcugugucucgggcaccaugcggucccuaacggaacccugguuaagacaauuaccaaugaucaaaucgaggugacaaacgcuaccgaacuugugcagucuagcuccacaggcagaauuugcgggucuccgcaccggauccuggacgggaaaaauuguacccucaucgaugcccugcugggcgacccccauugcgauggguuucagaacaaggagugggaccucuucgucgaacgcagcaaagccuauuccaauuguuacccuuaugaugugcccgacuacgcuucucugagaagccuuguugccuccagcggaacgcuggaguuuauuaacgaagauuucaauuggaccggcguggcucaggacggcgggucuuaugccugcaagcggggauccgucaacagcuuuuucucucgccucaauuggcugcacaaacuugaguacaaguauccugcgcugaacgugacaaugcccaauaacggcaaguuugauaaacucuacaucuggggaguucaucacccuuccaccgacagcgaucaaacaucucuguacgugagagccuccggacgggucaccgugagcacgaagcgcucccagcagacagugaccccgaauauuggcucuagacccuggguccgggggcagagcucccgcaucagcauuuauuggacaaucguuaaaccuggagacauucugcucaucaacucuaccggcaaccugaucgcucccagaggcuacuucaagauucggaaugggaaguccagcaucaugcgcucugacgccccuauuggaaacuguagcuccgagugcaucacccccaauggcucuauuccgaacgauaaaccuuuucaaaaugugaacagaaucacauauggggcuuguccccgguacgugaagcagaauacgcuuaaacuggccaccggaaugcgcaacgucccugaaaagcagacaagaggcaucuucggggcgauugccggauuuaucgagaauggcugggaaggcaugguggacgggugguauggauuccggcaccagaacagcgagggcaccgggcaagcugccgaucucaaauccacacaggcugccauugaccagaucaauggaaagcugaacagacuuauugagaaaaccaaugaaaaguuucaucaaaucgagaaggaguucagcgaaguugaaggccgcauccaggaucuggagaaauacguggaggacacgaagauugaucucuggucuuauaacgccgaacugcuggucgcucucgagaaucagcacacaaucgaccugaccgauuccgaaaugaacaaacuuuucgagaagacccggaaacagcugagagaaaacgcggaggacauggggaauggcugcuuuaagauuuaccauaagugugauaacgccugcaucggaagcauucgcaauggcacauacgaccacgacguguaucgggaugaggcucucaacaauagauuccaaaucaaagggguugaacugaagucuggauacaaagacuggauucuuuggaucuccuuugccaucagcugcuuccugcucugugugguccugcugggcuuuauuaugugggccugccagaaggggaacauccgcuguaauauuugcaucuga

SEQ ID NO: 200730 - RNA, 1701 nt, Artificial Sequence
  derived and/or modified CDS sequence (opt5) from hemagglutinin__InfluenzaA__AFH00296
augaagaccaucauugcccugagcuacaucuucugccucguguuugcucagaaacugcccggcaacgacaauuccacagccacgcuuugucuggggcaccaugcggucccuaacggaacccucguuaagacaauuaccaaugaucaaaucgaggugacaaacgcuaccgaacuggugcagucuagcuccacaggcagaauuugcgacucuccgcaccggauccuugaugggaaaaauuguacccugaucgacgcccuccugggagauccccauugcgacggcuuccagaacaaggagugggaucuguuugucgaacgcagcaaagccuauuccaauuguuacccuuaugacgugcccgauuacgcuucucucagaagccugguugccuccagcgggacgcuugaguucauuaacgaagacuuuaauuggaccggaguggcucagucuggcggcuccuaugccugcaagcgggggagcgucaacucuuucuuuucccgccugaauuggcuccacgagagcgaguacaaguauccugcgcugaacgugacaaugcccaauaacggaaaauucgauaaacuuuacaucuggggcguucaucacccuucuaccgacagagaacaaacaaaucuguacgugcgggccuccgggcgcgucaccgugagcacgaagagaucccagcagacagugauuccgaacaucggaucucggcccuggguccgcggccucagcuccagaauuagcaucuauuggaccauuguuaagccuggggauauccugcugaucaacucuacaggaaaucucauugcuccccggggcuacuuuaaaauccgcaccggcaaguccagcauuaugagaucugacgccccuaucgggaccuguagcuccgagugcauuacacccaacggaucuaucccgaaugacaagccuuuccagaacgugaaucggaucacguauggcgcuuguccccgcuacgugaaacaaaacacccugaaacuugccacagggaugagaaaugucccugaaaagcagacccggggaauuuuuggcgcgaucgccggguucauugagaacggaugggagggcaugguggauggcugguauggguuuagacaccagaauagcgaaggaacaggccaggcugccgaccugaaguccacccaagcugccaucgaucagauuaacgggaaacucaaucgccugaucgagaagacgaacgaaaaauuccaucagaucgagaaggaguucagcgaaguugagggacggauucaagaccuugaaaaguacguggaggauacaaaaaucgaccuguggucuuauaaugccgaacuccuggucgcucuggagaaccagcacaccauugaucucaccgacuccgaaaugaauaagcuguuugagaaaacaagaaagcagcuucgcgagaacgcggaagauaugggcaacgggugcuucaaaaucuaccauaagugugacaaugccugcauuggcagcauccggaacggaaccuacgaucacgacguguauagagacgaggcucugaauaaccgcuuucagauuaagggcguugaacucaaaucuggguacaaggauuggauccuguggaucuccuucgccacaagcugcuuucuucugugugugguccuccugggauucauuaugugggccugccaaaaaggcaauauccgguguaacauuugcaucuga

SEQ ID NO: 200731 - RNA, 1701 nt, Artificial Sequence
  derived and/or modified CDS sequence (opt5) from hemagglutinin__InfluenzaA__AFH00307
augaagaccaucauugcccugagcuacauccucugccugguguucgcucagaaacuucccggcaacgacaauuccacagccacgcugugucucgggcaccaugcggucccuaacggaacccugguuaagacaauuaccaaugaucaaaucgaggugacaaacgcuaccgaacuugugcagucuagcuccacaggcagaauuugcgacucuccgcaccggauccuggaugggaaaaauuguacccucaucgacgcccugcugggagauccccauugcgacggcuuucagaacaaggagugggaucucuucgucgaacgcagcaaagccuauuccaauuguuacccuuaugacgugcccgauuacgcuucucugagaagccuuguugccuccagcgggacgcuggaguuuauuaacgaagacuucaauuggaccggaguggcucaggauggcggcucuuaugccugcaagcggggguccgucaacagcuuuuucucucgccucaauuggcugcacaaacuugaguacaaguauccugcgcugaacgugacaaugcccaauaacggaaaguuugacaaacucuacaucuggggcguucaucacccuuccaccgauagcgaccaaacaucucuguacgugagagccuccgggcgggucaccgugagcacgaagcgcucccagcagacagugaccccgaauauuggaucuagacccuggguccggggccagagcucccgcaucagcauuuauuggacaaucguuaaaccuggggacauucugcucaucaacucuaccggaaaccugaucgcucccagaggcuacuucaagauucggaauggcaaguccagcaucaugcgcucugaugccccuauugggaacuguagcuccgagugcaucacccccaauggaucuauuccgaacgacaaaccuuuucaaaaugugaacagaaucacauauggcgcuuguccccgguacgugaagcagaauacgcuuaaacuggccaccgggaugcgcaacgucccugaaaagcagacaagaggaaucuucggcgcgauugccggguuuaucgagaauggaugggaaggcaugguggauggcugguauggguuccggcaccagaacagcgagggaaccggccaagcugccgaccucaaauccacacaggcugccauugaucagaucaaugggaagcugaacagacuuauugagaaaaccaaugaaaaguuucaucaaaucgagaaggaguucagcgaaguugaaggacgcauccaggaccuggagaaauacguggaggauacgaagauugaccucuggucuuauaacgccgaacugcuggucgcucucgagaaucagcacacaaucgaucugaccgacuccgaaaugaacaaacuuuucgagaagacccggaaacagcugagagaaaacgcggaggauaugggcaaugggugcuuuaagauuuaccauaagugugacaacgccugcaucggcagcauucgcaauggaacauacgaccacgauguguaucgggacgaggcucucaacaauagauuccaaaucaaaggcguugaacugaagucuggguacaaagauuggauucuuuggaucuccuuugccaucagcugcuuccugcucugugugguccugcugggauuuauuaugugggccugccagaagggcaacauccgcuguaauauuugcaucuga

SEQ ID NO: 200732 - RNA, 1701 nt, Artificial Sequence; identical to SEQ ID NO: 200731
  derived and/or modified CDS sequence (opt5) from hemagglutinin__InfluenzaA__AFH00318

SEQ ID NO: 200733 - RNA, 1701 nt, Artificial Sequence
  derived and/or modified CDS sequence (opt5) from hemagglutinin__InfluenzaA__AFH00329
augaagaccaucauugcccugagcuacauccucugccugguguucgcucagaaacuucccggcaacgacaauuccacagccacgcugugucucgggcaccaugcggucccuaacggaacccugguuaagacaauuaccaaugaucaaaucgaggugacaaacgcuaccgaacuugugcagucuagcuccacaggcagaauuugcgacucucaccaucggauccuggaugggaaaaauuguacccucaucgacgcccugcugggagauccgcacugcgacggcuuucagaacaaggagugggaucucuucgucgaacgcagcaaagccuauuccaauuguuaccccuaugacgugccugauuacgcuucucugagaagccuuguugccuccagcgggacgcuggaguuuauuaacgaagacuucaauuggaccggaguggcucaggauggcaagucuuaugccugcaagcggggcuccgucaacagcuuuuucucucgccucaauuggcugcauaaacuugaguacaaguaucccgcgcugaacgugacaaugccuaauaacgggaaauuugacaagcucuacaucuggggaguucaccaccccuccaccgauagcgaccaaacaucuauuuacgugagagccuccggccgggucaccgugagcacgaaacgcucccagcagacagugaucccuaauauugggucuagaccguggguccggggaaucagcucccgcauuagcaucuauuggaccaucguuaagcccggcgacauucugcugaucaacucuacagggaaccucauugcuccuagaggauacuucaagauccggaauggcaaauccagcauuaugcgcucugaugcccccaucggcaacuguaauagcgagugcaucaccccuaacggguccauucccaaugacaagccguuucagaacgugaauagaaucaccuauggagcuuguccucgguacgugaaacaaaacacacugaagcuggccacgggcaugcgcaauguccccgaaaaacagaccagagggauuuucggagcgaucgccggcuuuauugagaacgggugggaaggaaugguggauggcugguauggcuuccggcaucaaaauucugaggggacaggacaggcugccgaccuuaagagcacccaggcugccaucgaucagaucaacggcaaacucaauagacugauugagaagacaaacgaaaaguuucaccagaucgagaaagaguucuccgaaguugaagggcgcauucaagaccuugagaaguacguggaggauaccaaaaucgaccuguggagcuauaaugccgaacuccuggucgcucuggagaaccagcauacgauugaucucacagacucugaaaugaacaagcuguucgagcggaccagaaaacagcuucgcgaaaaugcggaggauaugggaaacggcugcuuuaagaucuaccacaagugugacaaugccugcauuggguccauccggaacggcaccuacgaccacgauguguauagagacgaggcucugaauaaccgcuuccagaucaaaggaguugaacucaagagcggcuacaaagauuggauucuguggaucucuuuugccacauccugcuuccuucugugugugguccuccugggguuuauuaugugggccugccaaaagggaaauauccgguguaacauuugcaucuga

SEQ ID NO: 200734 - RNA, 1701 nt, Artificial Sequence
  derived and/or modified CDS sequence (opt5) from hemagglutinin__InfluenzaA__AFH00340
augaagaccaucauugcccugagcuacauccucugccugguguucgcucagaaacuucccggcaacgacaauuccacagccacgcugugucucgggcaccaugcggucccuaacggaacccugguuaagacaauuaccaaugaucaaaucgaggugacaaacgcuaccgaacuugugcagucuagcuccacaggcagaauuugcgacucuccgcaccggauccuggaugggaaaaauuguacccucaucgacgcccugcugggagauccccauugcgacggcuuucagaacaaggagugggaucucuucgucgaacgcagcaaagccuauuccaauuguuacccuuaugacgugcccgauuacgcuucucugagaagccuuguugccuccagcgggacgcuggaguuuauuaacgaagacuucaauuggaccggaguggcucaggauggcaagucuuaugccugcaagcggggcuccgucaacagcuuuuucucucgccucaauuggcugcacaaacuugaguacaaguauccugcgcugaacgugacaaugcccaauaacgggaaauuugacaagcucuacaucuggggaguucaucacccuuccaccgauagcgaccaaacaucucuguacgugagagccuccggccgggucaccgugagcacgaaacgcucccagcagacagugauuccgaauaucggguucagacccuggguccggggacugucuagccgcauuuccaucuauuggaccauuguuaagccuggcgacauccuccugaucagcucuacagggaaccuuauugcucccagaggauacuuuaagauccggaacggcaaauccagcauuaugcgcucugaugccccuaucggcaauuguagcuccgagugcauuacccccaacgggucuaucccgaaugacaagccuuuccagaacgugaauagaaucaccuauggagcuuguccccgguacgugaaacaaaacacacugaagcucgccacgggcaugcgcaauauuccugaaaaacagaccagagggaucuuuggagcgauugccggcuucaucgagaacgggugggaaggaauggucgauggcugguauggcuuucggcaccagaauagcgaggggacaggacaggcugccgaccugaaguccacccaagcugccauugaucagaucaacggcaaacuuaauagacugaucgagaagacaaacgaaaaguuccaucagauugagaaagaguucagcgaaguggaagggcgcauccaagaccucgagaaguacguugaggauaccaaaauugaccuguggucuuauaaugccggacugcucguggcucuggaaaaccagcacacgaucgaucuuacagacuccgagaugaauaagcuguuugaacggaccagaaaacagcuccgcgagaacgcggaagauaugggcaacgggugcuucaagauuuaccauaagugugacaaugccugcaucggcagcauucggaacggaaccuacgaccacgaugucuauagagacgaggcucugaauaaccgcuuucagaucaaaggcguggagcuuaagucuggguacaaagauuggauccuguggauuuccuucgccaucagcugcuuucuccuguguguugugcugcucggauucauuaugugggccugccaaaagggcaauauccgguguaacauuugcaucuga

SEQ ID NO: 200735 - RNA, 1701 nt, Artificial Sequence
  derived and/or modified CDS sequence (opt5) from hemagglutinin__InfluenzaA__AFH00351
augaagaccaucauugcccugagcuacauccucugccugguguucgcucagaaacuucccggcaacgacaauuccacagccacgcugugucucgggcaccaugcggucccuaacggaacccugguuaagacaauuaccaaugaucaaaucgaggugacaaacgcuaccgaacuugugcagucuagcuccacaggcagaauuugcgacucuccgcaccggauccuggaugggaaaaauuguacccucaucgacgcccugcugggagauccccauugcgacggcuuucagaacaaggagugggaucucuucgucgaacgcagcaaagccuauuccaauuguuacccuuaugacgugcccgauuacgcuucucugagaagccuuguugccuccagcgggacgcuggaguuuaccaaggaaggauucaacuggacaggcguggcucaggacggcaagucuuaugccugcaaacggggguccgucaagagcuuuuucucucgccucaauuggcugcacaaacuugaguacaaguauccugcgcugaacgugaccaugcccaauaacgauaaauuugacaagcucuacauuuggggaguucaucacccuuccacagauagcgaccaaaccucucuguacgugcaggccuccggcagagucacggugagcacaaagcggucccagcagaccgugaucccgaauauugggucucgccccugggucagaggaaucagcucccggauuagcaucuauuggacaauuguuaaaccuggcgacauccugcucaucaacucuaccgggaaucugauugcuccccgcggauacuucaagaucagaaacggcaaauccagcauuaugcggucugaugccccuaucggcaacuguaauagcgagugcauuacccccgacggguccaucccgaacgauaagccuuuucaaaaugugaaccgcaucacauauggagcuugucccagauacgugaaacagaauacgcuuaagcuggccaccggcaugcggaacgucccugaaaaacagacacgcgggauuuucggagcgaucgccggcuuuauugagaaugggugggaaggaaugguggacggcugguauggcuucagacaccagaacucugaggggaccggacaagcugccgaucucaagagcacacaggcugccaucgaccagauuaauggcaagcugaaccggcuuaucgagaaaaccaauaagaaauuucaucaaaucgaaaaggaguucuccgaaguugaggggcgcauucaggaucuggaaaaauacguggaggacacgaagaucgaucucuggagcuauaacgccgagcugcuggucgcucucgaaaaucagcacacaauugaccugaccgauucugagaugaacaaacuuuucgaaagaacccggaagcagcugagagagaaugcggaagacaugggaaacggcugcuuuaagaucuaccauaaaugugacaacgccugcauuggguccauccgcaauggcacauacgaucacgacguguaucgggaugaggcucucaacaauagauuccaaauuaagggaguugagcugaaaagcggcuacaaggacuggauccuuuggaucucuuuugccauuuccugcuuccugcucugugugguccugcugggguuuaucaugugggccugccagaagggaaacauucgcuguaauaucugcauuuga

SEQ ID NO: 200736 - RNA, 1701 nt, Artificial Sequence
  derived and/or modified CDS sequence (opt5) from hemagglutinin__InfluenzaA__AFH00362
augaagaccaucauugcccugagcuacauccucugccugguguucgcucagaaacuucccggcaacgacaauuccacagccacgcugugucucgggcaccaugcggucccuaacggaacccugguuaagacaauuaccaaugaucaaaucgaggugacaaacgcuaccgaacuugugcagucuagcuccacaggcagaauuugcgacucuccgcaccggauccuggaugggaaaaauuguacccucaucgacgcccugcugggagauccccauugcgacggcuuucagaacaaggagugggaucucuucgucgaacgcagcaaagccuauuccaauuguuacccuuaugacgugcccgauuacgcuucucugagaagccuuguugccuccagcgggacgcuggaguuuaccaacgaaggauucaauuggacaggcguggcucaggacggcaagucuuaugccugcaagcggggguccgucaagagcuuuuucucucgccucaacuggcugcacaaacuugaguacaaauauccugcgcugaaugugaccaugcccaacaaugauaaguuugacaaacucuacauuuggggaguucaucacccuuccacagauagcgaccaaaccucucuguacgugcaggccuccggcagagucacggugagcacaaagcggucccagcagaccgugaucccgaacauugggucucgccccugggucagaggaaucagcucccggauuagcaucuauuggacaauuguuaagccuggcgacauccugcucaucaauucuaccgggaaccugauugcuccccgcggauacuucaaaaucagaaacggcaaguccagcauuaugcggucugaugccccuaucgacaauuguaacagcgagugcauuacccccaauggcuccaucccgaacgauaaaccuuuucaaaaugugaaccgcaucacauauggggcuugucccagauacgugaagcagaauacgcuuaaacuggccaccggaaugcggaacgucccugaaaagcagacacgcggcauuuucggggcgaucgccggauuuauugagaauggcugggaagggaugguggacggaugguauggcuucagacaccagaacucugagggcaccgggcaagcugccgaucucaaaagcacacaggcugccaucgaccagauuaauggaaagcugaaccggcuuaucgagaagaccaaugaaaaauuucaucaaaucgagaaggaguucuccgaaguugaaggccgcauucaggaucuggagaaauacguggaggacacgaagaucgaucucuggagcuauaacgccgaacugcuggucgcucucgagaaucagcacacaauugaccugaccgauucugaaaugaacaaacuuuucgagagaacccggaagcagcugagagaaaacgcggaggacauggggaauggaugcuuuaagaucuaccauaaaugugacaacgccugcauuggcuccauccgcaaugggacauacgaucacgacguguaucgggaugaggcucucaacaauagauuccaaauuaagggcguugaacugaaaagcggauacaaggacuggauccuuuggaucucuuuugccaccuccugcuuccugcucugugugguccugcugggcuuuauuaugugggccugccagaaagggaacauccgcuguaauauuugcaucuga

SEQ ID NO: 200737 - RNA, 1701 nt, Artificial Sequence
  derived and/or modified CDS sequence (opt5) from hemagglutinin__InfluenzaA__AFH00384
augaagaccaucauugcccugagcuacauccucugccugguguucgcucagaaacuucccggcaacgacaauuccacagccacgcugugucucgggcaccaugcggucccuaacggaacccugguuaagacaauuaccaaugaucaaaucgaggugacaaacgcuaccgaacuugugcagucuagcuccacaggcagaauuugcgacucuccgcaccggauccuggaugggaaaaauuguacccucaucgacgcccugcugggagauccccauugcgacggcuuucagaacaaggagugggaucucuucgucgaacgcagcaaagccuauuccaauuguuacccuuaugacgugcccgauuacgcuucucugagaagccuuguugccuccagcgggacgcuggaguuuaccaaggaaggauucaacuggacaggcguggcucaggacggcaagucuuaugccugcaaacggggguccgucaauagcuuuuucucucgccucaacuggcugcacaaacuugaguacaaguauccugcgcugaaugugaccaugcccaacaaugauaaguuugacaaacucuacauuuggggaguucaucacccuuccacagauagcgaccaaaccucucuguacgugcaggccuccggcagagucacggugagcacaaagcggucccagcagaccgugaucccgaacauugggucucgccccugggucagaggaaucagcucccggauuagcaucuauuggacaauuguuaagccuggcgacauccugcucaucaauucuauugggaaccugaucgcuccccgcggauacuucaaaauuagaaacggcaaguccagcaucaugcggucugaugccccuauuggcaauuguaacagcgagugcaucacccccaauggguccaucccgaacgacaaaccuuuucaaaaugugaaccgcauuaccuauggagcuugucccagauacgugaagcagaauacacuuaaacuggccacgggcaugcggaacgucccugaaaagcagacccgcgggaucuucggagcgauugccggcuuuaucgagaaugggugggaaggaaugguggauggcugguauggcuucagacaccagaacucugaggggacaggacaagcugccgaccucaaaagcacccaggcugccauugaucagaucaauggcaagcugaaccggcuuaucgagaagacaaaugaaaaauuucaucaaauugagaaggaguucuccgaaguugaagggagaauccaggaccuggagaaauacguggaggauaccaagauugaccucuggagcuauaacgccggacugcuggucgcucucgaaaaucagcacacgaucgaucugacagacucugagaugaacaaacuuuucgaacgcacccggaagcagcugagagagaacgcggaagauaugggcaaugggugcuuuaagauuuaccauaaaugugacaacgccugcaucggcuccauucgcaauggaaccuacgaccacgauguguaucgggacgaggcucucaacaauagauuccaaaucaagggcguugagcugaaaagcggguacaaggauuggauccuuuggauuucuuuugccaucuccugcuuccugcucugugugguccugcugggauuuauuaugugggccugccagaaaggcaacauccgcuguaauauuugcaucuga

SEQ ID NO: 200738 - RNA, 1701 nt, Artificial Sequence
  derived and/or modified CDS sequence (opt5) from hemagglutinin__InfluenzaA__AFH00395
augaaggccaucauugcucugagcuacauccucugccugguguucgcccagaaacuucccggcaacgacaauuccaccgcgacacugugucucgggcaccaugcugucccuaacggaacgcugguuaagaccauuacaaaugaucaaaucgaggugaccaacgccacagaacuugugcagucuagcuccaccggcagaauuugcgacucuccgcaccggauccuggaugggaaaaauuguacacucaucgacgcccugcugggagauccccauugcgacggcuuucagaacaaggagugggaucucuucgucgaacgcagcaaggcuuauuccaauuguuacccuuaugacgugcccgauuacgccucucugagaagccuuguugcuuccagcgggacccuggaguuuacgaaggaaggauucaacuggaccggcguggcccaggacggcaagucuuaugcgugcaaacggggguccgucaauggauuuuucagccgccucaacuggcugcacaaacuugaguacaaauauccugcccugaaugugacaaugcccaacaaugauaaguuugacaaacucuacauuuggggcguucaucacccuucuaccgauuccgaccaaacaagccuguacgugcaggcuucugggagagucaccguguccacgaagcggagccagcagacagugaucccgaacauuggaucccgccccugggucagaggcaucucuagccggauuuccaucuauuggaccauuguuaagccuggggacauccugcucaucaaaagcacaggaaaucugauugcccccagaggcuacuucaagaucagaaacggcaaaucuuccauuaugcggagcgaugcuccuaucgggaacuguaauucugagugcauuacccccaacggaagcaucccgaaugacaagccuuuucaaaacgugaaucgcaucaccuauggcgccugucccagauacgugaaacagaacacacuuaagcuggcgacggggaugcggaaugucccugaaaaacagacccgcggaauuuucggcgccaucgcuggguuuauugagaacggaugggaaggcaugguggauggcugguauggguucagacaccaaaauuccgagggaacaggccaggccgcugaccucaagucuacccaggccgccaucgaucagauuaacgggaagcugaaucggcuuaucgagaaaacaaacgaaaaguuucaucaaaucgagaaagaguucagcgaaguugaaggacgcauucaggaccuggagaaguacguggaggauaccaaaaucgaccucugguccuauaaugcugaacugcuggucgcgcucgagaaccagcacacgauugaucugacagacagcgaaaugaauaaacuuuucgagcgcacccggaagcagcugagagaaaacgccgaggauaugggcaacgggugcuuuaagaucuaccauaagugugacaaugcuugcauuggcucuauccgcaacggaaccuacgaccacgauguguaucgggacgaggcccucaauaacagauuccaaauuaaaggcguugaacugaaguccggguacaaagauuggauccuuuggaucagcuuugccauuucuugcuuccugcucugugugguccugcugggauuuaucaugugggcuugccagaagggcaauauucgcuguaacaucugcauuuga

SEQ ID NO: 200739 - RNA, 1701 nt, Artificial Sequence
  derived and/or modified CDS sequence (opt5) from hemagglutinin__InfluenzaA__AFH00417
augaagaccaucauugcccugagcuacauccucugccugguguucgcucagaaacuucccggcaacgacaauuccacagccacgcugugucucgggcaccaugcggucccuaacggaacccugguuaagacaauuaccaaugaucaaaucgaggugacaaacgcuaccgaacuugugcagucuagcuccacaggcagaauuugcgacucuccgcaccggauccuggaugggaaaaauuguacccucaucgacgcccugcugggagauccccauugcgacggcuuucagaacaaggagugggaucucuucgucgaacgcagcaaagccuauuccaauuguuacccuuaugacgugcccgauuacgcuucucugagaagccuuguugccuccagcgggacgcuggaguuuaccaacgaaggauucaauuggacaggcguggcucaggacggcaagucuuaugccugcaagcggggguccgucaagagcuuuuucucucgccucaacuggcugcacaaacuugaguacaaauauccugcgcugaaugugaccaugcccaacaaugauaaguuugacaaacucuacauuuggggaguucaucacccuuccacagauagcgaccaaaccucucuguacgugcaggccuccggcagagucacggugagcacaaagcggucccagcagaccgugaucccgaacauugggucucgccccugggucagaggaaucagcucccggauuagcaucuauuggacaauuguuaagccuggcgacauccugcucaucaauucuaccgggaaccugauugcuccccgcggauacuucaaaaucagaaacggcaaguccagcauuaugcggucugaugccccuaucgacaauuguaacagcgagugcauuacccccaauggcuccaucccgaacgauaaaccuuuucaaaaugugaaccgcaucacauauggggcuugucccagauacgugaagcagaauacgcuuaaacuggccaccggaaugcggaacgucccugaaaagcagacacgcggcauuuucggggcgaucgccggauuuauugagaauggcugggaagggaugguggacggaugguauggcuucagacaccagaacucugagggcaccgggcaagcugccgaucucaaaagcacacaggcugccaucgaccagauuaauggaaagcugaaccggcuuaucgagaagaccaaugaaaaauuucaucaaaucgagaaggaguucuccgaaguugaaggccgcauucaggaucuggagaaauacguggaggacacgaagaucgaucucuggagcuauaacgccgaacugcuggucgcucucgagaaucagcacacaauugaccugaccgauucugaaaugaacaaacuuuucgagagaacccggaagcagcugagagaaaacgcggaggacauggggaauggaugcuuuaagaucuaccauaaaugugacaacgccugcauuggcuccauccgcaaugggacauacgaucacgacguguaucgggaugaggcucucaacaauagauuccaaauuaagggcguugaacugaaaagcggauacaaggacuggauccuuuggaucucuuuugccauuuccugcuuccugcucugugugguccugcugggcuuuaucaugugggccugccagaaagggaacauucgcuguaauaucugcauuuga

SEQ ID NO: 200740 - RNA, 1701 nt, Artificial Sequence; identical to SEQ ID NO: 193060
  derived and/or modified CDS sequence (opt5) from hemagglutinin__InfluenzaA__AFH00428

SEQ ID NO: 200741 - RNA, 1701 nt, Artificial Sequence
  derived and/or modified CDS sequence (opt5) from hemagglutinin__InfluenzaA__AFH00439
augaagaccaucauugcccugagcuacauccucugccugguguucgcucagaaacuucccggcaacgacaauuccacagccacgcugugucucgggcaccaugcggucccuaacggaacccugguuaagacaauuaccaaugaucaaaucgaggugacaaacgcuaccgaacuugugcagucuagcuccacaggcagaauuugcgacucuccgcaccggauccuggaugggaaaaauuguacccucaucgacgcccugcugggagauccccauugcgacggcuuucagaacaaggagugggaucucuucgucgaacgcagcaaagccuauuccaauuguuacccuuaugacgugcccgauuacgcuucucugagaagccuuguugccuccagcgggacgcuggaguuuaccaacgaaggauucaauuggacaggcguggcucaggacggcaccucuuaugccugcaagcggggguccgucaagagcuuuuucucucgccucaacuggcugcacaaacuugaguacaaguauccugcgcugaaugugacaaugcccaacaaugauaaauuugacaagcucuacauuuggggaguucaucacccuuccaccgauagcgaccaaacgucucuguacgugcaggccuccggcagagucacagugagcaccaaacggucccagcagacagugaucccgaacauugggucucgccccugggucagaggaguuagcucccggaucagcauuuauuggaccaucgugaagccuggcgacauucugcucaucaauucuaccgggaaccugaucgcuccccgcggauacuucaagauuagauccggcaaaagcucuaucaugcggagcgaugccccuauuggcaacuguaauuccgagugcaucacacccaacgggucuauuccgaaugacaagccuuuucaaaacgugaaucgcaucacguauggagcuugucccagauacgucaaacagaacacccuuaagcuggccacaggcaugcggaaugugccugaaaaacagacccgcgggaucuucggagcgauugccggcuuuaucgagaacgggugggaaggaaugguugauggcugguauggcuucagacaccagaauagcgaggggacaggacaagcugccgaccucaaguccacccaggcugccauuaaccagaucaauggcaaacugaaccggcuuauugagaagacgaaugaaaaguuucaucaaaucgagaaagaguucagcgaaguggaagggagaauccaggaucuggagaaguacgucgaggacacaaaaauugaucucuggucuuauaacgccgaacugcugguggcucucgagaaucagcacaccaucgaccugaccgauuccgaaaugagcaaacuuuucgagcgcacacggaagcagcugagagaaaacgcggaggacaugggaaacggcugcuuuaagauuuaccauaagugugauaaugccugcaucgggucuauucgcaacggcaccuacgaccacgacguuuaucgggaugaggcucucaauaacagauuccaaaucaaaggaguggaacugaaguccggcuacaaagacuggauucuuuggaucagcuuugccaucuccugcuuccugcucugugucgugcugcugggguuuauuaugugggccugccagaagggaaauauccgcuguaacauuugcaucuga

SEQ ID NO: 200742 - RNA, 1701 nt, Artificial Sequence
  derived and/or modified CDS sequence (opt5) from hemagglutinin__InfluenzaA__AFH00450
augaagaccaucauugcccugagcuacauccucugccugguguucgcucagaaacuucccggcaacgacaauuccacagccacgcugugucucgggcaccaugcggucccuaacggaacccugguuaagacaauuaccaaugaucaaaucgaggugacaaacgcuaccgaacuugugcagucuagcuccacaggcagaauuugcgacgggccgcaccggaucaucgauggaaagaauuguacccugauugacgcccuccugggcgauccccauugcgacggguuucagaacaaggagugggaucuguucgucgaacgcucuaaagccuauagcaauuguuacccuuaugacgugcccgauuacgcuucccucagaucucugguugccagcuccggaacgcuugaguuuaccaacgagagcuucaauuggacaggcguggcucagaacggcaccucuuaugccugcaagcggggguccgucaagagcuuuuucucucgccugaauuggcuccacaaacuggaauacaaguauccugcgcuuaacgugacaaugcccaauaacgacaaauuugauaagcuguacaucuggggaguucaucacccuuccaccgacagcgaucaaacgucucucuacgugcaguccagcggcagagucacaguguccaccaaacggucucagcagacagugauuccgaauaucgggagccgccccugggucagaggaguuuccagccggauuucuaucuauuggaccauugugaagccuggcgacauccugcugaucaacuccaccgggaaccucauugcuccccgcggauacuucaagaucagaagcggcaaaucuagcauuaugcgguccgacgccccuaucgauaauuguaacucugagugcauuacacccaauggcagcaucccgaacgacaagccuuuucaaaaugugaaccgcaucacguauggggccugucccagauacgucaaacagaauacccugaaacuugcuacaggaaugcggaacgugccugaaaaacagacccgcggcauuuucggggccaucgcgggauuuauugagaauggcugggaagggaugaucgauggaugguauggcuucagacaccagaacuccgagggcacagggcaagccgcugaccucaagagcacccaggccgcuauuaaucagaucaacggaaaacugaaucggcugaucgagaagacgaacgaaaaguuucaucaaauugagaaagaguucucugaaguugaaggcagaauccaggaucuugagaaguacguggaggacacaaaaauugaucugugguccuauaaugccgaacuccuggucgcccuggagaaccagcacaccaucgaccucaccgauagcgaaaugaacaagcuguucgagcgcacacggaaacagcuuagagaaaaugcugaggacauggggaacggaugcuuuaagauuuaccauaagugugauaaugcgugcaucggcucuauucgcaacgggaccuacgaccacgacguguaucgggaugaggcccugaauaacagauuccaaaucaaaggcguugaacucaaguccggauacaaagacuggauccuguggauuagcuuugcuaucuccugcuuccuucugugugugguccuccugggcuuuauuaugugggccugccagaaggggaauauccgcuguaacauuugcaucuga

SEQ ID NO: 200743 - RNA, 1701 nt, Artificial Sequence
  derived and/or modified CDS sequence (opt5) from hemagglutinin__InfluenzaA__AFH00461
augaagaccaucauugcccugagcuacauccucugccugguguucgcucagaaacuucccggcaacgacaauuccacagccacgcugugucucgggcaccaugcggucccuaacggaacccugguuaagacaauuaccaaugaucaaaucgaggugacaaacgcuaccgaacuugugcagucuagcccgacaggcagaauuugcgacucuccccaccggauccuggaugggaaaaauuguacccucaucgacgcccugcugggagauccucauugcgacggcuuucagaacaaggagugggaucucuucgucgaacgcuccaaagccuauagcaauuguuaccccuaugacgugccugauuacgcuucccugagaucucuuguugccagcuccgggacgcuggaguuuauuaacgaaaauuucaacuggaccggaguggcucaggacggcaagagcuaugccugcaagcggggcucugucaauuccuuuuucagccgccucaacuggcugcacaaacuugauuacaaguaucccgcgcugaaugugacaaugccuaacaaugggaaauuugacaagcucuacaucuggggaguucaucacccgucuaccgauuccgaccaaauuagccuguacgugagaucuuccggccgggucacagugagcaccaaacgcucccagcagacggugauccccgacauuggguauagaccuuggguccggggacugucuagccgcaucuccauuuacuggacaaucguuaagcccggcgauauccuccugauuaacagcaccgggaaccuuaucgccccuagaggauauuucaagcugcggaauggcaaaucuuccauuaugcgcagcgacgcucccaucggcaacuguucuagcgggugcauuacaccgaauggauccaucccuaacgauaagcccuuucagaaugugaacagaaucaccuacggcgccuguccucgguaugugaaacaaaauacccucaagcuggcuacagggaugcgcaacguccccgagaaacagacgagaggaauuuucggcgccaucgcgggguuuauugagaauggaugggaaggcaugguggacggcugguacggguuccggcaccagaacucugagggaaccggccaggccgcugaucuuaagagcacacaagccgcuaucgaccagauuaaugggaaacugaacagacucguugaaaagaccaaugagaaguuucaucagaucgagaaagaguucuccgaaguggaaggacgcauccaagaucuggagaaguaugucgaagacacaaaaauugaucuguggagcuacaacgccgagcuccugguggcccuugagaaucagcacaccaucgaccugacggauucugaaaugaacaagcuguucgagcggacaagaaaacagcugcgcgaaaacgcugaggacaugggcaaugggugcuuuaagauuuaccauaagugugacaacgcgugcaucggcuccauucggaauggaaccuaugaucacgacguuuacagagaugaagcccuuaacaaucgcuuccagaucaaaggcguggagcucaagagcggguauaaagacuggauucucuggaucucuuuugcuaucuccugcuuccugcugugugucgugcuccugggauuuauuaugugggccugccaaaagggcaacauccgguguaauauuugcaucuga

SEQ ID NO: 200744 - RNA, 1701 nt, Artificial Sequence
  derived and/or modified CDS sequence (opt5) from hemagglutinin__InfluenzaA__AFH00472
augaagaccaucauugcccugagcuacauccucugccugguguucgcucagaaacuucccggcaacgacaauuccacagccacgcugugucucgggcaccaugcggucccuaacggaacccugguuaagacaauuaccaaugaucaaaucgaggugacaaacgcuaccgaacuugugcagucuagcuccacaggcagaauuugcgacucuccgcaccggauccuggaugggaaaaauuguacccucaucgacgcccugcugggagauccccauugcgacggcuuucagaacaaggagugggaucucuucgucgaacgcagcaaagccuauuccaauuguuacccuuaugacgugucugauuacgcuagccugagaucccuuguugccagcucugggacgcuggaguuuaacaaugaauccuucaacuggaccggaguggcucagaauggcacaagcuaugccugcaagcggcgcucugucaaguccuuuuucagcagacucaacuggcugcacaaacuugaguacaaguaucccgcgcugaaugugaccaugccuaacaaugacaaauuugauaagcucuacauuuggggcguucaucaccccucuacagacuccgaucaaaccagccuguacgugcaggccuccgggcgggucacggugucuacaaaacgcagccagcagaccgugaucccuaacauuggauccagaccguggguccggggcguuagcucucgcaucuccauuuauuggacaaucgugaagcccggggacauucugcucaucaacagcaccggaaaucugaucgcuccuagaggcuacuucaagauucggucugggaaaagcuccaucaugcgcucugacgcccccauuggaaacuguaauagcgagugcaucaccccuaacggcuccauucccaaugauaagccguuucaaaacgugaauagaaucacauauggcgcuuguccucgguacgucaaacagaacacgcuuaagcuggccaccgggaugcgcaaugugcccgaaaaacagacaagaggaaucuucggcgcgauugccggguuuaucgagaacggaugggaaggcaugguugacgggugguauggauuccggcaccagaauagcgagggcaccggccaagcugccgaucucaagucuacacaggcugccauuaaccagaucaaugggaaacugaacagacuuauugagaagaccaaugaaaaguuucaucaaaucgagaaagaguucuccgaaguggaaggacgcauccaggaccuggagaaguacgucgaggauacgaaaauugaccucuggagcuauaacgccgaacugcugguggcucucgagaaccagcacacaaucgaucugaccgacucugaaaugaauaagcuguucgagcggaccagaaaacagcugcgcgaaaacgcggaggauaugggcaaugggugcuuuaagauuuaccauaagugugacaacgccugcaucggauccauucggaauggcacauacgaucacgacguuuauagagacgaggcucucaacaaucgcuuccaaaucaaagggguggaacuuaagagcggcuacaaagauuggauucuuuggaucuccuuugccaucucuugcuuccugcucugugucgugcugcugggauuuauuaugugggccugccagaagggcaacauccgguguaauauuugcaucuga

SEQ ID NO: 200745 - RNA, 1701 nt, Artificial Sequence
  derived and/or modified CDS sequence (opt5) from hemagglutinin__InfluenzaA__AFH00483
augaagaccaucauugcccugagcuacauccucugcaugguguucgcucagaaacugcccggcaacgacaauuccacagccacgcuuugucuggggcaccaugcggucccuaacggaacccucguuaagacaauuaccaaugaucaaaucgaggugacaaacgcuaccgaacuggugcagucuagcuccacaggcaaaauuugcgacucuccgcacagaauccuugaugggaagaauuguacccugaucgacgcccuccugggagauccccauugcgacggcuuucagaacaaagagugggaucuguucgucgaacggagcaaggccuauuccaauuguuacccuuaugacgugcccgauuacgcuucucuccgcagccugguugccuccagcgggacgcuugaguuuaacaaugaaucuuucaacuggaccggaguggcucagaauggcacauccuaugccugcaagagaggcagcgucaaaucuuucuucucccggcugaacuggcuccacaagcuggaguacaaauauccugcgcuuaaugugaccaugcccaacaaugacaaguuugauaaacuguacauuuggggaguucaucacccuagcacagacucugaucaaaccucccucuacgugcaggccagcgggcgcgucacgguguccacaaagagaucucagcagaccgugaucccgaacauuggcagccggcccuggguccgcgggguuuccagcagaaucucuauuuauuggacaaucgugaagccuggagacauucugcugaucaacuccaccggcaaucucaucgcuccccggggguacuucaaaauucgcagcggaaagucuagcaucaugagauccgacgccccuauuggcaacuguaauucugagugcaucacccccaacggcagcauuccgaaugauaaaccuuuucaaaacgugaaucggaucacauauggggcuuguccccgcuacgucaagcagaacacgcugaaacuugccaccggaaugagaaaugugccugaaaagcagacacggggcaucuucggggcgauugccggauuuaucgagaacggcugggaagggaugguugacggaugguauggcuuccgccaccaaaauuccgagggcaccgggcaggcugccgaucugaaaagcacacaggcugccauuaaccagaucaauggaaagcucaacagacugauugagaagaccaaugaaaaauuucaucaaaucgagaaggaauuuucugagguggaaggccggauccaggaccuugagaaauacgucgaggauacgaagauugaccugugguccuauaacgccgaacuccugguggcucuggagaaccagcacacaaucgaucucaccgacagcgaaaugaauaaacuguucgagagaacccgcaagcagcuucgggaaaacgcggaggauauggggaauggaugcuuuaagauuuaccauaaaugugacaacgccugcaucggcucuauuagaaaugggacauacgaucacgacguuuaucgcgacgaggcucugaacaaucgguuccaaaucaagggcguggaacucaaauccggauacaaggauuggauucuguggaucagcuuugccaucuccugcuuccuucugugugucgugcuccugggcuuuauuaugugggccugccagaaagggaacaucagauguaauauuugcaucuga

SEQ ID NO: 200746 - RNA, 1701 nt, Artificial Sequence
  derived and/or modified CDS sequence (opt5) from hemagglutinin__InfluenzaA__AFH00494
augaagaccaucauugcccugagcuacauccucugccugguguucgcucagaaacuucccggcaacgacaauuccacagccacgcugugucucgggcaccaugcggucccuaacggaacccugguuaagacaauuaccaaugaucaaaucgaggugacaaacgcuaccgaacuugugcagucuagcccgacaggcagaauuugcgacucuccccaccggauccuggaugggaaaaauuguacccucaucgacgcccugcugggagauccucauugcgacggcuuucagaacaaggagugggaucucuucgucgaacgcuccaaagccuauagcaauuguuaccccuaugacgugccugauuacgcuucccugagaucucuuguugccagcuccgggacgcuggaguuuauuaacgaaaauuucaacuggaccggaguggcucaggacggcaagagcuaugccugcaagcggggcucugucaauuccuuuuucagccgccucaacuggcugcacaaacuugaguacaaguaucccgcgcugaaugugacaaugccuaacaaugggaaauuugauaagcucuacaucuggggaguucaucacccgucuaccgacuccgaucaaacaagccuguacgugagagccucuggccgggucaccguguccacgaaacgcagccagcagacagugauucccgacaucggguauagaccuuggguccggggacaguccucucgcauuggcaucuacuggaccauuguuaagcccggggacauccugcucaucaacagcacaggaaaccugauugcuccuagaggcuauuucaagauccggaauggcaaauccagcauuaugcgcucugaugcccccaucgggaacuguuccagcgagugcauuaccccgaauggaucuaucccuaacgacaagcccuuucaaaaugugaacagaaucaccuacggcgcuuguccucgguaugugaaacagaauacacuuaagcuggccacggggaugcgcaacguccccgaaaaacagaccagaggaauuuucggcgcgaucgccggguuuauugagaauggaugggaaggcaugguggauggcugguacggguuccggcaccagaacagcgagggaacaggccaagcugccgaccucaaguccacccaggcugccaucgaucagauuaaugggaaacugaacagacuuguugagaagacaaaugaaaaguuucaucaaaucgagaaagaguucucugaaguggaaggacgcauccaggaccuggagaaguaugucgaggauaccaaaauugaccucuggagcuacaacgccgaacugcugguggcucucgagaaucagcacacgaucgaucugacagacuccgaaaugaacaaacuuuucgagcggaccagaaagcagcugcgcgaaaacgcggaggauaugggcaaugggugcuuuaagauuuaccauaagugugacaacgccugcaucggcagcauucggaauggaaccuauaaccacgacguuuacagagaugaggcucucaauaaccgcuuccaaaucaaaggcguggaacugaagucuggguauaaagacuggauucuuuggaucuccuuugccaucagcugcuuccugcucugugucgugcugcugggauuuauuaugugggccugccagaagggcaauauccgguguaacauuugcaucuga

SEQ ID NO: 200747 - RNA, 1701 nt, Artificial Sequence
  derived and/or modified CDS sequence (opt5) from hemagglutinin__InfluenzaA__AFH00505
augaagaccaucauugcccugagcuacauccucugccugguguucgcucagaaacuucccggcaacgacaauuccacagccacgcugugucucgggcaccaugcggucccuaacggaacccugguuaagacaauuaccaaugaucaaaucgaggugacaaacgcuaccgaacuugugcagucuagcuccacaggcagaauuugcgacucuccgcaccggauccuggaugggaaaaauuguacccucaucgacgcccugcugggagauccccauugcgacggcuuucagaacaaggagugggaucucuucgucgaacgcagcaaagccuauuccaauuguuacccuuaugacgugcccgauuacgcuucucugagaagccuuguugccuccagcgggacgcuggaguuuaccaacgaaggauucaauuggacaggcguggcucaggacggcaccucuuaugccugcaagcggggguccgucaagagcuuuuucucucgccucaacuggcugcacaaacuugaguacaaguauccugcgcugaaugugacaaugcccaacaaugauaaauuugacaagcucuacauuuggggaguucaucacccuuccaccgauagcgaccaaaucucucuguacgugcaggccuccggcagagucacggugagcacaaaacggucccagcagaccgugauuccgaacaucgggucucgccccugggucagaggaguuagcuccauuaucagcauuuauuggacaaucgugaagccuggcgacauccugcucauuaauucuaccgggaaccugaucgcuccccggggauacuucaagauucgcuccggcaaaagcucuaucaugagaagcgaugccccuauugacaacuguaauuccgagugcaucacccccaacggcucuaucccgaaugauaagccuuuucaaaacgugaaucggauuacauauggggcuuguccccgcuacgucaaacagaacacgcuuaagcuggccaccggaaugagaaaugugccugaaaaacagacacggggcaucuucggggcgauugccggauuuaucgagaacggcugggaagggaugguugacggaugguauggcuuccgccaccagaauagcgagggcaccgggcaagcugccgaucucaaguccacacaggcugccauuaaccagaucaauggaaaacugaacagacuuaucgagaagaccaaugaaaaguuucaucaaauugagaaagaguucagcgaaguggaaggccggauccaggaccuggagaaguacgucgaggauacgaaaauugaccucuggucuuauaacgccgaacugcugguggcucucgagaaucagcacacaaucgaucugaccgacuccgaaaugaacaaacuuuucgagagaacccgcaagcagcugcgggaaaacgcggaggauauggggaauggaugcuuuaagauuuaccauaagugugacaacgccugcaucggcagcauuagaaaugggacauacgaccacgauguuuaucgcgacgaggcucucaacaaucgguuccaaaucaaaggcguggaacugaagucuggauacaaagauuggauccuuuggauuuccuuugccaucagcugcuuccugcucugugucgugcugcugggcuuuauuaugugggccugccagaaggggaacaucagauguaauauuugcaucuga

SEQ ID NO: 200748 - RNA, 1701 nt, Artificial Sequence
  derived and/or modified CDS sequence (opt5) from hemagglutinin__InfluenzaA__AFH00516
augaagaccaucauugcccugagcuacauccucugccagguguucgcucaaaaacugcccggcaacgacaauuccacagccacgcuuugucuggggcaccaugcggucccuaacggaacccucguuaagacaauuaccaaugaucagaucgaggugacaaacgcuaccgaacuggugcagucuagcuccacaggcagaauuugcgacucuccgcaccggauccuugaugggaaaaauuguacccugaucgacgcccuccugggagauccccauugcgacggcuuucagaacaaggagugggaucuguucgucgaacgcagcaaagccuauuccaauuguuacccuuaugacgugcccgauuacgcuucucucagaagccugguugccuccagcgggacgcuugaguuuaccaacgaaggauucaauuggacaggcguggcucaagacggcaagucuuaugccugcaagcggggguccgucaacagcuuuuucucucgccugaauuggcuccacaaacuggaguacaaguauccugcgcuuaacgugaccaugcccaauaacgauaaauuugacaagcuguacauuuggggaguucaucacccuuccacagauagcgaccagaccucucucuacgugcaggccuccggcagagucacggugagcacaaaacggucccagcaaaccgugaucccgaauauugggucucgccccugggucagaggaaucagcucccggauuagcaucuauuggacaauuguuaagccuggcgacauccugcugaucaagucuaccgggaaccucauugcuccccgcggauacuucaaaaucagaaacggcaaguccagcauuaugcggucugaugccccuaucgacaauuguaacagcgagugcauuacccccaauggcuccaucccgaacgauaaaccuuuucagaaugugaaccgcaucacauauggggcuugucccagauacgugaagcagaauacgcugaaacuugccaccggaaugcggaacgucccugaaaagcagacacgcggcauuuucggggcgaucgccggauuuauugagaauggcugggaagggaugguggacggaugguauggcuucagacaccaaaacucugagggcaccgggcaggcugccgaucugaaaagcacacaggcugccaucgaccaaauuaauggaaagcucaaccggcugaucgagaagaccaaugaaaaauuucaucagaucgagaaggaguucuccgaaguugaaggccgcauucaggaucuugagaaauacguggaggacacgaagaucgaucuguggagcuauaacgccgaacuccuggucgcucuggagaaucagcacacaauugaccucaccgauucugaaaugaacaaacuguucgagagaacccggaagcaacuuagagaaaacgcggaggacauggggaauggaugcuuuaagaucuaccauaaaugugacaacgccugcauuggcuccauccgcaaugggacauacgaucacgacguguaucgggaugaggcucugaacaauagauuccagauuaagggcguugaacucaaaagcggauacaaggacuggauccuguggaucucuuuugccauuuccugcuuccuucugugugugguccuccugggcuuuaucaugugggccugccagaaagggaacauucgcuguaauaucugcauuuga

SEQ ID NO: 200749 - RNA, 1701 nt, Artificial Sequence
  derived and/or modified CDS sequence (opt5) from hemagglutinin__InfluenzaA__AFH00527
augaagaccaucauugcccugagcuacauccucugccugguguucgcucagaaaauucccggcaacgacaauuccacagccacgcuuugucuggggcaccaugcggucccuaacggaacccucguuaagacaaucaccaaugaucaaauugaggugacaaacgcuaccgaacuggugcagucuagcuccacaggcagaaucugcgacucuccgcaccggauccuugauggggagaauuguacccugauugacgcccuccugggagauccccauugcgacggcuuucagaacaaagaaugggaucuguucgucgagcgcagcaaggccuauuccaauuguuacccuuaugacgugcccgauuacgcuucucucagaagccugguugccuccagcgggacgcuugaauuuaacaaugagucuuucaacuggaccggaguggcucagaauggcacauccuaugccugcaaacggcgcagcaucaagucuuucuucuccagacugaacuggcuccaccaacugaaguacaaauauccugcgcuuaaugucaccaugcccaacaaugacaaguuugauaaacuguacauuuggggcgugcaucacccuagcacagacucugaucagaccucccucuacgcccaggcuagcgggcggguuacgguguccacaaagcgcucucagcaaaccgucaucccgaacauuggaagcagacccugggugcggggcguguccagccgcaucucuauucacuggacaaucgucaaaccuggggacauccugcugauuaacuccaccggaaaucucaucgcccccagaggcuauuucaagauucggagcgggaagucuagcaucaugcgcuccgacgcuccuauuggaaaauguaacucugagugcaucacccccaauggcagcaucccgaacgauaagccuuuucagaauguuaacagaauuacauacggcgccuguccccgguaugugaaacagaauacgcugaagcuggcgaccgggaugcgcaacgugccugaaaaacagacaagaggaaucuucggcgccauugcuggguuuaucgagaauggaugggaaggcauggucgacgggugguacggauuccggcaucaaaacuccgagggcaccggccaggccgcugaucuuaagagcacacaggccgccauuaaucaaaucaacgggaaacucaauagacugaucgagaagaccaacgaaaaguuucaccagauugagaaagaauuuucugagguggaaggacgcauccaggaccuugagaaguauguugaggauacgaaaauugaccugugguccuacaaugcugaacuccugguggcgcuggagaaccagcauacaaucgaucucaccgacagcgaaaugaacaagcuguucgagcggaccagaaaacaacuucgcgaaaaugccgaggauaugggcaacgggugcuuuaagauuuaucacaagugugacaaugcuugcaucggaucuauucggaacggcacauacgaucacgacgucuacagagacgaggcccugaauaaccgcuuccagaucaaagggguggaacucaaguccggcuauaaagauuggauccuguggauuagcuuugccaucuccugcuuccuucuguguguugugcuccugggauuuauuaugugggcuugccagaagggcaauauccgguguaacauuugcaucuga

SEQ ID NO: 200750 - RNA, 1701 nt, Artificial Sequence
  derived and/or modified CDS sequence (opt5) from hemagglutinin__InfluenzaA__AFH00538
augaagaccaucauugcccugagcuacauccucugccugguguucgcucagaaaauucccggcaacgacaauuccacagccacgcuuugucuggggcaccaugcggucccuaacggaacccucguuaagacaaucaccaaugaucaaauugaggugacaaacgcuaccgaacuggugcagagaucuagcacaggccggaucugcgacuccccgcaccgcauccuugauggggagaauuguacccugauugacgcccuccugggagauccccauugcgacggcuuucagaacaaagaaugggaucuguucgucgagagaucuaaggccuauagcaauuguuacccuuaugacgugcccgauuacgcuucccuccggucucugguugccagcuccgggacgcuugaauuuaacaaugagagcuucaacuggaccggaguggcucagaauggcacaucuuaugccugcaaacgcagauccaucaagagcuuuuucucucggcugaacuggcuccaccaacugaaguacaaauauccugcgcuuaaugucaccaugcccaacaaugacaaguuugauaaacuguacauuuggggcgugcaucacccuuccacagacagcgaucagaccucucucuacgcccaggcuuccgggcgcguuacggugagcacaaagagaucccagcaaaccgucaucccgaacauuggaucucggcccugggugcgcggcgugagcuccagaaucagcauuuauuggacaaucgucaaaccuggggacauccugcugauuaacucuaccggaaaucucaucgcuccccggggcuacuucaagauucgcuccggaaagagcucuaucaugagaagcgacgccccuauugggaaauguaacuccgagugcaucacccccaauggcucuaucccgaacgauaagccuuuucagaauguuaaccggauuacauauggcgccuguccccgcuacgugaaacagaauacgcugaaacuugcgaccgggaugagaaacgugccugaaaagcagacacggggaaucuucggcgccauugcuggguuuaucgagaauggaugggaaggcauggucgacgggugguauggauucagacaccaaaacagcgagggcaccggccaggccgcugaucugaaguccacacaggccgccauuaaucaaaucaacgggaaacucaaucgccugaucgagaagaccaacgaaaaguuucaucagauugagaaagaguucagcgaaguggaaggacggauccaggaccuugagaaguacguugaggauacgaaaauugaccuguggucuuauaaugcugaacuccugguggcgcuggagaaccagcacacaaucgaucucaccgacuccgaaaugaacaagcuguucgagagaacccgcaaacaacuucgggaaaaugccgaggauaugggcaacgggugcuuuaagauuuaccauaagugugacaaugcuugcaucggaagcauuagaaacggcacauacgaucacgacgucuaucgcgacgaggcccugaauaaccgguuccagaucaaagggguggaacucaagucuggcuacaaagauuggauccuguggauuuccuuugccaucagcugcuuccuucuguguguugugcuccugggauuuauuaugugggcuugccagaagggcaauaucagauguaacauuugcaucuga

SEQ ID NO: 200751 - RNA, 1701 nt, Artificial Sequence
  derived and/or modified CDS sequence (opt5) from hemagglutinin__InfluenzaA__AFH00549
augaagaccaucauugcccugagcuacauccucugccugguguucgcucagaaacuucccggcaacgacaauuccacagccacgcugugucucgggcaccaugcggucccuaacggaacccugguuaagacaauuaccaaugaucaaaucgaggugacaaacgcuaccgaacuugugcagucuagcuccacaggcagaauuugcgacucuccgcaccggauccuggauggggagaauuguacccucaucgacgcccugcugggagauccccauugcgacggcuuucagaacaaagaaugggaucucuucgucgagcgcagcaaggccuauuccaauuguuacccuuaugacgugcccgauuacgcuucucugagaagccuuguugccuccagcgggacgcuggaauuuaacaaugagucuuucaacuggaccggaguggcucagaauggcacauccagcgccugcaaacggcgcucuauuaaguccuuuuucagcagacucaacuggcugcaccaacuuaaguauaaauacccugcgcugaaugucaccaugcccaacaaugacaaguuugauaaacucuauaucuggggcgugcaucacccuucuacagacuccgaucagaccagccuguacgcccaggcuccggggcggguuacgguguccacacgcagaucucagcaaaccgucauucccaacaucggaagccggccuugggugcgcggcguguccagcauuaucucuauuuacuggacaaucgucaagcccggggacauccugcucauuaacuccaccggaaaucugaucgccccuagaggcuauuucaaaauucggagcgggaagucuagcaucaugcgcuccgacgcucccauuucuaaguguaacagcgagugcaucaccccgaauggauccaucccuaacgauaaacccuuucagaauguuaacagaauuacauacggcgccuguccucgguaugugaagcagaauacgcuuaaacuggcgaccggcaugcgcaacgugcccgaaaagcagacaagagggaucuucggagccauugcuggcuuuaucgagaaugggugggaaggaauggucgacggcugguacggguuccggcaccaaaacagcgagggaaccggccaggccgcugaucucaaaucuacacaggccgccauuaaucaaaucaacggcaagcugaauagacuuaucgagaaaaccaacgaaaaguuucaucagauugagaaggaguucuccgaaguggaagggcgcauccaggaccuggagaaauauguugaggauacgaagauugaccucuggagcuacaaugcugaacugcugguggcgcucgagaaccagcacacaaucgaucugaccgacucugaaaugaacaaacuuuucgagcggaccagaaagcaacugcgcgaaaaugccgaggauaugggaaacggcugcuuuaaaauuuaucauaagugugacaaugcuugcaucggguccauucggaacggaacauacgaucacgacgucuacagagacgaggcccucaauaaccgcuuccagaucaagggcguggaacugaaaagcggguauaaggauuggauccuuuggauuuccuuugccaucucuugcuuccugcucuguguugugcugcugggcuuuauuaugugggcuugccagaaaggaaauauccgguguaacauuugcaucuga

SEQ ID NO: 200752 - RNA, 1701 nt, Artificial Sequence
  derived and/or modified CDS sequence (opt5) from hemagglutinin__InfluenzaA__AFH00560
augaagaccaucauugcccugagcuacauccucugccugguguucgcucagaaacuucccgucaacgacaauuccacagccacgcugugucucggccaccaugcgguuccuaacgggacccuggugaagacaauuaccaaugaucacaucgaggugacaaacgcuaccgaacuuguccaaucuagcuccacaggaagaauuugcgacaucccgcaucagauccuggauggcgagaauuguacccucauugacgcccugcugggggauccccacugcgacggauuucagaacaaagaaugggaucucuucguggagcggucuacggccuauagcaauuguuacccuuaugacguucccgauuacgcuucccugcgcucucuuguggccagcuccggcacccuggaauuuaacaaugagagcuucaacuggacaggggucgcucagaauggaaccucuuccgccugcaagagacggagcaucaaauccuuuuucucucgccucaacuggcugcaucaacuuaaguauaaguacccugcgcugaaugugacaaugcccaacaaugagaaauuugacaagcucuauauuuggggcguucaccacccuagcaccgauucugaccagaucucccuguacgcccaggcuccgggcagagugacggucagcacaaaacggucccagcaaaccgugauucccaacaucgggucucgcccuugggugagaggagucagcucccggauuagcaucuacuggacaaucguuaagcccggcgauauucugcucaucaacucuaccgggaaucugauugccccucgcggauauuucaaaaucagauccggcaagagcucuauuaugcggagcgacgcucccaucgggaaguguaacuccgaaugcaucaccccgaauggaucuauuccuaacgacaaacccuuucagaaugugaaccgcaucacauacggcgccuguccuagauaugugaagcagaauacgcuuaaacuggcgaccggcaugcggaacguccccgagaagcagacacgcgggauuuucggagccaucgcuggcuuuauugaaaaugggugggagggaaugguggauggcugguacggguucagacaucaaaacagcgagggaaccggccaggccgcugaccucaaauccacacaggccgccaucaaucaaaucaacggcaagcugaaucggcuuauugagaaaaccaacgaaaaguuucaccagaucgaaaaggaguucagcgaagcugaggggcgcauucaggaucuggagaaauauguugaagacacgaagaucgaucucuggucuuacaaugcggagcugcugguggcccucgaaaaccagcauacaauugaccugaccgauuccgagaugaacaaacuuuucgaaagaacccggaagcaacugagagagaaugcugaggacaugggaaacggcugcuuuaaaaucuaucacaagugugauaaugccugcauugggagcauccgcaacggaacauacgaccacgaugucuaccgggacgaagcccucaauaacagauuccagaucaagggcguggagcugaaaucuggguauaaggacuggauucuuuggaucuccuuugcuauuagcugcuuccugcucuguaucguucugcugggcuuuauuaugugggccugccagaaaggaaauauccgcuguaacaucugcauuuga

SEQ ID NO: 200753 - RNA, 1701 nt, Artificial Sequence
  derived and/or modified CDS sequence (opt5) from hemagglutinin__InfluenzaA__AFH00571
augaagaccaucauugcccugagcuacauccucugccugguguucgcucagaaacuucccgucaacgacaauuccacagccacgcugugucucggccaccaugcgguuccuaacgggacccuggugaagacaauuaccaaugauaacaucgaggugacaaaugcuaccgaacuuguccaaucuagcuccacaggaagaauuugcgacucuccgcaccagauccuggauggcgagaacuguacccucaucgacgcccugcugggggauccccauugcgacggauuucagaauaaagaaugggaucucuucguggagcggagcacggccuauuccaacuguuacccuuaugacguucccgauuacgcuucucugcgcagccuuguggccuccagcggcacccuggaauuuaauaacgagucuuucaauuggacaggggucgaccagaacggaaccuccagcgcuugcaagagacggucuaauaaauccuuuuucagccgccucaacuggcugcaccaacuuaaguauaaguacccugcccugaaugugacaaugcccaacaacgagaaauuugauaagcucuauauuuggggcguucaucacccuucuaccgacuccgaucagaucagccuguacgcgcaggccuccggcagagugacggucucuacaaaacggagccagcaaaccgugauuccgaauaucgggucccgccccugggugagaggagucagcucucggauuuccaucuacuggacaauuguuaagccuggcgacauccugcucaucaacagcaccgggaaucugauugcuccccgcggauauuucaaaaucagaucuggcaagagcuccauuaugcggucuaacgccccuaucgggaaguguaauagcgaaugcauuacccccaacggauccaucccgaaugacaaaccuuuucagaacgugaaucgcaucacauacggcgcuugucccagauaugugaagcagaacacgcuuaaacuggccaccggcaugcggaaugucccugagaagcagacacgcgggauuuucggagcgaucgccggcuuuauugaaaacgggugggagggaaugguggauggcugguacggguucagacaccaaaauagcgagggaaccggccaggcugccgaccucaaaucuacacaggcugccaucaaccaaauuaauggcaagcugaaccggcuuaucgagaaaaccaacgaaaaguuucaucagaucgaaaaggaguucuccgaaguugaggggcgcauucaggaucuggagaaauauguggaagacacgaagaucgaucucuggagcuacaaugccgagcugcuggucgcucucgaaaaccagcacacaauugaccugaccgauucugagaugaauaaacuuuucgaaagaacccggaagcaacugagagagaacgcggaggacaugggaaauggcugcuuuaaaaucuaucauaagugugauaacgccugcauuggguccauccgcaauggaacauacgaccacgauguguaccgggacgaagcucucaacaauagauuccagauuaagggcguugagcugaaaagcggguauaaggacuggauccuuuggaucuccuuugccauuucuugcuuccugcucugugugguccugcugggcuuuaucaugugggccugccagaaaggaaacauucgcuguaauaucugcauuuga

SEQ ID NO: 200754 - RNA, 1701 nt, Artificial Sequence
  derived and/or modified CDS sequence (opt5) from hemagglutinin__InfluenzaA__AFH00582
augaagaccaucauugcccugagcuacauccucugccugguguucgcucagaaacuucccggcaacgacaauuccacagccacgcugugucucgggcaccaugcggucccuaacggaacccugguuaagacaauuaccaaugaucaaaucgaggugacaaacgcuaccgaacuugugcagucuagcuccacaggcgggauuugcgacucuccgcaccagauccuggauggagagaauuguacccucaucgacgcccugcugggcgauccccauugcgacggguuucagaacaaagaaugggaucucuucgucgagagaagcaaggccuauuccaauuguuacccuuaugacgugcccgauuacgcuucucugcggagccuuguugccuccagcggaacgcuggaauuuaacaaugagucuuucaacuggaccggcguggcucaaaauggcacauccagcgccugcaaacgcagaucuaacaaguccuuuuucagccggcucaauuggcugcaccagcuuaaguauaaauacccugcgcugaacgucaccaugcccaauaacgagaaguuugacaaacucuauauuuggggagugcaucacccuucuacagauuccgaccagaucagccuguacgcccaggcuccggggcgcguuaccguguccacgaagagaucucaacagacagucauucccaacaucggcagccggccuugggugcgcgggguguccagcagaauuucuaucuacuggaccauugucaaacccggagauauccugcucaucaauuguacaggcaaccugauugccccucggggguauuucaagauccgcuccggaaagagcucuauuaugagaagcgacgcuuccaucggcaaaugcaauucugaauguauuacccccaacggcagcaucccgaaugacaagccuuuucagaacguuaaucggaucaccuacggggccugcccccgcuaugugaaacagaacacacuuaagcuggcgacgggaaugagaaaugugccugagaaacaaacccggggcauuuucggggccaucgcuggauuuauugaaaacggcugggaggggauggucgauggaugguacggcuuccgccaccaaaauuccgagggcacagggcaggccgcugaccucaagagcacccaggccgccaucaaccagauuaauggaaaacugaacagacuuaucgaaaagacaaaugagaaguuucaucagaucgaaaaagaguucucugaaguggagggccggauucaggaucuggagaaguauguugaagacaccaaaaucgaucucugguccuacaacgcugagcugcugguggcgcucgaaaaccaacacacgauugaccugacagauagcgagaugaauaaacuuuucgaaagaaccaagaagcagcugcgcgagaacgccgaggacauggggaauggauguuuuaagaucuaucauaaaugcgauaacgcuugcauuggcucuauccggaaugggaccuacgaccacgaugucuacagagacgaagcccucaacaaucgcuuccagauuaagggcguggagcugaaauccggauauaaggacuggauccuuuggaucagcuuugccacauccuguuuccugcucugcguugugcugcugggcuuuauuaugugggcuugucagaaagggaacauccggugcaauauuuguaucuga

SEQ ID NO: 200755 - RNA, 1701 nt, Artificial Sequence; identical to SEQ ID NO: 193377
  derived and/or modified CDS sequence (opt5) from hemagglutinin__InfluenzaA__AFH00593

SEQ ID NO: 200756 - RNA, 1701 nt, Artificial Sequence; identical to SEQ ID NO: 193377
  derived and/or modified CDS sequence (opt5) from hemagglutinin__InfluenzaA__AFH00604

SEQ ID NO: 200757 - RNA, 1701 nt, Artificial Sequence
  derived and/or modified CDS sequence (opt5) from hemagglutinin__InfluenzaA__AFH00615
augaagaccaucauugcccugagcuacauccucugccugguguucgcucagaaacuucccggcaacgacaauuccacagccacgcugugucucgggcaccaugcggucccuaacggaaccauuguuaagacaaucaccaaugaucaaauugaggugacaaacgcuaccgaacuggugcagucuagcuccacaggcgggaucugcaauucuccgcaccagauccuugacggagagaacuguacccugauugaugcccuccugggcgacccccagugcgauggguuucaaaauaaaaagugggaccuguucgucgaaagaagcaaagccuauuccaacuguuacccuuaugaugugcccgacuacgcuucucuccggagccugguugccuccagcggaacgcuugaguuuaauaacgaaucuuucaauuggaccggcgugacacagaacggcaccuccagcgcuugcaagcgcagaucuaauaaguccuuuuucagccggcugaacuggcucacacaucugaaauauaaguacccugcccuuaaugucaccaugcccaacaacgagaaauuugauaagcuguauaucuggggagugcaccauccugggacggacucugaucagauuucccucuacgcgcaggccagcggccgcaucacaguuuccaccaaaagaucucaacagacagugauuccgaauaucgggagccggccccgcgucagagacauuuccagccggaucucuaucuacuggaccauugugaagccuggagauauccugcugauuaacuccaccggcaaucucaucgcuccccgcggguauuucaagauuagaagcggaaaaucuagcaucaugcgguccgacgccccuaucggcaaguguaacucugagugcauuacacccaauggcagcaucccgaacgacaaaccuuuucagaaugugaaccgcauuacguacggggcuugucccagauaugucaagcagaauacccugaaacuugccacaggaaugcggaacguuccugaaaagcaaacccgcggcaucuucggggcgauugccggauuuaucgagaauggcugggaagggaugguggauggaugguacggcuucagacaccagaacuccgagggcacagggcaggcugccgaccugaaaagcacccaagcugccaucaaucagauuaacggaaagcucaaucggcugaucggcaagacgaacgagaaauuucaccagauugaaaaggaguucucugaaguggaggggagaauccaggauauugaaaaauaugucgaggacacaaagaucgaucuuugguccuacaacgccgagcugcucguggcucuggaaaaucaacauaccauugaccugaccgauagcgagaugaacaaacucuucgaacgcacaaagaagcagcugcgggagaaugcggaagacaugggaaacggcugcuuuaaaaucuaucacaagugugauaaugccugcaucgagucuauuagaaacgggaccuacgaccaugauguuuaccgcgacgaggcucuuaauaaccgguuccagaucaaaggcguggaacugaaguccggauauaaagacuggauucucuggaucagcuuugccauuuccugcuuccugcuuugugucgcccugcucggcuuuaucaugugggcuugccagaaggggaauaucagauguaacauuugcaucuga

SEQ ID NO: 200758 - RNA, 1701 nt, Artificial Sequence; identical to SEQ ID NO: 200349
  derived and/or modified CDS sequence (opt5) from hemagglutinin__InfluenzaA__AFH00626

SEQ ID NO: 200759 - RNA, 1701 nt, Artificial Sequence
  derived and/or modified CDS sequence (opt5) from hemagglutinin__InfluenzaA__AFH00637
augaagaccaucauugcccugagcuacauccucugccugguguucgcucagaaacuucccggcaacgacaauuccacagccacgcugugucucgggcaccaugcggucccuaacggaaccauuguuaagacaaucaccaaugaucaaauugaggugacaaacgcuaccgaacuggugcagucuagcuccacaggcgggaucugcgacucuccgcaccagauccuugauggagagaauuguacccugauugacgcccuccugggcgauccccagugcgacggguuucaaaacaaaaagugggaucuguucgucgaaagaagcaaagccuauuccaauuguuacccuuaugacgugcccgauuacgcuucucuccggagccugguugccuccagcggaacgcuugaguuuaacaaugaaucuuucaacuggaccggcgugacacagaauggcaccuccagcucuugcaagcgcagauccaacaauagcuuuuucucucggcugaacuggcucacacaucugaaguuuaaauauccugcucuuaaugucaccaugcccaacaacgagaaguucgacaaacuguacaucuggggagugcaccauccugggacgaauaacgaucagauuucccucuauacacaggccagcggccgcaucaccguuuccacaaagagaucucaacagaccgugauuccgaauaucgggagccggccccgcgucagagacauuccuucccggaucagcaucuacuggaccauugugaaacccggagauauccugcugauuaacucuacaggcaaucucaucgcgccucgcggguacuuuaagauuagauccggaaagagcucuaucaugcggagcgacgcccccaucggcaaauguaacuccgagugcauuacgccgaauggcucuaucccuaacgacaagcccuuccagaaugugaaccgcauuaccuauggggcuuguccuagauacgucaaacagaauacacugaaacuugccaccggaaugcggaacguucccgaaaaacaaacacgcggcaucuuuggggcuauugccggauucaucgagaauggcugggaagggaugguggauggaugguauggcuuuagacaccagaacagcgagggcaucgggcaggcggccgaccugaaguccacccaagcugccauuaaucagaucaacggaaaacucaaccggcugauuggcaagacgaaugagaaguuccaccagaucgaaaaagaguucagcgaaguggaggggcgcauucaggaucuugaaaaguacgucgaggacacaaaaaucgaucuguggucuuauaacgcugagcuccugguggcccuggaaaaucaacauaccauugaccucaccgauuccgagaugaacaagcuguuugaaagaacaaagaagcagcuucgggagaaugccgaagacaugggaaacggcugcuucaagaucuaccacaaaugugauaaugcuugcaucgggagcauuagaaacggcaccuaugaccaugauguuuaccgcgacgaggcgcugaauaaccgguuucagaucaagggaguggagcucaaaucuggcuacaaggacuggauucuguggaucuccuucgccauuagcugcuuucuucugugugucgcucuccugggguucaucaugugggccugccagaaaggaaauaucagauguaacauuugcaucuga

SEQ ID NO: 200760 - RNA, 1701 nt, Artificial Sequence
  derived and/or modified CDS sequence (opt5) from hemagglutinin__InfluenzaA__AFH00648
augaagaccaucauugcccugagcuacauccucugccugguguucgcucagaaacuucccggcaacgacgauuccacagccacgcugugucucgggcaccaugcggucccuaauggaaccauuguuaagacaaucaccaacgaccaaauugaggugacaaaugcuaccgaacuggugcagucuagcuccacaggcgggaucugcgauucuccgcaccagauccuugacggagagaacuguacccugauugaugcccuccugggcgacccccagugcgauggguuucaaaauaaaaagugggaccuguucgucgaaagaagcaaagccuauuccaacuguuacccuuaugaugugcccgacuacgcuucucuccggagccugguugccuccagcggaacgcuugaguuuaaugaugaaucuuucaacuggaccggcgugacacagaauggcaccuccagcucuugcaagcgcagauccaacaauagcuuuuucucucggcugaacuggcucacacaucugaaguuuaaauauccugcucuuaaugucaccaugcccaacaaugagaaguucgacaaacuguacaucuggggagugcaccauccuguuacggauaacgaccagauuuuucucuaugcccaggcguccgggcgcaucacagugagcaccaagagaucccaacagacagucauuccgaacaucggcucucggccccgcauuagaaauaucccuagccggaucuccauuuacuggaccaucgugaaacccggggacauucugcugaucaacagcaccggaaaucucauugccccucgcggcuacuucaagaucagaucugggaaguccagcaucaugcggucugaugcucccauuggaaaauguaacagcgagugcaucacaccgaauggcuccauuccuaacgacaagcccuuucagaaugugaaccgcaucacguauggcgccuguccuagauacgucaaacagaauacccugaagcuggcuacagggaugcggaacguucccgaaaaacaaacccgcggaauuuucggcgccaucgcgggguuuaucgagaauggaugggaaggcaugguggaugggugguauggauucagacaccagaacucugagggcauuggccaggccgcugaccuuaagagcacacaagccgcuaucaaucagauuaacgggaaacucaaucggcugaucggaaagaccaacgagaaguuccaccagauugaaaaagaguuuuccgaaguggagggcagaauccaggaucuugaaaaguacgucgaggacacgaaaauugaucuguggagcuauaacgccgagcuccugguggcccuggaaaaucaacauacaaucgaccucaccgauucugagaugaacaagcuguucgaacgcaccaaaaagcagcuucgggagaaugcugaagacauggggaacggaugcuuuaagaucuaccacaaaugugauaaugcgugcauuggcuccaucagaaacgggacauaugaccaugacguuuaccgcgaugaggcccugaauaaccgguuccagauuaagggcguggagcucaaaagcggauacaaggacuggauccuguggauuucuuuugcuaucuccugcuuccuucugugugucgcccuccugggcuuuaucaugugggccugccagaaagggaauauuagauguaacaucugcauuuga

SEQ ID NO: 200761 - RNA, 1701 nt, Artificial Sequence
  derived and/or modified CDS sequence (opt5) from hemagglutinin__InfluenzaA__AFH00659
augaagaccaucauugcccugagcuacauccucugccugguguucacacagaaacuucccggcaacgacaauuccacggcuacccugugucucgggcaccaugccgucccuaacggaacaaugguuaagaccauuacaaaugaucaaaucgaggugaccaacgcgacagaacuggugcagucuagcuccaccggcgagauuugcgacucuccgcaccagauccuugauggggaaaauuguacgcugaucgacgcucuccugggagauccccagugcgacggcuuucaaaacaaaaagugggaucuguucgucgagagaagcaaagcccauuccaauuguuauccuuacgacgugcccgauuaugccucucuccggagccugauugcuuccagcgggacccuugaauuuaacaaugagucuuucaacuggacaggaguuacccagaauggcacauccagcgccugcaagcgcagaucugacaacuccuuuuucagccggcugaauuggcucacccaccugaaguuuaaauacccugcucuuaacgugacgaugcccaauaacgaggaguucgauaagcuguauaucuggggcguccaucacccugggacagacaacgaucagauuucucucuacgcccaggcguccggacgcaucaccgugagcacaaaaagaucccaacagaccguuauuccgaauaucggcucucggccccgcgugagagacauuccuagccggaucuccaucuauuggaccauugucaagcccggggacauccugcugauuaacagcacaggaaaucucaucgccccucgcggcuacuuuaaaauuagaucugggaaguccagcaucaugcggucugaugcucccaucggaaaguguaacagcggcugcauuacgccgaauggcuccaucccuaacgacaaacccuuccagaaugugaaccgcauuaccuacggggccuguccuagauaugugaagcagaauacacugaaacuugcuaccggaaugcggaacguccccgaaaagcaaacacgcggcaucuuuggggccauugcgggauucaucgaaaauggcugggaggggaugguugauggaugguacggcuuuagacaccagaacucugagggcaucgggcaggccgcugaccugaaaagcacccaagccgcuauugaucagaucaauggaaagcucaaccggcugauuggcaaaacgaaugaaaaguuccaucagaucgagaaggaguucuccgaaguggaagggcgcauucaggaccuugagaaauauguggaggauacaaagaucgaccuguggagcuacaacgccgaacuccuggucgcccuggagaaccaacacaccauugaucucaccgacucugaaaugaauaaacuguuugagagaacaaagaaacagcuucgggaaaacgcugaggauaugggaaauggcugcuucaagaucuaucauaagugugacaacgcgugcaucggguccauuagaaauggcaccuacgaccacgauguguaucgcgacgaggcccugaacaaucgguuucagaucaaaggaguugaacucaagagcggcuacaaagauuggauucuguggaucucuuucgcuauuuccugcuuucuucuguguguggcccuccugggguucaucaugugggccugccagaagggaaacaucagauguaauauuugcaucuga

SEQ ID NO: 200762 - RNA, 1701 nt, Artificial Sequence
  derived and/or modified CDS sequence (opt5) from hemagglutinin__InfluenzaA__AFH00670
augaagaccaucauugcccugagcuacauccucugccugguguucgcucagaaacuucccggcauugacaacuccacagccacgcugugucucgggcaccaugcggucccuaauggaaccaucguuaagacaauuaccaacgaucaaaucgaggugacaaaugcuaccgaacuggugcagaacucuagcacaggcgggaucugcgacuccccgcaccagauucuugauggagagaauuguacccugaucgacgcccuccugggcgauccccagugcgacggguuucaaaacaaaaagugggaucuguucgucgaaagaucuaaagccuauagcaauuguuacccuuaugacgugcccgauuacgcuucccuccggucucugguugccagcuccggaacgcuugaguuuaacaaugaaucuuucaacuggaccggcgugacacagaauggcaccucuuccgcuugcaagcgcgggagcaacaauagcuuuuucuccagacugaacuggcucacacauagcaaguuuaaauauccugcccugaaugucaccaugcccaacaacgaggaguucgacaaacuuuacauuuggggagugcugcacccuggcacggauaaugaccagaucuuucucuaugcgcaggccucugggcggauuacaguuuccaccaagcgcagccaacagacagugaucccgaacauuggauccagaccccggguccgcaauaucccuucuagaaucagcauuuacuggaccaucgugaagcccggcgauauucugcugaucaacuccaccgggaaucucauugcuccucggggauacuucaaaauccgcagcggcaagucuuccaucaugagaagcgacgcccccauuggcaaguguaacucugaaugcaucacaccgaaugggagcauuccuaacgacaaacccuuucagaaugugaaccggaucacguauggagcuuguccucgcuacgucaagcagaauacccugaaacuugccacaggcaugagaaacguucccgagaagcaaacccgggggauuuucggagcgaucgccggcuuuaucgaaaaugggugggagggaaugguggauggcugguauggcuuccgccaucagaacuccgaggggauuggacaggcugccgaccugaaaucuacacaagcugccaucgaucagauuaauggcaagcucaacagacugaucgggaaaaccaacgaaaaguuccaccagauugagaaggaauuuagcgagguggaaggacggauccaggaccuugagaaauacgucgaggauacgaagauugaccugugguccuauaaugccgaacuccugguggcucuggagaaccaacacacaaucgaucucaccgacagcgaaaugaauaaacuguucgagaagaccaaaaagcagcuuagagaaaacgcggaggauaugggcaaugggugcuuuaagaucuaccauaaaugugacaacgccugcauuggcucuauccgcaauggaacauaugaucacgacguuuaccgggacgaggcucugaacaauagauuccagauuaagggcguggaacucaaauccggguacaaggauuggauccuguggauuagcuuugccaucucuugcuuccuucugugugucgcccuccugggauuuaucaugugggcuugccagaaaggcaacauucgcuguaauaucugcauuuga

SEQ ID NO: 200763 - RNA, 1701 nt, Artificial Sequence
  derived and/or modified CDS sequence (opt5) from hemagglutinin__InfluenzaA__AFH00681
augaagaccaucauugcccugagcuacauccucugccugguguucgcucagaaacuucccggcaacgacaauuccacagccacgcugugucucgggcaccaugcggucccuaacggaaccauuguuaagacaaucaccaaugaucaaauugaggugacaaacgcuaccgaacuggugcagucuagcuccacaggcgagaucugcgacucuccgcaccagauccuugauggggaaaauuguacccugauugacgcccuccugggagauccccagugcgacggcuuucaaaacaaaaagugggaucuguucaucgagagaagcaaagccuauuccaauuguuacccuuaugacguccccgauuacgcuucucuccggagccugguggccuccagcgggacgcuugaauuuaacaaugagucuuucaacuggaccggaguuacacagaauggcaccuccagcgcuugcauucgcagaucuaacaauuccuuuuucagccggcugaacuggcucacacaucugaaguuuaaguauccugcccuuaaugugaccaugcccaacaaagagaaguucgacaaacuguacaucuggggcguccaccauccugggacggauaacgaccagauuuuucucuaugcgcaggccucuggacgcaucacaguguccaccaagagaagccaacagacaguuauuccgaauaucggcucccggccccgcgugagaaacaucccuucucggauuagcaucuacuggaccauugucaaacccggggauauccugcugauuaauuccaccggaaaccucaucgcuccucgcggcuacuucaagaucagaagcgggaagucuuccauuaugcggagcgacgcccccaucggaaaauguaauucugaaugcauuacaccgaacggcagcaucccuaaugacaagcccuuucagaacgugaaucgcauuacguauggcgcuuguccuagauacgugaaacagaacacccugaaacuugccacagggaugcggaauguccccgagaagcaaacccgcggaaucuucggcgcgaucgccggguuuauugaaaacggaugggagggcaugguugaugggugguauggauucagacaccaaaauuccgagggcaucggccaggcugccgaccugaagucuacacaggcugccauugaucagaucaacgggaaacucaaucggcugauuggaaagaccaacgaaaaguuccaccagaucgagaaagaauuuagcgagguggaaggccgcauucaggaccuugagaaguacguggaggauacgaaaaucgaccugugguccuauaacgccgaacuccuggucgcucuggagaaucaacauacaaucgaucucaccgacagcgaaaugaacaagcuguucgagaaaaccaagaagcagcuuagagaaaaugcggaggauauggggaacggaugcuuuaaaauuuaccacaagugugacaaugccugcaucggcucuauucggaacgggacauaugaucaugacguguacagagacgaggcucugaauaaccgcuuccagaucaaaggcguugaacucaaguccggauacaaagauuggauucuguggaucagcuuugccaucucuugcuuccuucuguguguggcccuccugggcuuuauuaugugggcuugccagaaggggaauauccgguguaacauuugcaucuga

SEQ ID NO: 200764 - RNA, 1701 nt, Artificial Sequence; identical to SEQ ID NO: 194000
  derived and/or modified CDS sequence (opt5) from hemagglutinin__InfluenzaA__AFH00692

SEQ ID NO: 200765 - RNA, 1701 nt, Artificial Sequence
  derived and/or modified CDS sequence (opt5) from hemagglutinin__InfluenzaA__AFH00703
augaagaccaucauugcccugagcuacauccucugccugguguucgcucagaaacuucccggcaacgacaauuccacagccacgcugugucucgggcaccaugcggucccuaacggaaccauuguuaagacaaucaccaaugaucaaauugaggugacaaacgcuaccgaacuggugcagucuagcuccacaggcaaaaucugcgacucuccgcaccagauccuugaugggaagaauuguacccugauugacgcccuccugggagauccccagugcgacggcuuucaaaacaaaaagugggaucuguucgucgagagaagcaaggccuauuccaauuguuacccuuaugacgugcccgauuacgcuucucuccggagccugguugccuccagcgggacgcuugaauuuaacaaugagucuuucaacuggaccggagugacacagaauggcaccuccagcgcuugcauccgcagaucuaaaaacuccuuuuucagccggcugaauuggcucacacaucugaacuuuaaguauucugcccuuaaugucaccaugccuaacaacgaacaguucgacaaacuguacauuuggggcgugcaccaucccgggacggauaaggaccagaucuuucucuaugcgcaagccuccggacgcauuacaguuagcaccaaaagaucccagcagacagugaucccuaauauuggcucucggccgcgcgucagaaacauccccagccggaucuccauuuacuggaccaucgugaagccuggggauauucugcugaucaauagcaccggaaaccucauugcuccccgcggcuacuucaagaugcagucugggaaauccagcaucaugagaucugacgccccuaucggaaaguguaauagcgagugcauuacacccaacggcuccaucccgaaugacaaaccuuuucaaaacgugaaucggauuacguauggcgcuuguccccgcuacgucaagcagaacacccugaaacuugccacagggaugagaaauguuccugagaagcagacccggggaaucuucggcgcgauugccggguuuaucgaaaacggaugggagggcaugguggaugggugguauggauuccgccaccaaaauucugaaggcagaggccaggcugccgaccugaaaagcacacaggcugccaucgaucagauuaacgggaagcucaaucggcugaucggaaagaccaacgagaaauuccaccaaauugagaaggaauuuuccgagguggaaggcagaauccaggaccuugagaaauacgucgaagauacgaagauugaccuguggagcuauaacgccgagcuccugguggcucuggagaaucagcauacaaucgaucucaccgacucugaaaugaacaaacuguucgagaagaccaagaaacagcuucgcgaaaaugcggaggauauggggaacggaugcuuuaagauuuaccacaaaugugacaaugccugcaucggcuccauccggaacgggacauaugaucaugacguuuacagagacgaagcucugaauaaccgcuuccaaauuaagggcguggagcucaaaagcggauacaaggauuggauccuguggauuucuuuugccaucuccugcuuccuucugugugucgcccuccugggcuuuauuaugugggcuugccagaaggggaauauccgguguaacaucugcauuuga

SEQ ID NO: 200766 - RNA, 1701 nt, Artificial Sequence
  derived and/or modified CDS sequence (opt5) from hemagglutinin__InfluenzaA__AFH00714
augaagaccaucauugcccugagcuacaucuucugccucguguuugcucagaaccugcccggcaaugacaacuccacagccacgcuuugucuggggcaccaugcggucccuaauggaacccucguuaaaacaauuaccaacgaucaaaucgaggugacaaaugcuaccgaacuggugcagucuagcuccacaggcagaauuugcgacucuccgcaccggauccuugaugggaagaacuguacccugaucgacgcccuccugggagauccccauugcgacggcuuccagaaugagaaaugggaucuguuugucgaacgcagcaaggccuucuccaacuguuauccuuacgacgugcccgauuaugcuucucucagaagccugguugccuccagcgggacgcuugaguuuauuaaugaaggauucaacuggaccggcgugacacagucuggcggguccuacgcuugcaaacggggaagcgacaagucuuucuucucccgccugaauuggcucuaugagagcgagucuaaguacccuguccugaacgugaccaugcccaauaacggcaauuuugauaaacuuuauaucuggggaguucaccauccuuccacagacaaggaacaaaccaaccuguacgugagagccagcgggcgggucacgguguccacaaaacgcucucagcagaccauuaucccgaacauuggcagcagacccugggugcgggggcucuccagcggaaucucuauuuacuggacaaucgucaagccuggcgauauccugcugauuaauuccaacggcaaucucaucgcgccccgcggguauuucaaaauuagaaccggaaagagcucuaucaugcggagcgacgccccuauuggcaccuguuccucugagugcaucacacccaacgggagcaucccgaaugacaagccuuuucagaacguuaauaaaauuacguacggagcuugucccaaguaugugaaacaaaacacccugaagcuggccacaggcaugcgcaaugugccugaaaaacagaccagagggaucuucggagcuauugccggcuuuaucgagaacggcugggaggggauggucgauggaugguacggcuuccggcaccaaaauuccgaagggacaggacaggcggccgaccuuaagagcacccaggcugccauugaucagaucaacggcaaacucaaucgcgugaucgagaagacgaacgaaaaguuccaccagauugagaaagaauuuucugagguugaggggagaauccaagaccuggaaaaguauguggaggauacaaaaauugaccuuugguccuacaaugcugaacugcucgucgcccuggagaaccagcauaccaucgaucugaccgacagcgaaaugaacaagcucuuugagaaaacacggagacagcugcgcgagaaugccgaagauaugggcaacggaugcuuuaagauuuaucacaagugugacaaugcuugcaucggcucuauucggaacgggaccuacgaucaugacguguacagagacgaggcgcuuaauaaccgcuuccagaucaaaggaguugaacugaaguccggcuauaaagauuggauccucuggauuagcuuugccaucuccugcuuccugcuuugugugguccugcucggguuuauuaugugggcuugccaaaagggaaauauccgguguaacauuugcaucuga

SEQ ID NO: 200767 - RNA, 1701 nt, Artificial Sequence
  derived and/or modified CDS sequence (opt5) from hemagglutinin__InfluenzaA__AFH00725
augaagaccaucauugcccugagcuacaucuucugccucauuuuugcucagaaccugcccggcaaugacaacuccacagccacgcuuugucuggggcaccaugcggugccuaauggaacccucgucaaaacaaucaccaacgaucaaauugagguuacaaaugcuaccgaacuggugcagucuagcuccacaggcagaaucugcgacucuccgcaccggauccuugaugggaagaacuguacccugauugacgcccuccugggagauccccauugcgacggcuuccagaaugagaaaugggaucuguuuguggaacgcagcaaggccuucuccaacuguuauccuuacgacguccccgauuaugcuucucucagaagccugguggccuccagcgggacgcuugaguuuaucaaugaaggauucaacuggaccggcguuacacagucuggcggguccuacgcuugcaaacggggaagcgacaauucuuucuucucccgccugaacuggcucuaugagagcgagucuaaguacccugugcugaaugucaccaugcccaacaauggcaaguuugauaaacuuuauauuuggggagugcaccauccuuccacagacaaggaacaaaccaaacuguacguuagagccagcgggcgggugacggucuccacaaagcgcucucagcagaccgugaucccgaacauuggcagcagacccugggugcgggggcucuccagccgcaucucuauuuacuggacaaucgucaaaccuggagauauccugcugauuaacuccaccggcaaucucaucgcgcccagaggcuauuucaagauucggaccgggaaguccucuaucaugcgcagcgacgccccuauuggaacauguuccucugagugcaucacgcccaacggcagcaucccgaaugacaaaccuuuucagaacguuaauaagauuaccuacggggcuugucccagauaugugaaacaaaacacacugaagcuggccaccggaaugcggaaugugccugaaaaacagacacgcggcaucuucggggcuauugccggauuuaucgagaacggcugggagggcauggucgaugggugguacggauucagacaccagaauagcgaaggcaccgggcaggcggccgaccuuaagagcacgcaagcugccauugaucagaucaacggaaaacucaaucgggugaucgagaagacaaacgaaaaguuccaccagauugagaaagaauuuucugagguugagggcagaauccaagaccuggaaaaguauguggaggauaccaaaauugaccuuugguccuacaaugcugaacugcucgucgcccuggagaaccagcauaccaucgaucugacagacagcgaaaugaauaagcucuuugagaaaacccgcaagcagcugcgggagaacgccgaagauauggggaacggcugcuuuaagauuuaucacaaaugugacaaugcuugcaucggaucuauuagaaacggcacauacgaucaugacguguaccgcgacgaggcgcuuaauaaccgguuccagaucaaggggguugaacugaaauccggauauaaggauuggauccucuggauuagcuuugccaucuccugcuuccugcuuugugugguccugcucggcuuuauuaugugggcuugccaaaaagggaauaucagauguaacauuugcaucuga

SEQ ID NO: 200768 - RNA, 1701 nt, Artificial Sequence; identical to SEQ ID NO: 199138
  derived and/or modified CDS sequence (opt5) from hemagglutinin__InfluenzaA__AFH00736

SEQ ID NO: 200769 - RNA, 1701 nt, Artificial Sequence
  derived and/or modified CDS sequence (opt5) from hemagglutinin__InfluenzaA__AFH00747
augaagaccaucauugcccugagcuacaucuucugccucguguuugcucagaaacugcccggcaacgacaauuccacagccacgcuuugucuggggcacuaugcggucccuaacggaacccucguuaagacaauuaccaaugaucaaaucgaggugacaaacgcuaccgaacuggugcagucuagcuccacaggcagaauuugcgacucuccgcaucggauccuugaugggaaaaauuguacccugaucgacgcccuccugggagauccccacugcgacggcuuccagaacgagaagugggaucuguuugucgaacgcagcaaagccuacuccaauuguuauccuuacgacgugcccgauuaugcuucucucagaagccugguugccuccagcgggacgcuugaguucauuaacgaagacuuuaauuggaccggagugacacagucuggcggcuccuacgcuugcaagcgggggagcgucaagucuuucuuuucccgccugaacuggcuccaugagagcgaguauaaauacccugcccugaaugugaccaugcccaacaauggaaaguucgauaaacuuuacaucuggggcguucaccauccuucuacagacagagaacaaaccaaccuguaugugcgggcguccgggcgcgucacggugagcacaaagagaucccagcagaccgugauuccgaauaucggaucucggcccuggguccgcggccucagcuccagaauuagcaucuacuggacaauuguuaaaccuggggauauccugcugaucaacucuaccggaaaccucauugcuccccggggcuauuuuaagauccgcaccggcaaguccagcauuaugagaucugacgccccuaucgggacauguagcuccgagugcauuacgcccaauggaucuaucccgaacgacaaaccuuuccagaaugugaacaagaucaccuacggcgccuguccccgguaugugaaacaaaauacacugaaacuugcuaccgggaugcgcaacgucccugaaaagcagacaagaggaauuuuuggcgccaucgcgggguucauugagaauggaugggagggcaugguggauggcugguacggguuucggcaccagaacagcgaaggaaccggccaggccgcugaccugaaguccacgcaagccgcuaucgaucagauuaaugggaaacucaacagacugaucgagaagacaaaugaaaaguuccaccagaucgagaaagaguucagcgaaguugagggacgcauucaagaccuugaaaaguauguggaggauaccaaaaucgaccuguggucuuacaacgccgaacuccuggucgcccuggagaaucagcauaccauugaucucacagacuccgaaaugaacaagcuguuugagaaaacccggaagcagcuuagagagaaugcugaagauaugggcaacgggugcuucaagaucuaccacaaaugugacaacgcgugcauuggcagcauccgcaauggaacauaugaucaugacguguaccgggacgaggcccugaacaauagauuucagauuaagggcguugaacucaaaucuggguauaaggauuggauccuguggaucuccuucgcuauuagcugcuuucuucugugugugguccuccugggauucaucaugugggccugccaaaaaggcaacauucgcuguaauaucugcauuuga

SEQ ID NO: 200770 - RNA, 1701 nt, Artificial Sequence
  derived and/or modified CDS sequence (opt5) from hemagglutinin__InfluenzaA__AFH00758
augaagaccaucauugcccugagcuacauccucugccugguguucgcucagaaacuucccggcaacgacaauuccacagccacgcugugucucgggcaccaugcggucccuaacggaacccugguuaagacaauuaccaaugaucaaaucgaggugacaaacgcuaccgaacuugugcagucuagcuccacaggcagaauuugcgacucuccgcaccggauccuggaugggaaaaauuguacccucaucgacgcccugcugggagauccccauugcgacggcuuucagaacaaggagugggaucucuucgucgaacgcagcaaagccuauuccaauuguuacccuuaugacgugcccgauuacgcuucucugagaagccuuguugccuccagcgggacgcuggaguuuauuaacgaagacuucaauuggaccggaguggcucagucuggcgaguccuaugccugcaagcggggcagcgucaaguccuuuuucucucgccucaacuggcugcacgagagcgaauacaaauauccugcgcuuaaugugacaaugcccaacaaugggaaguuugauaaacuguacaucuggggaguucaucacccuucuaccgacagagagcaaacaaagcucuacgugcgggccuccggccgcgucaccgugagcacgaaaagaucccagcagacagugauuccgaacaucgggucucggcccuggguccgcggacugagcuccagaauuagcaucuauuggaccauuguuaagccuggcgauauccugcucaucaauucuacagggaaccugauugcuccccggggauacuucaagauccgcaccggcaaauccagcauuaugagaucugacgccccuaucggcaccuguagcuccgaaugcauuacacccaacgggucuaucccgaaugacaagccuuuucagaacgugaaucggaucacguauggagcuuguccccgcuacgugaaacaaaacacccuuaagcuggccacaggcaugagaaaugucccugagaaacagacccgggggauuuucggagcgaucgccggcuuuauugagaacgggugggaaggaaugguggauggcugguauggcuucagacaccagaauagcgaggggacaggacaggcugccgaccucaaguccacccaagcugccaucgaucagauuaacggcaaacugaaucgccuuaucgaaaagacgaacgagaaguuucaucagaucgaaaaagaguucagcgagguugaagggcggauucaagaccuggagaaguacguggaagauacaaaaaucgaccucuggucuuauaaugccgagcugcuggucgcucucgaaaaccagcacaccauugaucugaccgacuccgagaugaauaaacuuuucgagaagacaagaaagcagcugcgcgaaaacgcggaggauaugggaaauggcugcuuuaagaucuaccauaaaugugacaacgccugcauugggagcauccggaacggcaccuacgaucacgacguguauagagacgaagcucucaauaaccgcuuccagauuaagggaguugagcugaaaucuggcuacaaggauuggauccuuuggaucuccuuugccauuagcugcuuccugcucugugugguccugcugggguuuaucaugugggccugccaaaaaggaaauauucgguguaacaucugcauuuga

SEQ ID NO: 200771 - RNA, 1701 nt, Artificial Sequence
  derived and/or modified CDS sequence (opt5) from hemagglutinin__InfluenzaA__AFH00769
augaagaccaucauugcccugagcuacauccucugccugguguucgcucagaaacuucccggcaacgacaauuccacagccacgcugugucucgggcaccaugcggucccuaacggaacccugguuaagacaauuaccaaugaucaaaucgaggugacaaacgcuaccgaacuugugcagucuagcuccacaggcagaauuugcgacucuccgcaccggauccuggaugggaaaaauuguacccucaucgacgcccugcugggagauccccauugcgacggcuuucagaacaaggagugggaucucuucgucgaacgcagcaaagccuauuccaauuguuacccuuaugacgugcccgauuacgcuucucugagaagccuuguugccuccagcgggacgcuggaguuuauuaacgaagacuucaauuggaccggaguggcucagucuggcgaguccuauacaugcaagcggggcagcgucaaguccuuuuucucucgccucaacuggcugcacgagagcgaauacaaauauccugcccuuaaugugaccaugcccaacaaugauaaguuugacaaacuguacaucuggggaguucaucacccuucuacagauagagagcaaaccucccucuacauucgggcgagcgggcgcgugacggucuccacaaagagaucucagcagaccgugaucccgaacauuggcagccggcccugggugcgcgggcuguccagcagaaucucuauuuauuggacaaucgucaaaccuggagacauccugcucauuaauuccaccggcaaccugaucgcuccccggggguacuucaagauucgcaccggaaagagcucuaucaugagaagcgacgccccuauuggcacauguuccucugaaugcaucacgcccaacggcagcaucccgaaugauaaaccuuuucagaacguuaaucggauuaccuauggggccuguccccgcuacgugaagcaaaacacacuuaaacuggcuaccggaaugagaaaugugccugagaagcagacacggggcaucuucggggccauugcgggauuuaucgagaacggcugggaagggauggucgacggaugguauggcuucagacaccaaaauuccgagggcaccgggcaggccgcugaucucaaaagcacgcaggccgcuauugaccagaucaacggaaagcugaaucgccuuaucgagaaaacaaacgaaaaguuucaucagauugaaaaggaguucucugagguggaaggccggauccaagaucuggagaaauacguugaagacaccaagauugaucucugguccuauaaugccgagcugcugguggcccucgaaaaccagcacaccaucgaccugacagauagcgagaugaauaaacuuuucgagaagaccagaaaacagcugcgcgaaaacgcugaggacauggggaauggaugcuuuaagauuuaccauaagugugauaacgcgugcaucggcucuauucggaacgggacauacgaccacgacgucuauagagaugaagcccucaauaaccgcuuccagaucaaaggcguggagcugaaguccggauacaaagacuggauccuuuggauuagcuuugcuaucuccugcuuccugcucuguguugugcugcugggcuuuauuaugugggccugccaaaaggggaauauccgguguaacauuugcaucuga

SEQ ID NO: 200772 - RNA, 1701 nt, Artificial Sequence
  derived and/or modified CDS sequence (opt5) from hemagglutinin__InfluenzaA__AFH00780
augagagccaucauugcucugagcuacauccucugccugguguucgcccagaaacuucccggcaacgacaauuccaccgcgacacugugucucgggcaccaugcugucccuaacggaacgcugguuaagaccauuacaaaugaucaaaucgaggugaccaacgccacagaacuugugcagucuagcuccaccggccggauuugcgacucuccgcaccgcauccuggaugggaagaauuguacacucaucgacgcccugcugggagauccccauugcgacggcuuucagaacaaagagugggaucucuucgucgaaagaagcaaggcuuauuccgacuguuacccuuaugaugugcccgacuacgccucucugcggagccuuguugcuuccagcgggacccuggaguuuacgaaugaaggauucaacuggaccggcguggcccaggauggcacaucuuaugcgugcaaacgcggguccgucaagagcuuuuucucuagacucaauuggcugcacaaacuugaguacaaguauccugcccugaacgugaccaugcccaauaacgacaaguuugauaaacucuacauuuggggaguucaucacccuuccacagacagcgaccaaaccucucuguacgugcaggcuuccggccgggucacggugagcacaaagcgcucccagcagaccgugaucccgaauauugggucuagacccuggguccggggaguuagcucccgcaucagcauuuauuggacaaucgugaaaccuggcgauauucugcucaucaacucuaccgggaaucugaucgcccccagaggauacuucaagauucgguccggcaagagcucuaucaugcgcagcgacgcuccuauuggcaacuguaacuccgagugcaucacccccaaugggucuauuccgaacgauaaaccuuuucaaaaugugaacagaaucacauauggagccuguccccgguacgucaagcagaauacgcuuaaacuggcgaccggcaugcgcaacgugccugaaaagcagacaagagggaucuucggagccauugcuggcuuuaucgagaaugggugggaaggaaugguugacggcugguauggcuuccggcaccagaacagcgaggggaccggacaagccgcugaucucaaauccacacaggccgccauuaaucagaucaacggcaagcugaauagacuuauugagaaaaccaacgaaaaguuucaucaaaucgagaaggaguucagcgaaguggaagggcgcauccaggaccuggagaaauacgucgaggauacgaagauugaccucuggucuuauaaugcugaacugcugguggcgcucgagaaccagcacacaaucgaucugaccgacuccgaaaugaauaaacuuuucgagcggaccagaaagcagcugcgcgaaaacgccgaggauaugggaaacggcugcuuuaaaauuuaccauaagugugacaaugcuugcaucgggagcauucggaacggcacauacgaccacgauguuuauagagacgaggcccucaauaaccgcuuccaaaucaagggaguggaacugaaaucuggcuacaaggauuggauucuuuggaucuccuuugccaucagcugcuuccugcucugugucgugcugcugggguuuauuaugugggcuugccagaaaggaaauauccgguguaacauuugcaucuga

SEQ ID NO: 200773 - RNA, 1701 nt, Artificial Sequence
  derived and/or modified CDS sequence (opt5) from hemagglutinin__InfluenzaA__AFH00791
augaagaccaucauugcccugagcuacauccucugccugguguucgcucagaaacuucccggcaacgacaauuccacagccacgcugugucucgggcaccaugcggucccuaacggaacccugguuaagacaauuaccaaugaucaaaucgaggugacaaacgcuaccgaacuugugcagggcucuagcacagggagaauuugcgacuccccgcaccagauccuggauggaaagaauuguacccucaucgacgcccugcugggcgauccccauugcgacggguuucagaacaaggagugggaucucuucgucgaacggucuacggccuauagcaauuguuacccuuaugacgugcccgauuacgcuucccugcgcucucuuguugccagcuccggaacccuggaguuuacaaaagaaggcuucaacuggaccggcguggcucaagacgggacaagcuauaccugcaagagaggaucugucaaguccuuuuucagccggcucaauuggcugcacaaacuugaguacaaguauccugcccugaacgugacgaugcccaauaacgauaaauuugacaagcucuacauuuggggcguucaucacccuucuacagauuccgaccagaccagccuguacgugcaggcgucugggcgcgucacaguguccaccaaaagaagccagcaaaccgugaucccgaauauuggaucccggcccuggguccgcggcguuucuagcagaaucuccauuuauuggacaaucgugaagccuggggacauucugcucaucaacagcacgggaaaucugaucgcuccccggggcuacuucaagauucgcucuggcaaauccagcaucaugagaucugaugccccuauugacaacuguaacagcgagugcaucacccccaauggguccauuccgaacgauaagccuuuucagaaugugaaccggaucacauauggagccuguccccgcuacgucaaacagaauacccuuaagcuggcuacaggcaugagaaacgugccugaaaaacagacccgggggaucuucggagccauugcgggcuuuaucgagaaugggugggaaggaaugguugacggcugguauggcuuccgccaccaaaacucugaggggacgggacaggccgcugaucucaagagcacacaggccgcuauuaaucaaaucaacggcaaacugaauagacuuauugagaagaccaacgaaaaguuucaucagaucgagaaagaguucuccgaaguggaagggcggauccaggaccuggagaaguacgucgaggauaccaaaauugaccucuggagcuauaaugccgaacugcugguggcccucgagaaccagcacacaaucgaucugaccgacucugaaaugaauaaacuuuucgagagaacacgcaaacaacugcgggaaaacgcugaggauaugggaaacggcugcuuuaagauuuaccauaagugugacaaugcgugcaucggguccauuagaaacggcacguacgaccacgauguuuaucgcgacgaggcccucaauaaccgguuccagaucaaaggaguggaacuuaagagcggcuacaaagauuggauucuguggaucucuuuugcuaucuccugcuuccugcucugugucgugcugcugggguuuauuaugugggccugccagaagggaaauaucagauguaacauuugcaucuga

SEQ ID NO: 200774 - RNA, 1701 nt, Artificial Sequence; identical to SEQ ID NO: 193414
  derived and/or modified CDS sequence (opt5) from hemagglutinin__InfluenzaA__AFH00802

SEQ ID NO: 200775 - RNA, 1701 nt, Artificial Sequence
  derived and/or modified CDS sequence (opt5) from hemagglutinin__InfluenzaA__AFH00813
augaagaccaucauugcccugagcuacauccucugccugguguucgcucagaaacuucccggcaacgacaauuccacagccacgcugugucucgggcaccaugcggucccuaacggaaccauuguuaagacaaucaccaaugaucaaauugaggugacaaacgcuaccgaacuggugcagucuagcuccacaggcgagaucugcaauucuccgcaccagauccuugacggggaaaacuguacccugauugaugcccuccugggagacccccagugcgauggcuuucaaaauaaaaagugggaccuguucgucgagagaagcaaagcccauuccaacuguuauccuuacgaugugcccgacuaugcuucucuccggagccugguugccuccagcgggacgcuugaauuuaauaacgagucuuucaauuggaccggagugacacagaacggcaccuccagcgcuugcauccgcagaucuaauaacuccuuuuucagccggcugaauuggcucacacaccugaacuuuaaguacccugcccuuaacgucaccaugcccaauaacgagcaguucgauaagcuguauauuuggggcgugcaucacccugggacggacaaagaucagaucuuucucuacgcgcaagccucuggacgcauuacaguuuccaccaagagaagccagcaggcugugaucccgaauauuggcucccggccccgcgucagagacaucccuucucgggugagcaucuauuggacaauugugaaacccggggauauccugcugauuaacuccaccggaaaucucaucgccccucgcggcuacuucaagauuagaagcgggaaaucuuccaucaugcggagcgacgcucccaucggaaaguguaacucugccugcauuaccccgaauggcagcaucccuaacgacaagcccuuucagaaugucaaccgcauuacauacggcgcguguccuagauauguuaaacaaaauacgcugaaacuugccaccgggaugcggaacgugcccgaaaaacagacacgcggaaucuucggcgcuauugccggguuuaucgagaauggaugggaaggcaugguggaugggugguacggauucagacaccagaacuccgagggccggggccaagcugccgaccugaagucuacccaggccgcuaucgaucagauuaaugggaaacucaacagacugaucggaaagacaaacgagaaauuccaucagauugaaaaggaguuuagcgaagucgagggccgcauccaagaccuugaaaaguauguggaggauaccaaaauugaccugugguccuacaaugcggagcuccugguugcccuggaaaaccagcacacgaucgaucucacagacagcgagaugaauaagcuguucgaaaagaccaagaaacagcuucgggagaacgcugaagauauggggaauggaugcuuuaagauuuaucauaagugugacaacgccugcaucggcucuaucagaaaugggaccuacgaucacgacguguaucgcgacgaggcccugaacaaucgguuccagauuaaaggcgucgagcucaaguccggauacaaagauuggauccuguggauuagcuuugcuaucucuugcuuccuucuguguguggcccuccugggcuuuauuaugugggcgugccaaaaggggaacaucagauguaauaucugcauuuga

SEQ ID NO: 200776 - RNA, 1701 nt, Artificial Sequence
  derived and/or modified CDS sequence (opt5) from hemagglutinin__InfluenzaA__AFH00824
augaagaccaucauugcccugagcuacauccucagacugguguucgcucagaaacuucccggcaacgacaauuccacagccacgcugugccucgggcaccaugcggucccuaacggaaccauuguuaagacaaucaccaaugaucaaauugaggugacaaacgcuaccgaacuggugcaaaauucuagcaucggcgagaucuguaacuccccgcaccagauucuugacggggaaaauugcacacugaucgaugcccuccugggagacccccagugugauggcuuucagaacaaaaagugggaccuguucgucgagcggucuaaagccuauagcaauugcuacccuuaugaugugcccgacuacgcuucccuccgcucucugguugccagcuccgggacccuugaauuuaacaaugagagcuucaacuggacgggagugacccagaauggcacaucuuccgcuuguauuagacggagcaacaauuccuuuuucucucgccugaacuggcucacccaucugaacuuuaaguauccugcccuuaaugucacaaugcccaacaaugagcaguucgauaagcuguacaucuggggcgugcaccauccugggaccgacaaagaucagauuuuucucuaugcgcaaagcucuggaagaaucacgguuuccacaaagcggagccagcaggccgugauuccgaacaucggcucccgccccagaauccgggacauuccuucucgcaucagcauuuacuggaccaucgucaaacccggggauauucugcugaucaauuccacaggaaaccucaucgcuccuagaggcuacuucaagauucggagcgggaaaucuuccaucaugcgcagcgacgcccccauuggaaagugcaauucugaauguaucaccccgaacggcagcauuccuaaugacaagcccuuucagaacgugaauagaaucaccuauggcgcuugcccucgguacgugaaacaauccacacugaagcuggccacggggaugcgcaacguccccgagaaacagaccagaggaaucuucggcgcgauugccggguuuaucgaaaauggaugggagggcaugguugaugggugguauggauuccggcaccagaacucugagggcagaggccaagcugccgaccuuaagagcacacaggcugccauugaucagaucaaugggaaacucaaccgccugauuggaaagaccaacgaaaaauuccaccagaucgagaaggaauuuuccgagguggaaggccggauucaagaccuugagaaguacguggaggauacaaaaaucgaccuguggagcuauaaugccgaacuccuggucgcucuggagaaccagcauaccaucgaucucacggacucugaaaugaauaagcuguucgagaaaacaaagaaacagcuuagagaaaacgcggaggauauggggaauggauguuuuaagauuuaccacaagugcgacaacgccuguaucggcuccauucgcaaugggaccuaugaucaugacguguaccgggacgaggcucugaacaauagauuccagaucaaaggcguugaacucaagagcggauacaaagauuggauucuguggaucucuuuugccaucuccugcuuccuucugugcguggcccuccugggcuuuauuaugugggcuugucaaaaggggaacauccgcugcaauauuuguaucuga

SEQ ID NO: 200777 - RNA, 1701 nt, Artificial Sequence
  derived and/or modified CDS sequence (opt5) from hemagglutinin__InfluenzaA__AFH01407
augaagaccaucauugcccugagcuacauccucugccugguguucgcucagaaacuucccggcaacgacaauuccacagccacgcugugucucgggcaccaugcggucccuaacggaaccauuguuaagacaaucaccaaugaucaaauugaggugacaaacgcuaccgaacuggugcagucuagcuccacaggcgggaucugcaauucuccgcaccagauccuugacggagagaacuguacccugauugaugcccuccugggcgacccccagugcgauggguuucaaaauaaaaagugggaccuguucgucgaaagaagcaaagccuauuccaacuguuacccuuaugaugugcccgacuacgcuucucuccggagccugguugccuccagcggaacgcuugaguuuaauaacgaaucuuucaauuggaccggcgugacacagaacggcaccuccagcgcuugcaagcgcagaucuaauaaguccuuuuucagccggcugaacuggcucacacaucugaaauauaaguacccugcccuuaaugucaccaugcccaacaacgagaaauuugauaagcuguauaucuggggagugcaccauccugggacggacucugaucagauuucccucuacgcgcaggccagcggccgcaucacaguuuccaccaaaagaucucaacagacagugauuccgaauaucgggagccggccccgcgucagagacauuuccagccggaucucuaucuacuggaccauugugaagccuggagauauccugcugauuaacuccaccggcaaucucaucgcuccccgcggguauuucaagauuagaagcggaaaaucuagcaucaugcgguccgacgccccuaucggcaaguguaacucugagugcauuacacccaauggcagcaucccgaacgacaaaccuuuucagaaugugaaccgcauuacguacggggcuugucccagauaugucaagcagaauacccugaaacuugccacaggaaugcggaacguuccugaaaagcaaacccgcggcaucuucggggcgauugccggauuuaucgagaauggcugggaagggaugguggauggaugguacggcuucagacaccagaacuccgagggcacagggcaggcugccgaccugaaaagcacccaagcugccaucaaucagauuaacggaaagcucaaucggcugaucggcaagacgaacgagaaauuucaccagauugaaaaggaguucucugaaguggaggggagaauccaggaucuugaaaaauaugucgaggacacaaagauugaucugugguccuacaacgccgagcuccugguggcucuggaaaaucaacauaccaucgaccucaccgauagcgagaugaacaaacuguucgaacgcacaaagaagcagcuucgggagaaugcggaagacaugggaaacggcugcuuuaaaauuuaucacaagugugauaaugccugcaucgagucuaucagaaacgggaccuacgaccaugauguuuaccgcgacgaggcucugaauaaccgguuccagauuaaaggcguggaacucaaguccggauauaaagacuggauccuguggauuagcuuugccaucuccugcuuccuucugugugucgcccuccugggcuuuauuaugugggcuugccagaaggggaauaucagauguaacaucugcauuuga

SEQ ID NO: 200778 - RNA, 1701 nt, Artificial Sequence
  derived and/or modified CDS sequence (opt5) from hemagglutinin__InfluenzaA__AFH34940
augaagaccaucauugcccugagcuacauccucugccugguguucgcucagaaacuucccggcaacgacaauuccacagccacgcugugucucgggcaccaugcggucccuaacggaaccauuguuaagacaaucaccaaugaucaaauugaggugacaaacgcuaccgaacuggugcagucuagcuccacaggcgagaucugcgacucuccgcaccagauccuugauggggaaaauuguacccugauugacgcccuccugggagauccccagugcgacggcuuucaaaacaaaaagugggaucuguucgucgagagaagcaaagccuauuccaauuguuacccuuaugacgugcccgauuacgcuucucuccggagccugguugccuccagcgggacgcuugaauuuaacaaugagucuuucaacuggaccggagugacacagaauggcaccuccagcgcuugcauccgcagaucuaacuccagcuuuuucucucggcugaauuggcucacacaucugaacuuuaaguauccugcccuuaaugucaccaugcccaacaacgagcaguucgacaagcuguacauuuggggcgugcaccauccugggacggauaaagaccagaucuuucucuaugcgcaauccagcggacgcauuacaguuuccaccaagagaucucagcaggccgugaucccgaauauuggcagccggccccgcaucagaaacaucccuucccggauuagcaucuacuggacaauugucaaacccggggauauccugcugauuaauucuaccggaaaccucaucgcuccucgcggcuacuucaagaucagauccgggaaaagcucuauuaugcggagcgacgcccccaucggaaaguguaauuccgaaugcauuaccccgaacggcucuaucccuaaugacaagcccuuucagaacgugaaucgcauuacauauggcgcuuguccuagauacgugaaacaaagcacgcugaagcuggccaccgggaugcggaacguccccgagaaacagacacgcggaaucuucggcgcgaucgccggguuuauugaaaauggaugggagggcaugguugaugggugguauggauucagacaccagaacuccgagggccggggccaagcugccgaccuuaagagcacccaggcugccaucgaucagauuaaugggaaacucaacagacugaucggaaagacaaaugaaaaauuccaccagauugagaaggaauuuucugagguggaaggccgcauccaagaccuugagaaguacguggaggauaccaaaauugaccugugguccuauaacgccgaacuccuggucgcucuggagaaccagcauacgaucgaucucacagggagcgaaaugaauaagcuguucgagaaaaccaagaaacagcuucgggaaaacgcggaggacaugggaaauggcugcuuuaagaucuaccacaagugugauaacgccugcauugggucuaucagaaauggcaccuauaaccaugacguguaccgcgaugaggcucugaauaaccgguuccagauuaaaggaguugaacucaaguccggcuacaaagacuggauccuguggauuagcuuugccaucuccugcuuccuucuguguguggcccuccugggguuuaucaugugggcuugccaaaagggaaauauuagauguaacaucugcauuuga

SEQ ID NO: 200779 - RNA, 1701 nt, Artificial Sequence
  derived and/or modified CDS sequence (opt5) from hemagglutinin__InfluenzaA__AFH34961
augaagaccaucauugcccugagcuacauccucugccugguguucgcucagaaacuucccggcaacgacaauuccacagccacgcugugucucgggcaccaugcggucccuaacggaaccauuguuaagacaaucaccaaugaucaaauugaggugacaaacgcuaccgaacuggugcagucuagcuccacaggcgagaucugcgacucuccgcaccagauccuugauggggaaaauuguacccugauugacgcccuccugggagauccccagugcgacggcuuucaaaacaaaaagugggaucuguucgucgagagaagcaaagccuauuccaauuguuacccuuaugacgugcccgauuacgcuucucuccggagccugguugccgcuuccgggacgcuugaauuuaacaaugagagcuucaacuggaccggagugacacagaauggcaccucuuccgccugcauccgcagaagcaacucuuccuuuuucagccggcugaauuggcucacacaucugaacuuuaaguauccugcgcuuaaugucaccaugcccaacaacgagcaguucgacaagcuguacauuuggggcgugcaccauccugggacggauaaagaccagaucuuucucuaugcccaaucuuccggacgcauuacaguuagcaccaagagaucccagcaggcugugaucccgaauauuggcucucggccccgcaucagaaacaucccuagccggauuuccaucuacuggacaauugucaaacccggggauauccugcugauuaauagcaccggaaaccucaucgccccucgcggcuacuucaagaucagaucugggaaauccagcauuaugcggucugacgcucccaucggaaaguguaauagcgaaugcauuaccccgaacggcuccaucccuaaugacaagcccuuucagaacgugaaucgcauuacauauggcgccuguccuagauacgugaaacaaucuacgcugaaacuugcgaccgggaugcggaacguccccgagaagcagacacgcggaaucuucggcgccaucgcuggguuuauugaaaauggaugggagggcaugguugaugggugguauggauucagacaccagaacagcgagggccggggccaagccgcugaccugaaguccacccaggccgccaucgaucagauuaaugggaaacucaacagacugaucggaaagacaaaugaaaaauuccaccagauugagaaggaauuuagcgagguggaaggccgcauccaagaccuugagaaguacguggaggauaccaaaauugaccuguggucuuauaacgcugaacuccuggucgcgcuggagaaccagcauacgaucgaucucacagacuccgaaaugaauaagcuguucgagaaaaccaagaaacagcuucgggaaaacgccgaggauauggggaauggaugcuuuaagaucuaccacaagugugacaacgcuugcauuggcagcaucagaaaugggaccuauaaccaugauguguaccgcgacgaggcccugaauaaccgguuccagauuaaaggcguugaacucaagucuggauacaaagacuggauccuguggauuuccuuugccaucagcugcuuccuucuguguguggcucuccugggcuuuaucaugugggccugccaaaaggggaauauuagauguaacaucugcauuuga

SEQ ID NO: 200780 - RNA, 1701 nt, Artificial Sequence
  derived and/or modified CDS sequence (opt5) from hemagglutinin__InfluenzaA__AFH34968
augaagaccaucauugcccugagcuacauccucugccugguguucgcucagaaacuucccggcaacgacaauuccacagccacgcugugucucgggcaccaugcggucccuaacggaaccauuguuaagacaaucaccaaugaucaaauugaggugacaaacgcuaccgaacuggugcagucuagcuccacaggcgagaucugcgacucuccgcaccagauccuugauggggaaaauuguacccugauugacgcccuccugggagauccccagugcgacggcuuucaaaacaaaaagugggaucuguucgucgagagaagcaaagccuauuccaauuguuacccuuaugacgugcccgauuacgcuucucuccggagccugguugccgcuuccgggacgcuugaauuuaacaaugagagcuucaacuggaccggagugacacagaauggcaccucuuccgccugcauccgcagaagcaacucuuccuuuuucagccggcugaauuggcucacacaucugaacuuuaaguauccugcgcuuaaugucaccaugcccaacaacgagcaguucgacaagcuguacauuuggggcgugcaccauccugggacggauaaagaccagaucuuucucuaugcccaaucuuccggacgcauuacaguuagcaccaagagaucccagcaggcugugaucccgaauauuggcucucggccccgcaucagagauaucccuagccggauuuccaucuacuggacaauugucaaacccggggacauccugcugauuaacagcaccggaaaucucaucgccccucgcggcuacuucaagaucagaucugggaaauccagcauuaugcggucugacgcucccaucggaaaguguaacagcgccugcauuaccccgaauggcuccaucccuaacgauaagcccuuucagaaugugaaccgcauuacauauggcgcguguccuagauacgugaaacaaucuacgcugaaacuugccaccgggaugcggaauguccccgaaaaacagacacgcggaaucuucggcgcuaucgccggguuuauugagaacggaugggaaggcaugguugacgggugguauggauucagacaccagaauagcgagggccggggccaagcugccgaucugaaguccacccaggccgcuaucgaccagauuaacgggaaacucaauagacugaucggaaagacaaacgagaaauuccaccagauugaaaaggaguuuagcgaaguggagggccgcauccaagaucuugaaaaguacguggaggacaccaaaauugaucuguggucuuauaaugcggagcuccuggucgcccuggaaaaccagcauacgaucgaccucacagauuccgagaugaacaagcuguucgaaaagaccaagaaacagcuucgggagaaugcugaagacauggggaacggaugcuuuaagaucuaccacaagugugauaaugccugcauuggcagcaucagaaacgggaccuauaaucaugacguguaccgcgacgaggcccugaacaaucgguuccagauuaaaggcguugagcucaagucuggauacaaagauuggauccuguggauuuccuuugcuaucagcugcuuccuucuguguguggcccuccugggcuuuaucaugugggcgugccaaaaggggaacauuagauguaauaucugcauuuga

SEQ ID NO: 200781 - RNA, 1701 nt, Artificial Sequence
  derived and/or modified CDS sequence (opt5) from hemagglutinin__InfluenzaA__AFH34975
augaagaccaucauugcccugagcuacauccucugccugguguucgcucagaaacuucccggcaacgacaauuccacagccacgcugugucucgggcaccaugcggucccuaacggaaccauuguuaagacaaucaccaaugauagaauugaggugacaaacgcuaccgaacuggugcaaaauucuagcaucggcgagaucugcgacuccccgcaccagauucuugauggggaaaacuguacacugaucgacgcccuccugggagauccccagugcgacggcuuucagaauaaaaagugggaucuguucgucgagcggucuaaagccuauagcaacuguuacccuuaugacgugcccgauuacgcuucccuccgcucucugguugccagcuccgggacccuugaauuuaauaacgagagcuucaauuggaacggagugacgcaaaauggcaccucuuccgcuugcauuagacggagcaacaauuccuuuuucucucgccugaacuggcucacacaucugaacuuuaaguauccugcccuuaaugucaccaugcccaacaaugagcaguucgacaagcuguacaucuggggcgugcaccauccugggacagauaaagaccagauuuuucucuaugcgcagccgagcggaagaaucaccguuucuacgaagcggucccaacaggccgugauucccaacaucggcagccgcccuagaauccggaauauucccucccgcaucucuauuuacuggacaaucgucaaaccuggggauauucugcugaucaacagcaccggaaaucucaucgcucccagaggcuacuucaagauucgguccgggaaaagcucuaucaugcgcuccgacgccccgauuggaaaguguaagagcgaaugcaucacaccuaacggcucuauucccaaugacaaaccuuuucagaacgugaauagaaucaccuauggcgcuuguccccgguacgugaagcagagcacccugaaacuugccacagggaugcgcaacguccccgagaagcaaacgagaggaaucuucggcgcgauugccggguuuaucgaaaauggaugggagggcaugguugaugggugguauggauuccggcaccagaacuccgagggcagaggccaggcugccgaccugaaaucuacccaagcugccauugaucagaucaaugggaagcucaaccgccugauuggaaaaacaaacgaaaaguuccaccagaucgagaaggaauuuagcgagguggaaggccggauucaggaccuugagaaauacguggaggauaccaagaucgaccugugguccuauaaugccgaacuccuggucgcucuggagaaccaacauacaaucgaucucaccgacagcgaaaugaauaaacuguucgagaagacgaaaaagcagcuuagagaaaacgcggaggauauggggaauggaugcuuuaagauuuaccacaaaugugacaacgccugcaucggcucuauucgcaaugggacauaugaucaugacguguaccgggacgaggcucugaacaauagauuccagaucaagggcguugaacucaaauccggauacaaggauuggauucuguggaucagcuuugccaucucuugcuuccuucuguguguggcccuccugggcuuuauuaugugggcuugccagaaagggaacauccgcuguaauauuugcaucuga

SEQ ID NO: 200782 - RNA, 1701 nt, Artificial Sequence; identical to SEQ ID NO: 195483
  derived and/or modified CDS sequence (opt5) from hemagglutinin__InfluenzaA__AFH74464

SEQ ID NO: 200783 - RNA, 1701 nt, Artificial Sequence; identical to SEQ ID NO: 194741
  derived and/or modified CDS sequence (opt5) from hemagglutinin__InfluenzaA__AFH74465

SEQ ID NO: 200784 - RNA, 1701 nt, Artificial Sequence; identical to SEQ ID NO: 195502
  derived and/or modified CDS sequence (opt5) from hemagglutinin__InfluenzaA__AFH74477

SEQ ID NO: 200785 - RNA, 1701 nt, Artificial Sequence
  derived and/or modified CDS sequence (opt5) from hemagglutinin__InfluenzaA__AFH74488
augaagaccaucauugcccugagcuacauccucugccugguguucgcucagaaacuucccggcaacgacaauuccacagccacgcugugucucgggcaccaugcggucccuaacggaaccauuguuaagacaaucaccaaugaucaaauugaggugacaaacgcuaccgaacuggugcagucuagcuccacaggcgagaucugcgacaauccgcaccagauccuugaugggaaaaacuguacccugauugacgcccuccugggagauccccagugcgacggcuuucaaaauaagaaaugggaucuguucgucgaaagaucuaaggccuauagcaacuguuacccuuaugacgugcccgauuacgcuucccuccggucucugguugccagcuccgggacgcuugaguuuaauaacgaaucuuucaauuggaccggagugacacagaacggcaccucuuccgcuugcauccgcagaagcaagaauagcuuuuucucccggcugaacuggcucacacaucugaauuuuaaauauccugcccuuaacgucaccaugcccaacaaugagcaguucgacaagcuguacauuuggggcgugcaccauccugggacggauaaagaccagaucuuucucuaugcgcaagccagcggacgcauuacaguuucuaccaagagaucccagcagacagugaucccgaacauuggcagccggccccgcgucagaaauaucccuucccggaucucuauuuacuggaccaucgugaaacccggggauauucugcugaucaacagcaccggaaaucucauugcuccucgcggcuacuucaagaucagauccggaaagagcucuaucaugcgguccgacgcccccauugggaaauguaacagcgagugcaucacaccgaauggcucuauuccuaacgacaagcccuuucagaaugugaaccgcaucacguauggcgcuuguccuagauacgucaaacaaaauacccugaaacuugccacagggaugcggaacguucccgaaaagcagacccgcggaauuuucggcgcgaucgccggguuuaucgagaauggaugggaaggcaugguggaugggugguauggauucagacaccagaacagcgagggccggggccaagcugccgaccugaaguccacacaggcugccauugaucagaucaaugggaaacucaacagacugauuggaaagaccaacgagaaguuccaccagaucgaaaaagaguuuucugaaguggagggccgcauucaagaccuugaaaaguacgucgaggauacgaaaaucgaccuguggagcuauaaugccgagcuccugguggcucuggaaaaccagcauacaauugaucucaccgacuccgagaugaauaagcuguucgaacggaccaaaaagcagcuuagagagaacgcggaagauauggggaauggaugcuuuaagaucuaccacaaaugugacaacgccugcaucggcagcauucgcaaugggacauaugaucaugacguuuaccgggacgaggcucugaacaauagauuccagaucaagggcguggagcucaaaucuggauacaaggauuggauucuguggaucuccuuugccauuagcugcuuccuucugugugucgcccuccugggcuuuaucaugugggcuugccaaaaagggaacauccgcuguaauauuugcaucuga

SEQ ID NO: 200786 - RNA, 1701 nt, Artificial Sequence; identical to SEQ ID NO: 195483
  derived and/or modified CDS sequence (opt5) from hemagglutinin__InfluenzaA__AFH74499

SEQ ID NO: 200787 - RNA, 1701 nt, Artificial Sequence; identical to SEQ ID NO: 195685
  derived and/or modified CDS sequence (opt5) from hemagglutinin__InfluenzaA__AFH74510

SEQ ID NO: 200788 - RNA, 1701 nt, Artificial Sequence
  derived and/or modified CDS sequence (opt5) from hemagglutinin__InfluenzaA__AFH74521
augaagaccaucauugcccugagcuacauccucugccugguguucgcucagaaaauucccggcaacgacaauuccacagccacgcuuugucuggggcaccaugcggucccuaacggaaccaucguuaagacaauuaccaaugaucaaaucgaggugacaaacgcuaccgaacucgugcagucuagcuccacaggcgagaucugcaauucuccgcaccagauucuggacggggaaaacuguacccuuaucgaugcccugcucggagacccccagugcgauggcuuucaaaauaaaaagugggaccuguucgucgagagaagcaaagccuauuccaacuguuacccuuaugaugugcccgacuacgcuucucugcggagccucguugccuccagcgggacgcuggaauuuaauaacgagucuuucaauuggaccggagugacacagaacggcaccuccagcgcuugcauucgcagaucuaauaacuccuuuuucagccggcuuaauuggcugacacauucuaaguccaaguauccugcccucaacgucaccaugcccaacaaugagcaguuugauaaacuguacaucuggggcgugcaccauccugggacggacaacgaucagauuuuccuuuaugcgcaagccagcggacgcaucacaguuuccaccaagagaucucagcagacagugauuccgaauaucggcagccggccccgcaucagagacauuccuucccggaucagcauuuacuggaccaucgucaaacccggggauauucugcucaucaacucuaccggaaaucugaucgcuccucgcggcuacuuuaagauuagauccgggaaaagcucuaucaugaaaagcgacgcccccauuggaaaguguaacuccgaaugcaucacaccgaauggcucuauuccuaacgacaagcccuuccagaaugugaaccggaucacguauggcgcuuguccucgcuacgugaagcaaaauacccugaaacucgccacagggaugagaaacguccccgagaagcagacccggggaaucuuuggcgcgauugccggguucaucgaaaauggaugggagggcaugguugaugggugguauggauuucgccaccagaacagcgagggcagaggccaagcugccgaccugaaauccacacaggcugccauugaucagaucaaugggaaacuuaaccggcugauuggaaagaccaacgaaaaguuccaccagaucgagaaggaguucagcgaaguggaaggccgcauucaagaccucgagaaauacguggaggauacgaaggucgaccuguggucuuauaaugccgaacuucugguggcucucgagaaccagcauacaaucgaucugaccgacuccgaaaugaauaaacuguuugagaagaccaaaaagcagcucagagaaaacgcggaggauauggggaauggaugcuucaagaucuaccacaaaugugacaacgccugcauuggcagcauccggaaugggacauaugaucaugacguuuacagagacgaggcucugaacaaucgcuuucagauuaagggcguggaacuuaaaucuggauacaaggauuggauccuguggauuuccuucgccaucagcugcuuucuccugugugucgcccuucugggcuucaucaugugggcuugccaaaaagggaacauucgguguaauaucugcauuuga

SEQ ID NO: 200789 - RNA, 1701 nt, Artificial Sequence; identical to SEQ ID NO: 199060
  derived and/or modified CDS sequence (opt5) from hemagglutinin__InfluenzaA__AFH74532

SEQ ID NO: 200790 - RNA, 1701 nt, Artificial Sequence; identical to SEQ ID NO: 195685
  derived and/or modified CDS sequence (opt5) from hemagglutinin__InfluenzaA__AFH74543

SEQ ID NO: 200791 - RNA, 1701 nt, Artificial Sequence; identical to SEQ ID NO: 195685
  derived and/or modified CDS sequence (opt5) from hemagglutinin__InfluenzaA__AFH74554

SEQ ID NO: 200792 - RNA, 1701 nt, Artificial Sequence; identical to SEQ ID NO: 195685
  derived and/or modified CDS sequence (opt5) from hemagglutinin__InfluenzaA__AFH74565

SEQ ID NO: 200793 - RNA, 1701 nt, Artificial Sequence; identical to SEQ ID NO: 195685
  derived and/or modified CDS sequence (opt5) from hemagglutinin__InfluenzaA__AFH74576

SEQ ID NO: 200794 - RNA, 1701 nt, Artificial Sequence; identical to SEQ ID NO: 195685
  derived and/or modified CDS sequence (opt5) from hemagglutinin__InfluenzaA__AFH74587

SEQ ID NO: 200795 - RNA, 1701 nt, Artificial Sequence
  derived and/or modified CDS sequence (opt5) from hemagglutinin__InfluenzaA__AFH74598
augaagaccaucauugcccugagcuacauccucugccugguguucgcucagaaacuucccgagaacgacaauuccacagccacgcugugucucggccaccaugcggucccuaacgggaccauuguuaagacaaucaccaaugaucaaauugaagugacaaacgcuaccgagcuggugcagucuagcuccacaggagaaaucugcgacucuccgcaccagauccuugauggcaaaaauuguacccugauugacgcccuccugggggauccccagugcgacggauuucaaaacaagaaaugggaucuguucgucgagagaagcaaggccuauuccaauuguuacccuuaugacgugcccgauuacgcuucucuccggagccugguugccuccagcggcacgcuugaauuuaacaaugagucuuucaacuggaccggggugacacagaauggaaccuccagcgcuugcauccgcagaucuaagaacuccuuuuucagccggcugaauuggcucacacaucugaacuuuaaauauccugcccuuaaugucaccaugcccaacaacgagcaguucgacaagcuguacauuuggggcgugcaccauccuggcacggauaaagaccagaucuuucucuaugcgcaagccucugggcgcauuacaguuuccaccaagagaagccagcagacagcuaucccgaauauuggaucccggccccgcgugagaaacaucccuucucggaucagcauuuacuggaccaucgucaaacccggcgauauucugcugaucaauuccaccgggaaccucauugccccucgcggauacuucaagaucagaagcggcaagucuuccaucaugcggagcgacgcucccauugggaaauguaauucugaaugcaucacaccgaacggaagcauuccuaaugacaagcccuuucagaacgugaaucgcaucacguauggcgccuguccuagauacgugaaacaaaacacccugaaacuugcgacaggcaugcggaauguccccgagaagcagacccgcgggauuuucggagccaucgcuggcuuuaucgaaaacgggugggagggaaugguugauggcugguauggguucagacaccaaaauuccgagggacggggccaggccgcugaccugaagucuacacaggccgccauugaucagaucaacggcaaacucaauagacugauugggaagaccaacgaaaaguuccaccagaucgagaaagaauuuagcgagguggaaggacgcauucaagaccuugagaaguacguggaggauacgaaaaucgaccugugguccuauaacgcugaacuccuggucgcgcuggagaaucagcauacaauugaucucaccgacagcgaaaugaacaagcuguucgagaaaaccaagaagcagcuucgggaaaaugccgaggauaugggcaacgggugcuuuaaaaucuaccacaagugugacaaugcuugcaucggaucuauuagaaacggcacauaugaucaugacguguaccgcgacgaggcccugaauaaccgguuccagaucaaagggguugaacucaaguccggcuacaaagauuggauucuguggaucagcuuugccauuucuugcuuccuucuguguguggcucuccugggauuuaucaugugggccugccaaaagggcaauaucagauguaacauuugcaucuga

SEQ ID NO: 200796 - RNA, 1701 nt, Artificial Sequence; identical to SEQ ID NO: 195483
  derived and/or modified CDS sequence (opt5) from hemagglutinin__InfluenzaA__AFH74609

SEQ ID NO: 200797 - RNA, 1701 nt, Artificial Sequence; identical to SEQ ID NO: 195685
  derived and/or modified CDS sequence (opt5) from hemagglutinin__InfluenzaA__AFH74620

SEQ ID NO: 200798 - RNA, 1701 nt, Artificial Sequence
  derived and/or modified CDS sequence (opt5) from hemagglutinin__InfluenzaA__AFH74631
augaagaccaucauugcccugagcuacauccucugccugguguucgcucagaaacuucccggcaacgacaauuccacagccacgcugugucucgggcaccaugcggucccuaacggaaccauuguuaagacaaucaccaaugaucaaauugaggugacaaacgcuaccgaacuggugcagucuagcuccacaggcgagaucugcgacucuccgcaccagauccuugaugggaccaauuguacgcugauugacgcccuccugggagauccccagugcgacggcuuucaaaacaaaaagugggaucuguucgucgaaagaagcaaagccuauuccaauuguuacccuuaugacgugcccgauuacgcuucucuccggagccugguugccuccagcgggacccuugaguuuaacaaugaaucuuucaacuggacaggagugacccagaauggcacauccagcgcuugcauccgcagaucuaagaacuccuuuuucagccggcugaauuggcucacccaucugaacuuuaaguauccugcccuuaaugucacgaugcccaacaacgagcaguucgacaaacuguacauuuggggcgugcaccauccugggacagauaaggaccagaucuuucucuaugcgcaagccucuggacgcauuaccguuuccacaaaaagaagccagcagaccgcuaucccgaauauuggcucccggccccgcgugagaaacaucccuucucggaucagcauuuacuggaccaucgucaagcccggggauauucugcugaucaauuccacaggaaaccucauugccccucgcggcuacuucaaaaucagaagcgggaagucuuccaucaugcggagcgacgcucccauuggaaaguguaauucugagugcaucacgccgaacggcagcauuccuaaugacaaacccuuucagaacgugaaucgcaucaccuauggcgccuguccuagauacgugaagcaaaacacacugaaacuugcgaccgggaugcggaauguccccgaaaagcagacacgcggaauuuucggcgccaucgcuggguuuaucgagaacggaugggaaggcaugguugaugggugguauggauucagacaccaaaauuccgagggccggggccaggccgcugaccugaaaucuacccaggccgccauugaucagaucaacgggaagcucaauagacugauuggaaaaacgaacgagaaguuccaccagaucgaaaaggaguuuagcgaaguggagggccgcauucaagaccuugaaaaauacguggaggauacaaagaucgaccugugguccuauaacgcugagcuccuggucgcgcuggaaaaucagcauaccauugaucucaccgacagcgagaugaacaaacuguucgaaaagaccaaaaagcagcuucgggagaaugccgaagauauggggaacggaugcuuuaagaucuaccacaaaugugacaaugcuugcaucggcucuauuagaaacgggacauaugaucaugacguguaccgcgacgaggcccugaauaaccgguuccagaucaagggcguugagcucaaauccggauacaaggauuggauucuguggaucagcuuugccauuucuugcuuccuucuguguguggcucuccugggcuuuaucaugugggccugccaaaaagggaauaucagauguaacauuugcaucuga

SEQ ID NO: 200799 - RNA, 1701 nt, Artificial Sequence; identical to SEQ ID NO: 195483
  derived and/or modified CDS sequence (opt5) from hemagglutinin__InfluenzaA__AFH74642

SEQ ID NO: 200800 - RNA, 1701 nt, Artificial Sequence; identical to SEQ ID NO: 195483
  derived and/or modified CDS sequence (opt5) from hemagglutinin__InfluenzaA__AFH74653

SEQ ID NO: 200801 - RNA, 1701 nt, Artificial Sequence; identical to SEQ ID NO: 195483
  derived and/or modified CDS sequence (opt5) from hemagglutinin__InfluenzaA__AFH74664

SEQ ID NO: 200802 - RNA, 1701 nt, Artificial Sequence; identical to SEQ ID NO: 195483
  derived and/or modified CDS sequence (opt5) from hemagglutinin__InfluenzaA__AFH74675

SEQ ID NO: 200803 - RNA, 1701 nt, Artificial Sequence; identical to SEQ ID NO: 200231
  derived and/or modified CDS sequence (opt5) from hemagglutinin__InfluenzaA__AFH74686

SEQ ID NO: 200804 - RNA, 1701 nt, Artificial Sequence; identical to SEQ ID NO: 200231
  derived and/or modified CDS sequence (opt5) from hemagglutinin__InfluenzaA__AFH74697

SEQ ID NO: 200805 - RNA, 1701 nt, Artificial Sequence; identical to SEQ ID NO: 195685
  derived and/or modified CDS sequence (opt5) from hemagglutinin__InfluenzaA__AFH74708

SEQ ID NO: 200806 - RNA, 1701 nt, Artificial Sequence; identical to SEQ ID NO: 195685
  derived and/or modified CDS sequence (opt5) from hemagglutinin__InfluenzaA__AFH74719

SEQ ID NO: 200807 - RNA, 1701 nt, Artificial Sequence; identical to SEQ ID NO: 195685
  derived and/or modified CDS sequence (opt5) from hemagglutinin__InfluenzaA__AFH74730

SEQ ID NO: 200808 - RNA, 1701 nt, Artificial Sequence
  derived and/or modified CDS sequence (opt5) from hemagglutinin__InfluenzaA__AFH74741
augaagaccaucauugcccugagcuacauccucugccugguguucgcucagaaacuucccggcaacgacaauuccacagccacgcugugucucgggcaccaugcggucccuaacggaaccauuguuaagacaaucaccaaugaucaaauugaggugacaaacgcuaccgaacuggugcaaaauucuagcacaggcgagaucugcgacuccccgcaccagauccuugaugggaaaaacuguacccugauugacgcccuccugggagauccccagugcgacggcuuucagaauaagaaaugggaucuguucgucgaaagaucuaaggccuauagcaacuguuacccuuaugacgugcccgauuacgcuucccuccggucucugguugccagcuccgggacgcuugaguuuaauaacgaaucuuucaauuggaccggagugacacagaacggcaccucuuccgcuugcauccgcagaagcaagaauagcuuuuucucccggcugaacuggcucacacaucugaauuuuaaauauccugcccuuaacgucaccaugcccaacaaugagcaguucgacaagcuguacauuuggggcgugcaccauccugggacggauaaagaccagaucuuucucuaugcgcaagccagcggacgcauuacaguuucuaccaagagaucccagcagacagcuaucccgaacauuggcagccggccccgcgugagaaauaucccuucccggaucucuauuuacuggaccaucgucaaacccggggauauucugcugaucaacagcaccggaaaucucauugccccucgcggcuacuucaagaucagauccggaaagagcucuaucaugcgguccgacgcucccauugggaaauguaacagcgagugcaucacaccgaauggcucuauuccuaacgacaagcccuuucagaaugugaaccgcaucacguauggcgccuguccuagauacgugaaacaaaauacccugaaacuugcgacagggaugcggaacguccccgaaaaacagacccgcggaauuuucggcgccaucgcuggguuuaucgagaauggaugggaaggcaugguugaugggugguauggauucagacaccagaacagcgagggccggggccaagccgcugaccugaaguccacacaggccgccauugaucagaucaaugggaaacucaacagacugauuggaaagaccaacgagaaguuccaccagaucgaaaaagaguuuucugaaguggagggccgcauucaagaccuugaaaaguacguggaggauacgaaaaucgaccuguggagcuauaaugcugagcuccuggucgcgcuggaaaaccagcauacaauugaucucaccgacuccgagaugaauaagcuguucgaaaagaccaagaagcagcuucgggagaacgccgaagauauggggaauggaugcuuuaaaaucuaccacaagugugacaacgcuugcaucggcagcauuagaaaugggacauaugaucaugacguguaccgcgacgaggcccugaacaaucgguuccagaucaaaggcguugagcucaagucuggauacaaagauuggauucuguggaucuccuuugccauuagcugcuuccuucuguguguggcucuccugggcuuuaucaugugggccugccaaaaggggaacaucagauguaauauuugcaucuga

SEQ ID NO: 200809 - RNA, 1701 nt, Artificial Sequence; identical to SEQ ID NO: 195685
  derived and/or modified CDS sequence (opt5) from hemagglutinin__InfluenzaA__AFH74752

SEQ ID NO: 200810 - RNA, 1701 nt, Artificial Sequence; identical to SEQ ID NO: 195685
  derived and/or modified CDS sequence (opt5) from hemagglutinin__InfluenzaA__AFH74763

SEQ ID NO: 200811 - RNA, 1701 nt, Artificial Sequence; identical to SEQ ID NO: 195685
  derived and/or modified CDS sequence (opt5) from hemagglutinin__InfluenzaA__AFH74774

SEQ ID NO: 200812 - RNA, 1701 nt, Artificial Sequence; identical to SEQ ID NO: 199060
  derived and/or modified CDS sequence (opt5) from hemagglutinin__InfluenzaA__AFH74785

SEQ ID NO: 200813 - RNA, 1701 nt, Artificial Sequence; identical to SEQ ID NO: 195685
  derived and/or modified CDS sequence (opt5) from hemagglutinin__InfluenzaA__AFH74796

SEQ ID NO: 200814 - RNA, 1701 nt, Artificial Sequence; identical to SEQ ID NO: 200241
  derived and/or modified CDS sequence (opt5) from hemagglutinin__InfluenzaA__AFH74807

SEQ ID NO: 200815 - RNA, 1701 nt, Artificial Sequence; identical to SEQ ID NO: 200241
  derived and/or modified CDS sequence (opt5) from hemagglutinin__InfluenzaA__AFH74818

SEQ ID NO: 200816 - RNA, 1701 nt, Artificial Sequence; identical to SEQ ID NO: 200241
  derived and/or modified CDS sequence (opt5) from hemagglutinin__InfluenzaA__AFH74829

SEQ ID NO: 200817 - RNA, 1701 nt, Artificial Sequence; identical to SEQ ID NO: 200241
  derived and/or modified CDS sequence (opt5) from hemagglutinin__InfluenzaA__AFH74840

SEQ ID NO: 200818 - RNA, 1701 nt, Artificial Sequence
  derived and/or modified CDS sequence (opt5) from hemagglutinin__InfluenzaA__AFH74851
augaagaccaucauugcccugagcuacauccucugccugguguucgcucagaaacuucccggcaacgacaauuccacagccacgcugugucucgggcaccaugcggucccuaacggaaccauuguuaagacaaucaccaaugaucaaauugaggugacaaacgcuaccgaacuggugcagucuagcuccacaggcgagaucugcgacucuccgcaccagauccuugaugggaaaaauuguacccugauugacgcccuccugggagauccccagugcgacggcuuucaaaacaagaaaugggaucuguucgucgaaagaagcaaggccuaugggaauuguuacccuuaugacgugcccgauuacgcuucccuccggucucugguugccagcuccggaacgcuugaguuuaacaaugaaucuuucaacuggaccggcgugacacagaauggcaccucuuccgcuugcauccgcagaagcaagaacagcuuuuucucccggcugaauuggcucacacaucugaacuuuaaauauccugcccuuaaugucaccaugcccaacaacgagcaguucgacaagcuguacauuuggggagugcaccauccugggacggauaaagaccagaucuuucucuaugcgcaagccagcggccgcauuacaguuucuaccaagagaucccagcagacagcuaucccgaauauugggagccggccccgcgugagaaacaucccuucccggaucucuauuuacuggaccaucgucaaacccggagauauucugcugaucaauagcaccggcaaccucauugccccucgcggguacuucaagaucagauccggaaagagcucuaucaugcgguccgacgcucccauuggcaaauguaauagcgagugcaucacaccgaacggcucuauuccuaaugacaagcccuuucagaacgugaaucgcaucacguauggggccuguccuagauacgugaaacaaaacacccugcggcuugcgacaggaaugcgcaauguccccgaaaagcagaccagaggcauuuucggggccaucgcuggauuuaucgagaacggcugggaagggaugguugauggaugguauggcuuccggcaccagaauagcgagggcagagggcaagccgcugaccugaaauccacacaggccgccauugaucagaucaacggaaagcucaaucgccugauuggcaaaaccaacgagaaguuccaccagaucgaaaaggaguuuucugaaguggaggggcggauucaagaccuugaaaaauacguggaggauacgaagaucgaccuguggagcuauaacgcugagcuccuggucgcgcuggaaaaucagcauacaauugaucucaccgacuccgagaugaacaaacuguucgaaaagaccaaaaagcagcuuagagagaaugccgaagauaugggaaacggcugcuuuaagaucuaccacaaaugugacaaugcuugcaucgggagcauucgcaacggcacauaugaucaugacguguaccgggacgaggcccugaauaacagauuccagaucaagggaguugagcucaaaucuggcuacaaggauuggauucuguggaucuccuuugccauuagcugcuuccuucuguguguggcucuccugggguuuaucaugugggccugccaaaaaggaaauauccgcuguaacauuugcaucuga

SEQ ID NO: 200819 - RNA, 1701 nt, Artificial Sequence; identical to SEQ ID NO: 200244
  derived and/or modified CDS sequence (opt5) from hemagglutinin__InfluenzaA__AFH74862

SEQ ID NO: 200820 - RNA, 1701 nt, Artificial Sequence; identical to SEQ ID NO: 200244
  derived and/or modified CDS sequence (opt5) from hemagglutinin__InfluenzaA__AFH74873

SEQ ID NO: 200821 - RNA, 1701 nt, Artificial Sequence; identical to SEQ ID NO: 195685
  derived and/or modified CDS sequence (opt5) from hemagglutinin__InfluenzaA__AFH74884

SEQ ID NO: 200822 - RNA, 1701 nt, Artificial Sequence; identical to SEQ ID NO: 195685
  derived and/or modified CDS sequence (opt5) from hemagglutinin__InfluenzaA__AFH74895

SEQ ID NO: 200823 - RNA, 1701 nt, Artificial Sequence; identical to SEQ ID NO: 195685
  derived and/or modified CDS sequence (opt5) from hemagglutinin__InfluenzaA__AFH74906

SEQ ID NO: 200824 - RNA, 1701 nt, Artificial Sequence; identical to SEQ ID NO: 195483
  derived and/or modified CDS sequence (opt5) from hemagglutinin__InfluenzaA__AFH74917

SEQ ID NO: 200825 - RNA, 1701 nt, Artificial Sequence; identical to SEQ ID NO: 195685
  derived and/or modified CDS sequence (opt5) from hemagglutinin__InfluenzaA__AFH74928

SEQ ID NO: 200826 - RNA, 1701 nt, Artificial Sequence; identical to SEQ ID NO: 195685
  derived and/or modified CDS sequence (opt5) from hemagglutinin__InfluenzaA__AFH74939

SEQ ID NO: 200827 - RNA, 1701 nt, Artificial Sequence
  derived and/or modified CDS sequence (opt5) from hemagglutinin__InfluenzaA__AFH74950
augaagaccaucauugcccugagcuacauccucugccugguguucgcucagaaacuucccggcaacgacaauuccacagccacgcugugucucgggcaccaugcggucccuaacggaaccauuguuaagacaaucaccaaugaucaaauugaggugacaaacgcuaccgaacuggugcagucuagcuccacaggcgagaucugcgacucuccgcaccagauccuugaugggaaaaauuguacccugauugacgcccuccugggagauccccagugcgacggcuuucaaaacaagaaaugggaucuguucgucgaaagaagcaaggccuaugggaauuguuacccuuaugacgugcccgauuacgcuucccuccggucucugguugccagcuccggaacgcuugaguuuaacaaugaaucuuucaacuggaccggcgugacacagaauggcaccucuuccgcuugcauccgcagaagcaagaacagcuuuuucucccggcugaauuggcucacacaucugaacuuuaaauauccugcccuuaaugucaccaugcccaacaacgagcaguucgacaagcuguacauuuggggagugcaccauccugggacggauaaagaccagaucuuucucuaugcgcaagccagcggccgcauuacaguuucuaccaagagaucccagcagacagcuaucccgaauauugggagccggccccgcgugagaaacaucccuucccggaucucuauuuacuggaccaucgucaaacccggagauauucugcugaucaauagcaccggcaaccucauugccccucgcggguacuucaagaucagauccggaaagagcucuaucaugcgguccgacgcucccauuggcaaauguaauagcgagugcaucacaccgaacggcucuauuccuaaugacaagcccuuucagaacgugaaucgcaucacguauggggccuguccuagauacgugaaacaaaacacccugaaacuugcgacaggaaugcggaauguccccgaaaaacagacccgcggcauuuucggggccaucgcuggauuuaucgagaacggcugggaagggaugguugauggaugguauggcuucagacaccagaauagcgagggccgggggcaagccgcugaccugaaguccacacaggccgccauugaucagaucaacggaaaacucaauagacugauuggcaagaccaacgagaaguuccaccagaucgaaaaagaguuuucugaaguggaggggcgcauucaagaccuugaaaaguacguggaggauacgaaaaucgaccuguggagcuauaacgcugagcuccuggucgcgcuggaaaaucagcauacaauugaucucaccgacuccgagaugaacaagcuguucgaaaagaccaagaagcagcuucgggagaaugccgaagauaugggaaacggcugcuuuaaaaucuaccacaagugugacaaugcuugcaucgggagcauuagaaacggcacauaugaucaugacguguaccgcgacgaggcccugaauaaccgguuccagaucaaaggaguugagcucaagucuggcuacaaagauuggauucuguggaucuccuuugccauuagcugcuuccuucuguguguggcucuccugggguuuaucaugugggccugccaaaagggaaauaucagauguaacauuugcaucuga

SEQ ID NO: 200828 - RNA, 1701 nt, Artificial Sequence; identical to SEQ ID NO: 200244
  derived and/or modified CDS sequence (opt5) from hemagglutinin__InfluenzaA__AFH74961

SEQ ID NO: 200829 - RNA, 1701 nt, Artificial Sequence; identical to SEQ ID NO: 195685
  derived and/or modified CDS sequence (opt5) from hemagglutinin__InfluenzaA__AFH75388

SEQ ID NO: 200830 - RNA, 1701 nt, Artificial Sequence
  derived and/or modified CDS sequence (opt5) from hemagglutinin__InfluenzaA__AFH97140
augaaggccauccuggugguccuccuguacauuuucgcuaccgccaacgcggacacacuuugcaucggcuaucacgcuaauaacagcacggauaccguugacacagugcuggagaagaaugugaccgucacacauuccgugaaccuccuggaagauaagcacaaugggaaacuuuguaagcugagaggaguugcuccccuccaucugggcaaaugcaacauugccggguggauccugggaaauccugagugugaaucucucagcaccgccuccucuuggagcuacauuguggagacauccucuagcgacaacggaaccugcuauccgggggauuuuaucgacuacgaagaacugcgggagcagcuuuccagcgucucuuccuucgaacgcuuugagaucuuccccaagacgagcucuuggccuaaucacgauuccaacaagggagugaccgccgcuuguccccaugccggcgcgaaaucuuuuuauaagaaucugauuuggcucguuaaaaagggcaacagcuacccuaaacuguccaagagcuauaucaaugacaaggggaaagaagugcuuguccuguggggcauucaccaccccuccacaucugccgaucaacagagccucuaccagaacgcugacgccuacguguucgugggcaccuccagauauagcaagaaauuuaagccugagaucgcuauucggccgaaaguccgcgaucaggaggggagaaugaauuacuauuggacacugguugaacccggagacaagaucaccuucgaggccacgggcaaccugguggugccucgguacgcguuugccauggaacgcaacgcugggucuggaauuaucaucuccgauacacccguccaugacugcaauaccacaugucaaaccccuaaaggcgccauuaacaccagccuccccuuccagaauauccacccgauuacaaucggcaagugcccuaaguaugugaaaucuacgaagcugagacuugcuaccgggcugcggaacguucccagcauucagucccgcggacucuuuggcgccaucgccggguucaucgagggaggcuggacagggaugguggacggaugguacggcuaucaucaccagaaugaacaaggcucuggguacgcugcggaucugaaaagcacccagaacgccauugacgagaucacaaauaaggucaacuccgugauugagaaaaugaauacccaguuuacggcuguuggaaaggaguucaaccaccuugagaagagaaucgaaaaucugaacaaaaagguggaugacggcuuccucgauauuuggacauacaaugccgagcugcugguccuccuggaaaacgagcggacccuugacuaucaugauagcaaugugaaaaaccuguacgagaagguccgcucucagcucaaaaacaaugccaaggaaaucgggaacggauguuuugaguucuaucacaagugcgacaauaccuguauggaauccgugaaaaacggcacauacgauuauccuaaguacagcgaggaagcuaaacugaauagagaggagaucgacgggguuaaacuugaaucuacccggauuuaucaaauccuggccauuuacuccacaguggcgagcucccucguccuggugguuucucugggcgcuaucagcuuuuggaugugcuccaacggaucucuccagugccgcauuuguaucuga

SEQ ID NO: 200831 - RNA, 1701 nt, Artificial Sequence
  derived and/or modified CDS sequence (opt5) from hemagglutinin__InfluenzaA__AFJ05142
augaagaccaucauugcccugagcuacauccucugccugguguucgcucagaaaauucccggcaacgacaauuccacagccacgcuuugucuggggcaccaugcggucccuaacggaaccaucguuaagacaauuaccaaugaucaaaucgaggugacaaacgcuaccgaacucgugcagucuagcuccacaggcgagaucugcgacucuccgcaccagauucuggauggggaaaauuguacccuuaucgacgcccugcucggagauccccagugcgacggcuuucaaaacaaaaagugggaucuguucgucgagagaagcaaagccuauuccaauuguuacccuuaugacgugcccgauuacgcuucucugcggagccucguugccuccagcgggacgcuggaauuuaacaaugagugcuucaacuggaccggagugacacagaauggcaccucuuccgcuuguauucgcagaagcaacucuuccuuuuucagccggcuuaauuggcugacacaucucaacuuuaaguauccugcccugaaugucaccaugcccaacaacgagcaguucgacaaacuuuacaucuggggcgugcaccauccugggacggauaaagaccagauuuuucuguaugcgcaaucuuccggacgcaucacaguuagcaccaagagaucccagcaggccgugauuccgaauaucggcucucggccccgcaucagaaacauuccuagccggaucuccauuuacuggacaaucgucaaacccggggauauucuccugaucaauagcaccggaaaccugaucgcuccucgcggcuacuucaagauuagaucugggaaauccagcaucaugcggucugacgcccccauuggaaagugcaauagcggcuguaucaccccgaacggcuccauuccuaaugacaagcccuuucagaacgugaaucgcaucacauauggggcuugcccuagauacgugaaacaaucuacgcucaagcuggccaccggaaugcggaacguccccgaaaaacagacacgcggcaucuucggggcgauugccggauuuaucgagaauggcugggaagggaugguugauggaugguauggcuucagacaccagaacagcgagggccgggggcaagcugccgaccuuaaguccacccaggcugccauugaucagaucaauggaaaacugaacagacucauuggcaagacaaaugagaaauuccaccagaucgaaaaggaguuuagcgaaguggaggggcgcauucaagaccuggaaaaguacguggaggauaccaaaaucgaccuuuggucuuauaacgccgagcugcucgucgcucuggaaaaccagcauacgaucgaucugacagacuccgagaugaauaaacucuucgaaaagaccaagaagcagcugcgggagaacgcggaagauaugggaaauggcuguuuuaagauuuaccacaagugcgacaacgccugcaucgggagcauuagaaauggcaccuauaaccaugauguguaccgcgacgaggcucuuaauaaccgguuccagaucaaaggaguugagcugaagucuggcuacaaagacuggauucucuggaucuccuuugccaucagcuguuuccugcuuugcguggcccugcucggguuuauuaugugggcuugucaaaagggaaauaucagaugcaacauuuguaucuga

SEQ ID NO: 200832 - RNA, 1701 nt, Artificial Sequence
  derived and/or modified CDS sequence (opt5) from hemagglutinin__InfluenzaA__AFJ05144
augaagaccaucauugcccugagcuacauccucugccugguguucgcucagaaacuucccggcaacgacaauuccacagccacgcugugucucgggcaccaugcggucccuaacggaaccauuguuaagacaaucaccaaugaucaaauugaggugacaaacgcuaccgaacuggugcagucuagcuccacaggcgagaucugcgacucuccgcaccagauccuugauggggaaaauuguacccugauugacgcccuccugggagauccccagugcgacggcuuucaaaacaaaaagugggaucuguucgucgagagaagcaaagccuauuccaauuguuacccuuaugacgugcccgauuacgcuucucuccggagccugguugccuccagcgggacgcuugaauuuaacaaugagucuuucaacuggaccggagugacacagaauggcaccuccagcgcuugcauccgcagaucuaacuccagcuuuuucucucggcugaauuggcucacacaucugaacuuuaaguauccugcccuuaaugucaccaugcccaacaacgagcaguucgacaagcuguacauuuggggcgugcaccauccugggacggauaaagaccagaucuuucucuaugcgcaauccagcggacgcauuacaguuuccaccaagagaucucagcaggccgugaucccgaauauuggcagccggccccgcgucagaaacaucccuucccggaucagcauuuacuggacaaucgugaaacccggggauauucugcugaucaauucuaccggaaaccucauugcuccucgcggcuacuucaagaucagauccgggaaaagcucuaucaugcggagcgacgcccccauuggaaaguguaauuccgaaugcaucaccccgaacggcucuauuccuaaugacaagcccuuucagaacgugaaucgcaucacauauggcgcuuguccuagauacgucaaacaaagcacgcugaagcuggccaccgggaugcggaacguucccgagaaacagacacgcggaauuuucggcgcgaucgccggguuuaucgaaaauggaugggagggcaugguggaugggugguauggauucagacaccagaacuccgagggccggggccaagcugccgaccuuaagagcacccaggcugccauugaucagaucaaugggaaacucaacagacugauuggaaagacaaaugaaaaauuccaccagaucgagaaggaauuuucugagguggaaggccgcauucaagaccuugagaaguacgucgaggauaccaaaaucgaccugugguccuauaacgccgaacuccugguggcucuggagaaccagcauacgauugaucucacagacagcgaaaugaauaagcuguucgagaaaaccaagaaacagcuucgggaaaacgcggaggauauggggaauggaugcuuuaagaucuaccacaagugugacaacgccugcaucggcucuauuagaaaugggaccuauaaccaugauguuuaccgcgacgaggcucugaauaaccgguuccagaucaaaggcguggaacucaaguccggauacaaagacuggauucuguggaucagcuuugccauuuccugcuuccuucugugugucgcccuccugggcuuuaucaugugggcuugccaaaaggggaauaucagauguaacauuugcaucuga

SEQ ID NO: 200833 - RNA, 1701 nt, Artificial Sequence
  derived and/or modified CDS sequence (opt5) from hemagglutinin__InfluenzaA__AFJ11706
augaagaccaucauugcccugagcuacauccucugccugguguucgcucagaaacuucccggcaacgacaauuccacagccacgcugugucucgggcaccaugcggucccuaacggaaccauuguuaagacaaucaccaaugaucaaauugaggugacaaacgcuaccgaacuggugcagucuagcuccacaggcgagaucugcgacucuccgcaccagauccuugauggggaaaauuguacccugauugacgcccuccugggagauccccagugcgacggcuuucaaaacaaaaagugggaucuguucgucgagagaagcaaagccuauuccaauuguuacccuuaugacgugcccgauuacgcuucucuccggagccugguugccuccagcgggacgcuugaauuuaacaaugagucuuucaacuggaccggagugacacagaauggcaccuccagcgcuugcaucagaucuuccaacaauagcuuuuucucuagacugaacuggcucacacaucugaauuuuaaguauccugcccuuaacgucaccaugcccaacaaugagcaguucgacaagcuguacauuuggggcgugcaccauccugggacggauaaagaccagaucuuucucuaugcgcaagccuccggacggauuacaguuagcaccaagcgcucccagcaggcugugaucccgaacauuggcucuagaccccggguccgcaauaucccuagcagaaucuccauuuacuggacaaucgugaaacccggggauauucugcugaucaacagcaccggaaaucucauugccccucggggcuacuucaagauccgcucugggaaauccagcaucaugagaucugacgcucccauuggaaaguguaacagcgaaugcaucaccccgaauggcuccauuccuaacgacaagcccuuucagaaugugaaccggaucacauauggcgccuguccucgcuacgucaaacaaucuacgcugaaacuugcgaccgggaugagaaauguucccgagaagcagacacggggaauuuucggcgccaucgcuggguuuaucgaaaacggaugggagggcaugguggaugggugguauggauuccgccaccagaauagcgagggcagaggccaagccgcugaccugaaguccacccaggccgccauugaucagaucaacgggaaacucaaucggcugauuggaaagacaaacgaaaaauuccaccagaucgagaaggaauuuagcgagguggaaggccgcauucaagaccuugagaaguacgucgaggauaccaaaaucgaccuguggucuuauaacgcugaacuccugguggcgcuggagaaucagcauacgauugaucucacagacuccgaaaugaacaagcuguucgagaaaaccaagaaacagcuucgcgaaaaugccgaggauauggggaacggaugcuuuaccaucuaccacaagugugacaaugcuugcaucggcagcauucggaacgggacauaugaucauaauguuuacagagacgaggcccugaacaaucgcuuccagaucaagggcguggaacucaaaucuggauacaaggacuggauucuguggaucuccuuugccauuagcugcuuccuucugugugucgcucuccugggcuuuaucaugugggccugccaaaaagggaacauccgguguaauauuugcaucuga

SEQ ID NO: 200834 - RNA, 1701 nt, Artificial Sequence; identical to SEQ ID NO: 199054
  derived and/or modified CDS sequence (opt5) from hemagglutinin__InfluenzaA__AFJ11728

SEQ ID NO: 200835 - RNA, 1701 nt, Artificial Sequence
  derived and/or modified CDS sequence (opt5) from hemagglutinin__InfluenzaA__AFJ19842
augaagaccaucauugcccugagcuacauccucugccugguguucgcucagaaacuucccggcaacgacaauuccacagccacgcugugucucgggcaccaugcggucccuaacggaaccauuguuaagacaaucaccaaugaucaaauugaggugacaaacgcuaccgaacuggugcagucuagcuccgccggcgagaucugcgacucuccgcaccauauccuugauggggaaaauuguacacugauugacgcccuccugggagauccccagugcgacggcuuucagaacaaaaagugggaucuguucgucgagagaagccgggcuuauuccaauuguuacccuuaugacgugcccgauuacgccucucuccgcagccugguugcuuccagcgggacccuugaauuuaacaaugagucuuucaacuggacgggagugacccaaaauggcacauccagcgccugcaucagacggucuaacaauuccuuuuucagccgccugaacuggcucacccaccugaauuuuaaauauccugcgcuuaacgucacaaugcccaacaaugagcaguucgacaagcuguacauuuggggcgugcaucacccugggaccgauaaggaccagaucuuucucuaugcccaggcuucuggaagaauuacgguuuccacaaaacggagccaacaggccgugaucccgaacauuggcucccgccccagaguccggaauaucccuucucgcaucagcauuuacuggaccaucgugaagcccggggauauucugcugaucaacuccacaggaaaucucauugcuccuagaggcuacuucaaaauccggagcgggaagucuuccaucaugcgcagcgacgcccccauuggaaaauguaacucugaaugcaucaccccgaauggcagcauuccuaacgacaagcccuuucagaaugugaacagaaucaccuauggcgcguguccucgguacgucaagcaguccacacugaaacuugccacggggaugcgcaauguucccgagaagcaaaccagaggaauuuucggcgcuaucgccggguuuaucgaaaacggaugggagggcaugauggaugggugguauggauuccggcaccaaaauucugagggcagaggccaggcugccgaccugaaaagcacacaggccgcuauugaucagaucaacgggaagcucaaucgccugauuggaaaaaccaacgaaaaguuccaucagaucgagaaagaauuuuccgagguggaaggccggauucaggaccuugagaaguacguggaggauacaaagaucgaccuguggagcuauaacgcggaacuccuggucgcccuggagaaucaacacaccauugaucucacggacucugaaaugaacaaacuguucgagaagaccaaaaagcagcuuagagaaaaugcugaggauauggggaacggaugcuuuaaaaucuaccauaagugugacaaugccugcaucggcuccauucgcaacgggacauaugaucacgacguguaccgggacgaggcccugaauaacagauuccagaucaagggcauugaacucaaaagcggauacaaggauuggauccuguggauuucuuuugcuaucuccugcuuccuucuguguguugcccuccugggcuuuaucaugugggcgugccagaaagggaauauucgcuguaacaucugcauuuga

SEQ ID NO: 200836 - RNA, 1701 nt, Artificial Sequence; identical to SEQ ID NO: 200433
  derived and/or modified CDS sequence (opt5) from hemagglutinin__InfluenzaA__AFJ20171

SEQ ID NO: 200837 - RNA, 1701 nt, Artificial Sequence; identical to SEQ ID NO: 199054
  derived and/or modified CDS sequence (opt5) from hemagglutinin__InfluenzaA__AFJ20182

SEQ ID NO: 200838 - RNA, 1701 nt, Artificial Sequence
  derived and/or modified CDS sequence (opt5) from hemagglutinin__InfluenzaA__AFJ74386
augaaggccaaacugcucgugcugcuuugcgcuuucaccgccacauacgcggacacgaucuguauuggcuaucacgcuaacaauagcaccgauacagucgacaccguucuggagaagaacgugacagugacccauuccgucaaucuccuggaagauucucacaacgggaaacuuugcagacugaagggaacagcuccccuccagcugggcaauuguagcguggccggguggauccugggaaacccugagugcgaaucccucuuuucuaaagagagcugguccuacauugccgaaaccccgaaucccgagaacggcacguguuauccuggguacuucgccgacuaugaggaacugcgggagcaacuuucuagcguuuccagcuuugaacgcuucgagaucuuucccaaggagucuuccuggccuaaucauaccgugacaaagggagucaccgcuagcugcucucacaacggcaaauccagcuucuacaagaaucugcucuggcugacagaaaagaacggccuuuaucccaaucugucuaaguccuacgugaacaauaaagagaaggaaguucucgugcuguggggaguccaucacccuagcaacauuggggaucagagagccaucuaccacaccgagaacgcguauguguccgugaugucuagccauuacucccggcgcuuuacgccggaaaucgccaagagacccaaaguccgggaccaggagggccgcauuaauuauuacuggacacugcucgagccuggggauaccaucauuuucgaagcuaacggaaaucugaucgcccccugguaugcuuuugcccuuagcagaggcuucgggucuggaauuaucacauccaacgcgagcaugggcgagugugacgccaagugccagaccccucaaggcgcuauuaauucuagccugcccuuucagaacguucacccggugaccaucggggaauguccuaaauacgugcgguccacaaagcuccgcauggucacgggacugagaaauauccccucuauucagagccggggccuuuucggggccaucgcuggauuuauugagggcggguggaccggaaugaucgauggcugguauggcuaccaucaccagaacgaacaaggguccggauacgccgccgaccagaaaagcacacagaaugcuauugauggcaucaccaacaagguuaauucugugaucgagaaaaugaacacacaguucaccgcgguggggaaggaguucaauaagcuggaacgcagaauggagaaccucaauaaaaaggucgacgauggauuucuggacauuuggacguauaacgccgaacugcucgugcugcuugagaacgaacggacacuggacuuccacgauuccaauguuaaaaaccucuacgagaaggugaaaaaucaacugaagaacaaugcuaaggagaucggcaacgggugcuuugaguucuaucauaaauguaauaacgaaugcauggaaagcgucaagaauggcaccuacgacuauccuaaauacucuggagaguccaaacuuaaccgcgagaaaauugauggcgugaagcuggaaagcaugggggucuaucagauccucgccauuuacuccaccguggccucuagccugguucugcucgugucccugggagcuaucucuuuuuggaugugcagcaauggcucccuucaguguagaaucugcauuuga

SEQ ID NO: 200839 - RNA, 1701 nt, Artificial Sequence
  derived and/or modified CDS sequence (opt5) from hemagglutinin__InfluenzaA__AFJ74407
augaagaccaucauugcccugagcuacauccucugccugguguucgcucagaaacuucccggcaacgacaauuccacagccacgcugugucucgggcaccaugcggucccuaacggaacccugguuaagacaauuaccaaugaucaaaucgaggugacaaacgcuaccgaacuugugcagucuagcuccacaggcagaauuugcgacucuccgcaccggauccuggaugggaaaaauuguacccucaucgacgcccugcugggagauccccauugcgacggcuuucagaacaaggagugggaucucuucgucgaacgcagcaaagccuauuccaauuguuacccuuaugacgugcccgauuacgcuucucugagaagccuuguugccuccagcgggacgcuggaguuuaccaacgaaggauucaauuggacaggcguggcucaggacggcaccucuuaugccugcaagcggggguccgucaagagcuuuuucucucgccucaacuggcugcacaaacuugaguacaaguauccugcgcugaaugugacaaugcccaacaaugauaaauuugacaagcucuacauuuggggaguucaucacccuuccaccgauagcgaccaaacgucucuguacgugcaggccuccggcagagucacagugagcaccaaacggucccagcagacagugaucccgaacauugggucucgccccugggucagaggaguuagcucccggaucagcauuuauuggaccaucgugaagccuggcgacauucugcucaucaauucuaccgggaaccugaucgcuccccgcggauacuucaagauuagauccggcaaaagcucuaucaugcggagcgaugccccuauuggcaacuguuccucugagugcaucacacccaaugggagcauuccgaacgacaagccuuuucaaaaugugaaccgcaucacguauggagcuugucccagauacgucaaacagaauacccuuaagcuggccacaggcaugcggaacgugccugaaaaacagacccgcgggaucuucggagcgauugccggcuuuaucgagaaugggugggaaggaaugguugauggcugguauggcuucagacaccagaacuccgaggggacaggacaagcugccgaccucaagagcacccaggcugccauuaaucagaucaacggcaaacugaaucggcuuauugagaagacgaacgaaaaguuucaucaaaucgagaaagaguucucugaaguggaagggagaauccaggaucuggagaaguacgucgaggacacaaaaauugaucucugguccuauaaugccgaacugcugguggcucucgagaaccagcacaccaucgaccugaccgauagcgaaaugaauaaacuuuucgagcgcacacggaagcagcugagagaaaacgcggaggacaugggaaacggcugcuuuaagauuuaccauaagugugauaaugccugcaucgggucuauucgcaacggcaccuacgaccacgacguuuaucgggaugaggcucucaauaacagauuccaaaucaaaggaguggaacugaaguccggcuacaaagacuggauucuuuggaucagcuuugccaucuccugcuuccugcucugugucgugcugcugggguuuauuaugugggccugccagaagggaaauauccgcuguaacauuugcaucuga

SEQ ID NO: 200840 - RNA, 1701 nt, Artificial Sequence
  derived and/or modified CDS sequence (opt5) from hemagglutinin__InfluenzaA__AFJ74418
augaagaccaucauugcccugagcuacauccucugccugguguucgcucagaaacuucccggcaacgacaauuccacagccacgcugugucucgggcaccaugcggucccuaacggaacccugguuaagacaauuaccaaugaucaaaucgaggugacaaacgcuaccgaacuugugcagucuagcuccacaggcagaauuugcgacucuccgcaccagauccuggauggggagaauuguacccucaucgacgcccugcugggagauccccauugcgacggcuuucagaacaaagaaugggaucucuucgucgagcggagcaaggccuauuccaauuguuacccuuaugacgugcccgauuacgcuucucugcgcagccuuguugccuccagcgggacgcuggaauuuaacaaugagucuuucaacuggaccggaguggcucaaaauggcacauccagcgccugcaaaagacggucuauuaaguccuuuuucagccgccucaacuggcugcaccagcuuaaguauaaauacccugcgcugaaugucaccaugcccaacaaugagaaguuugacaaacucuauaucuggggcgugcaucacccuucuacagauuccgaccagauuagccuguacgcccaggcuuccgggagaguuaccgugucuacgaagcggagccaacagacagucaucccgaacauuggaucccgccccugggugagaggcgugagcucucggaucuccauuuacuggaccaucgucaaaccuggggauauccugcucauuaacagcacaggaaaucugaucgcuccccgcggcuauuucaagauuagaucuggaaagagcuccaucaugcggucugacgccccuauugggaaauguaacagcgaaugcaucacccccaauggcuccaucccgaacgacaagccuuuucagaauguuaaccgcauuaccuacggcgccugucccagauaugugaaacagaauacacuuaagcuggcgacggggaugcggaacgugccugagaaacaaacccgcggaaucuucggcgccauugcuggguuuaucgaaaauggaugggagggcauggucgaugggugguacggauucagacaccagaacagcgagggcacaggccaggccgcugaccucaagucuacccaagccgccauuaaucagaucaacgggaaacugaaucggcuuaucgaaaagacaaacgagaaguuucaucagauugaaaaagaguucuccgaaguggagggaagaauccaggaucuggagaaguauguugaagacaccaaaauugaucucuggagcuacaaugcugagcugcugguggcgcucgaaaaccaacacacgaucgaccugacagauucugagaugaacaaacuuuucgaacgcaccaagaagcagcugcgggagaaugccgaggacaugggcaacgggugcuuuaagauuuaucauaaaugugauaaugcuugcaucggauccauuagaaacggcaccuacgaccacgaugucuaccgcgacgaagcccucaauaaccgguuccagaucaaggggguggagcugaaaagcggcuauaaggacuggauccuuuggauuuccuuugccaucucuugcuuccugcucuguguugugcugcugggauuuauuaugugggcuugccagaaaggcaauaucagauguaacauuugcaucuga

SEQ ID NO: 200841 - RNA, 1701 nt, Artificial Sequence
  derived and/or modified CDS sequence (opt5) from hemagglutinin__InfluenzaA__AFJ74437
augaagaccaucauugcccugagcuacauccucugcaaaguguucgcucagaagcugcccggcaacgacaauuccacagccacgcuuugucuggggcaccaugcggucccuaacggaacccucguuaaaacaauuaccaaugaucaaaucgaggugacaaacgcuaccgaacuggugcagucuagcuccacaggcagaauuugcgacucuccgcaccagauccuugauggggagaauuguacccugaucgacgcccuccugggagauccccauugcgacggcuuucagaacaaggaaugggaucuguucgucgagcggagcaaagccuauuccaauuguuacccuuaugacgugcccgauuacgcuucucuccgcagccugguugccuccagcgggacgcuugaauuuaacaaugagucuuucaacuggaccggaguggcucaaaauggcacauccagcgccugcaagagacggucuauuaaguccuuuuucagccgccugaacuggcuccaccagcugaaauauaaguacccugcgcuuaaugucaccaugcccaacaaugagaaauuugacaagcuguauaucuggggcgugcaucacccuucuacagauuccgaccagauuagccucuacgcccaggcuuccgggagaguuaccgugucuacgaaacggagccaacagacagucaucccgaacauuggaucccgccccugggugagaggcgugagcucucggaucuccauuuacuggaccaucgucaagccuggggauauccugcugauuaacagcacaggaaaucucaucgcuccccgcggcuauuucaagauuagaucugggaaaagcuccaucaugcggucugacgccccuauuggaaaguguaacagcgaaugcaucacccccaauggcuccaucccgaacgacaaaccuuuucagaauguuaaccgcauuaccuacggcgccugucccagauaugugaagcagaauacacugaaacuugcgacggggaugcggaacgugccugagaagcaaacccgcggaaucuucggcgccauugcuggguuuaucgaaaauggaugggagggcauggucgaugggugguacggauucagacaccagaacagcgagggcacaggccaggccgcugaccugaaaucuacccaagccgccauuaaucagaucaacgggaagcucaaucggcugaucgaaaagacaaacgagaaauuucaucagauugaaaaggaguucuccgaaguggagggaagaauccaggaucuugagaaauauguugaagacaccaagauugaucuguggagcuacaaugcugagcuccugguggcgcuggaaaaccaacacacgaucgaccucacagauucugagaugaacaaacuguucgaacgcaccaagaagcagcuucgggagaaugccgaggacaugggcaacgggugcuuuaaaauuuaucauaagugugauaaugcuugcaucggauccauuagaaacggcaccuacgaccacgaugucuaccgcgacgaagcccugaauaaccgguuccagaucaaagggguggagcucaagagcggcuauaaagacuggauccuguggauuuccuuugccaucucuugcuuccuucuguguguugugcuccugggauuuauuaugugggcuugccagaagggcaauaucagauguaacauuugcaucuga

SEQ ID NO: 200842 - RNA, 1701 nt, Artificial Sequence
  derived and/or modified CDS sequence (opt5) from hemagglutinin__InfluenzaA__AFJ74448
augaagaccaucauugcccugagcuacauccucugccugguguucgcucagaaacuucccggcaacgacaauuccacagccacgcugugucucgggcaccaugcggucccuaacggaacccugguuaagacaauuaccaaugaucaaaucgaggugacaaacgcuaccgaacuugugcagucuagcuccacaggcagaauuugcgacucuccgcaccagauccuggauggggagaauuguacccucaucgacgcccugcugggaggcccccauugcgauggguuucagaacaaagaaugggaccucuucgucgagcggagcaaggccuauuccaauuguuacccuuaugaugugcccgacuacgcuucucugcgcagccuuguugccuccagcggaacgcuggaauuuaacaaugagucuuucaacuggaccggcguggcucaaaauggcacauccagcgccugcaaaagacggucuaacaaguccuuuuucagccgccucaauuggcugcaccagcuuaaguauaaauacccugcgcugaacgucaccaugcccaauaacgagaaguuugauaaacucuauauuuggggagugcaucacccuucuacagacuccgaucagaucagccuguacgcccaggcuuccgggagaguuaccgugucuacgaagcggagccaacagacagucauuccgaacaucggcucccgccccugggugagaggggugagcucucggauuuccaucuacuggaccauugucaaaccuggagacauccugcucaucaauagcacaggcaaccugauugcccccagaggguauuucaagaucagaucuggaaagagcuccauuaugcggucugaugcuccuaucggcaaauguaauagcgaaugcauuacccccaacggcuccaucccgaaugacaagccuuuucagaacguuaaucgcaucaccuacggggccugucccagauaugugaaacagaacacacuuaagcuggcgacgggaaugcggaaugugccugagaaacaaacccgcggcauuuucggggccaucgcuggauuuauugaaaacggcugggaggggauggucgacggaugguacggcuucagacaccagaauagcgagggcacagggcaggccgcugaucucaagucuacccaagccgccaucaaccagauuaauggaaaacugaaccggcuuaucgaaaagacaaaugagaaguuucaucagaucgaaaaagaguucuccgaaguggagggccgcauucaggaccuggagaaguauguugaagauaccaaaaucgaccucuggagcuacaacgcugagcugcugguggcgcucgaaaaccaacacacgauugaucugacagacucugagaugaauaaacuuuucgaacgcaccaagaagcagcugcgggagaacgccgaggauauggggaauggaugcuuuaagaucuaucauaaaugugacaacgcuugcauuggcuccaucagaaaugggaccuacgaucacgacgucuaccgcgaugaagcccucaacaaucgguuccagauuaagggcguggagcugaaaagcggauauaaggacuggauccuuuggaucuccuuugccauuucuugcuuccugcucuguguugugcugcugggcuuuaucaugugggcuugccagaaagggaacauuagauguaauaucugcauuuga

SEQ ID NO: 200843 - RNA, 1701 nt, Artificial Sequence
  derived and/or modified CDS sequence (opt5) from hemagglutinin__InfluenzaA__AFJ74459
auggaggccaagcugcucgugcugcuuugcgcuuucaccgccacauacgcggacacgaucuguauuggcuaucacgcuaacaauagcaccgauacagucgacaccguucuggaaaagaacgugacagugacccauuccgucaaucuccuggaggauucucacaacgggaaacuuugcagacugaaaggaacagcuccccuccagcugggcaauuguagcaucgccggguggauucugggaaacccugaaugcgagucccucuuuucuaaggaaagcugguccuacaucgccgagaccccgaaucccgagaacggcacguguuauccuggguacuucgccgacuaugaggaacugcgggaacaacuuucuagcguguccagcuuugagcgcuucgagauuuuucccaaagaaucuuccuggccuaaucauaccguuacaaagggagugaccgcuagcugcucucacaacggcaaguccagcuucuacaaaaaucugcucuggcugacagagaagaacggccuuuaucccaaucugucuaaauccuacgucaacaauaaggaaaaagaggugcucguucuguggggagugcaucacccuagcaacaucggggaucagagagccaucuaccacaccgaaaacgcguaugucuccguggugucuagccauuacucccggcgcuuuacgccggagauugccaagagacccaagguccggaaucaggagggccgcaucaacuauuacuggacacugcucgaaccuggggacaccauuaucuucgaggcuaauggaaaccugauugcccccugguaugcuuuugcccuuagcagaggcuucgggucuggaaucauuacauccaaugcgagcaugggcgaaugugaugccaaaugccagaccccucaaggcgcuaucaacucuagccugcccuuucagaauguucacccggugaccaucggggaguguccuaaguacgugcgguccacaaaacuccgcauggucacgggacugagaaacauucccucuauccagagccggggccuuuucggggccauugcuggauuuaucgaaggcggguggaccggaaugauugacggcugguauggcuaccaucaccagaaugagcaaggguccggauacgccgccgaucaaaagagcacacagaacgcuaucaauggcaucaccaacaaaguuaauucuauuaucgagaagaugaacacacaguucaccgcgguggggaaagaguucaauaagcuggaacgcagaauggaaaaccucaacaagaaaguggacgauggauuucuggacauuuggacguauaaugccgagcugcucguccugcuugaaaacgagcggacacuggauuuccacgacuccaaugugaagaaccucuacgagaaaguuaagaaucagcugaaaaacaaugcuaaggaaaucggcaacgggugcuuugaguucuaucauaaguguaauaacgaaugcauggagagcgugaaaaauggcaccuacgacuauccuaaguacucuaaagaguccaaacuuaaccgcgaaaagauugauggagucaagcuggagagcaugggcguguaucagauccucgccaucuacuccaccgucgccucuagccuggugcugcucguuucccugggggcuauuucuuuuuggaugugcagcaauggaucccuucaguguagaaucugcauuuga

SEQ ID NO: 200844 - RNA, 1701 nt, Artificial Sequence
  derived and/or modified CDS sequence (opt5) from hemagglutinin__InfluenzaA__AFJ74470
augaagaccaucauugcccugagcuacauccucugccugguguucgcucagaaacuucccggcaacgacaauuccacagccacgcugugucucgggcaccaugcggucccuaacggaacccugguuaagacaauuaccaaugaucaaaucgaggugacaaacgcuaccgaacuugugcagucuagcuccacaggcagaauuugcgacucuccgcaccggauccuggaugggaaaaauuguacccucaucgacgcccugcugggagauccccauugcgacggcuuucagaacaaggagugggaucucuucgucgaacgcagcaaagccuauuccaauuguuacccuuaugacgugcccgauuacgcuucucugagaagccuuguugccuccagcgggacgcuggaguuuaacaaugaaucuuucaacuggaccggaguggcucagaauggcacauccuaugccugcaagcggcgcagcgucaagucuuucuucuccagacucaacuggcugcacaaacuugaguacaaguauccugcgcugaaugugaccaugcccaacaaugacaaauuugauaagcucuacauuuggggcguucaucacccuagcacagacucugaucaaaucucccuguacgcccagaccagcgggcgggugacggucuccacaaaacgcucucagcagaccgugauuccgaacaucggaagcagacccugggugcggggcgucuccagccgcauuucuaucuauuggacaauuguuaagccuggggacauccugcucaucaacuccaccggaaaucugauugcucccagaggcuacuucaagauccggagcgggaaaucuagcauuaugcgcuccgacgccccuaucggaaacuguucuagcgagugcauuacccccaauggcuccaucccgaacgauaagccuuuucaaaaugugaacagaaucacauauggcgcuuguccccgguacgugaaacagaauacgcuuaagcuggccaccgggaugcgcaacgucccugaaaaacagacaagaggaauuuucggcgcgaucgccggguuuauugagaauggaugggaaggcaugguggacgggugguauggauuccggcaccagaacagcgagggcaccggccaagcugccgaucucaagucuacacaggcugccaucaaucagauuaacgggaaacugaauagacuuaucgagaagaccaacgaaaaguuucaucaaaucgagaaagaauuuuccgagguugaaggacgcauucaggaccuggagaaguacguggaggauacgaaaaucgaccucuggagcuauaaugccgaacugcuggucgcucucgagaaccagcacacaauugaucugaccgacucugaaaugaacaagcuguucgagcggaccagaaaacagcugcgcgaaaaugcggaggauaugggcaacgggugcuuuaagaucuaccauaagugugacaaugccugcauuggauccauccggaacggcacauacaaucacgauguguauagagacgaggcucucaacaaucgcuuccaaauuaaagggguugaacuuaagagcggcuacaaagacuggauccuuuggaucuccuuugccauuucuugcuuccugcucugugugguccugcugggauuuaucaugugggccugccagaagggcaacauucgguguaauaucugcauuuga

SEQ ID NO: 200845 - RNA, 1701 nt, Artificial Sequence
  derived and/or modified CDS sequence (opt5) from hemagglutinin__InfluenzaA__AFJ74492
augaagaccaucauugcccugagcuacauccucugccugguguucgcucagaaacuucccggcaacgacaauuccacagccacgcugugucucgggcaccaugcggucccuaacggaacccugguuaagacaauuaccaaugaucaaaucgaggugacaaacgcuaccgaacuugugcagucuagcuccacaggcagaauuugcgacucuccgcaccagauccuggauggggagaauuguacccucaucgacgcccugcugggagauccccauugcgacggcuuucagaacaaagaaugggaucucuucgucgagcggagcaaggccuauuccaauuguuacccuuaugacgugcccgauuacgcuucucugcgcagccuuguugccuccagcgggacgcuggaauuuaacaaugagucuuucaacuggaccggaguggcucaaaauggcacauccagcgccugcaaaagacggucuaacaaguccuuuuucagccgccucaauuggcugcaccagcuuaaguauaaauacccugcgcugaacgucaccaugcccaauaacaagaaauuugacaagcucuauauuuggggcgugcaucacccuucuacagauuccgaccagaucagccuguacgcccaggcuuccgggagaguuaccgugucuacgaaacggagccaacagacagucauuccgaacaucggaucccgccccugggugagaggcgugagcucuauuaucuccauuuacuggaccaucgucaagccuggggauauccugcucauuaauagcacaggaaaccugaucgcuccccggggcuauuucaagauucgcaaugggaaaucuagcaucaugagauccgacgccccuauuggaaaguguaacucugagugcaucacccccaauggcagcaucccgaacgacaaaccuuuucagaauguuaaccggauuaccuacggcgccuguccccgcuaugugaagcagaauacacuuaaacuggcgacggggaugagaaacgugccugaaaagcaaacccggggaaucuucggcgccauugcuggguuuaucgagaauggaugggaaggcauggucgaugggugguacggauuccgccaccagaacuccgagggcacaggccaggccgcugaccucaaaagcacccaagccgccauuaaucagaucaacgggaagcugaauagacuuaucggaaagacaaacgagaaauuucaucagauugaaaaggaguucucugaaguggagggccggauccaggaucuggaaaaauauguugaggacaccaagauugaucucugguccuacaacgcugagcugcugguggcgcucgaaaaucaacacacgaucgaccugacagauagcgagaugaacaaacuuuucgaaagaaccaagaagcagcugcgcgagaaugccgaagacauggggaacggaugcuuuaaaauuuaucauaagugugauaaugcuugcaucggcucuauucggaacgggaccuacgaccacgaugucuacagagacgaggcccucaauaaccgcuucaaaaucaagggcguggagcugaaauccggauauaaggacuggauccuuuggauuagcuuugccaucuccugcuuccugcucuguguugugcugcugggcuuuauuaugugggcuugccagaaggggaauauccgguguaacauuugcaucuga

SEQ ID NO: 200846 - RNA, 1701 nt, Artificial Sequence
  derived and/or modified CDS sequence (opt5) from hemagglutinin__InfluenzaA__AFJ74525
augaagaccaucauugcccugagcuacauccucugccugguguucgcucagaaacuucccggcaacgacaauuccacagccacgcugugucucgggcaccaugcggucccuaacggaacccugguuaagacaauuaccaaugaucaaaucgaggugacaaacgcuaccgaacuugugcagucuagcuccacaggcagaauuugcgacucuccgcaccggauccuggauggggagaauuguacccucaucgacgcccugcugggagauccccauugcgacggcuuucagaacaaagaaugggaucucuucgucgagcgcagcaaggccuauuccaauuguuacccuuaugacgugcccgauuacgcuucucugagaagccuuguugccuccagcgggacgcuggaauuuaacaaugagucuuucaacuggaccggaguggcucaggacggcacauccagcgccugcaaacggcgcucuauuaaguccuuuuucagcagacucaauuggcugcaccaacuuaaguauaaauacccugcgcugaacgucaccaugcccaauaacgauaaguuugacaaacucuauaucuggggcgugcaucacccuucuacagauuccgaccagaccagccuguacgcccaggcuuccgggcggguuacggugucuacaaagcgcagccagcaaaccgucauuccgaauaucggauccagacccugggugcggggcgugagcucuauuaucuccauuuacuggacaaucgucaaaccuggggacauccugcucauuaacagcaccggaaaccugaucgcuccccgcggcuauuucaagauuagaucuggaaagagcuccaucaugcggucugaugccccuauugggaaauguaauagcgagugcaucacccccaacggcuccaucccgaaugacaagccuuuucagaacguuaaucgcauuacauacggcacgugucccagauaugugaaacagaacacccuuaagcuggccacagggaugcggaaugugccugaaaaacagacccgcggaaucuucggcgcgauugccggguuuaucgagaacggaugggaaggcauggucgaugggugguacggauucagacaccaaaauagcgagggcacaggccaggcugccgaccucaagucuacccaggcugccauuaaccaaaucaaugggaaacugaaccggcuuaucgagaagacgaaugaaaaguuucaucagauugagaaagaguucuccgaaguggaaggaagaauccaggaucuggagaaguauguugaggacacaaaaauugaucucuggagcuacaacgccgaacugcugguggcucucgagaaucagcacaccaucgaccugaccgauucugaaaugaacaagcuguucgagcgcacacggaaacaacugagagaaaacgcggaggacaugggcaaugggugcuuuaagauuuaucauaagugugauaacgccugcaucggauccauucgcaauggcaccuacgaccacgacgucuaccgggaugaggcucucaacaauagauuccagaucaaagggguggaacuuaagagcggcuauaaagacuggauccuuuggauuuccuuugccaucucuugcuuccugcucuguguugugcugcugggauuuauuaugugggccugccagaagggcaacauccgcuguaauauuugcaucuga

SEQ ID NO: 200847 - RNA, 1701 nt, Artificial Sequence; identical to SEQ ID NO: 200845
  derived and/or modified CDS sequence (opt5) from hemagglutinin__InfluenzaA__AFJ74535

SEQ ID NO: 200848 - RNA, 1701 nt, Artificial Sequence
  derived and/or modified CDS sequence (opt5) from hemagglutinin__InfluenzaA__AFJ74560
augaagaccaucauugcccugagcuacauccucugccugguguucgcucagaaacuucccggcaacgacaauuccacagccacgcugugucucgggcaccaugcggucccuaacggaacccugguuaagacaauuaccaaugaucaaaucgaggugacaaacgcuaccgaacuugugcagucuagcuccacaggcagaauuugcgacucuccgcaccagauccuggauggggagaauuguacccucaucgacgcccugcugggagauccccauugcgacggcuuucagaacaaagaaugggaucucuucgucgagcggagcaaggccuauuccaauuguuacccuuaugacgugcccgauuacguuucucugcgcagccuuguggcuuccagcgggacgcuggaauuuaacaaugagucuuucaacuggaccggagucgcccaaaauggcacauccagcgcuugcaaaagacggucugacaaguccuuuuucagccgccucaacuggcugcaccagcuuaaguauaaauacccugcccugaaugugaccaugcccaacaaugagaaguuugauaaacucuauauuuggggcguucaucacccugggacagacucugaucagaucucccuguacgcgcagaccagcggaagagugacggucuccacaaagcggucucaacagaccgugauuccgaacaucggcagcgggcccugggugcgcggagucuccagcagaauuucuaucuacuggacaauuguuaaaccuggcgacauccugcucaucaacuccaccgggaaucugauugcuccccggggauauuucaagauccgcagcggcaagucuagcauuaugagauccgacgccccuaucggcaaauguaacucugaaugcauuacccccaaugggagcaucccgaacgauaagccuuuucagaaugugaaccggaucacauacggacccuguccucgcuaugugaaacagaauacgcuuaagcuggccaccggcaugagaaacguccccgagaaacaaacacgggggauuuucggagcuaucgccggcuuuauugaaaaugggugggagggaaugauggacggcugguacggcuuccgccaccagaacuccgaggggaccggacaggcggccgaucucaagagcacacaagcugccaucaaucagauuaacggcaaacugaauagacuuguggaaaagaccaacgagaaguuucaucagaucgaaaaagaguucucugaaguugaggggcggauccaggaccuggagaaguauguggaagauacgaaaauugaccucugguccuacaaugcugagcugcuggucgcccucgaaaaccaacacacaaucgaucugaccgacagcgagaugaacaaacuuuucgaaagaaccaagaagcagcugcgcgagaaugccgaggauaugggaaacggcugcuuuaagauuuaucauaaaugugacaaugcuugcaucgggucuauucggaacggcacauacgaucacgacguguacagagacgaagcgcucaauaaccgcuuccagaucaagggaguugagcugaaauccggcuauaaggauuggauucuuuggaucagcuuugccaucuccugcuuccugcucuguauugugcugcugggguuuaucaugugggcuugccagaaaggaaauauucgguguaacaucugcauuuga

SEQ ID NO: 200849 - RNA, 1701 nt, Artificial Sequence
  derived and/or modified CDS sequence (opt5) from hemagglutinin__InfluenzaA__AFJ74634
augaagaccaucauugcccugagcuacauccucugccugguguucgcucagaaacuucccggcaacgacaauuccacagccacgcugugucucgggcaccaugcggucccuaacggaaccauuguuaagacaaucaccaaugaucaaauugaggugacaaacgcuaccgaacuggugcagucuagcuccacaggcgggaucugcgacucuccgcaccagauccuugauggagagaauuguacccugauugacgcccuccugggcgauccccagugcgacggguuucaaaacaaaaagugggaucuguucgucgaaagaagcaaagccuauuccaauuguuacccuuaugacgugcccgauuacgcuucucuccggagccugguugccuccagcggaacgcuugaguuuaacaaugaaucuuucaacuggaccggcgugacacagaauggcaccuccagcgcuugcaagcgcagaucuaacaaguccuuuuucagccggcugaauuggcucacacagcugaaauauaaguacccugcccuuaacgucaccaugcccaauaacgagaaauuugacaagcuguauaucuggggagugcaucacccugggacggauucugaccagauuucccucuacgcgcaagccagcggccgcaucacaguuuccaccaaaagaucucagcagacagugauuccgaacaucgggagccggccccgcgucagagauguguccagccggauuucuaucuacuggaccaucgugaagccuggagacauucugcugaucaauuccaccggcaaccucauugcuccccgcggguauuucaagaucagaagcggaaaaucuagcauuaugcgguccgacgccccuaucggcaaguguaauucugagugcaucacacccaacggcagcauuccgaaugauaaaccuuuucagaacgucaaucgcaucacguacggggcuugucccagauauguuaagcaaaacacccugaaacuugccacaggaaugcggaaugugccugaaaagcagacccgcggcauuuucggggcgaucgccggauuuauugagaacggcugggaagggaugguggacggaugguacggcuucagacaucaaaauuccgagggcacagggcaggcugccgaucugaaaagcacccaggcugccaucaaccagaucaauggaaagcucaaccggcugauuggcaagacgaaugagaaauuucaccagaucgaaaaggaguucucugaagucgaggggcgcauucaagaccuugaaaaauauguggaggauacaaagaucgaccugugguccuacaacgccgagcuccugguugcucuggaaaaccagcacaccauugaucucaccgacagcgagaugaauaaacuguucgaaagaacaaagaagcagcuucgggagaacgcggaagauaugggaaauggcugcuuuaaaaucuaucauaagugugacaacgccugcauugggucuaucagaaauggcaccuacgaucacgacguguaccgcgacgaggcucugaacaaucgguuccagaucaaaggagucgagcucaaguccggcuauaaagauuggauucuguggaucagcuuugccauuuccugcuuccuucuguguguggcccuccugggguuuaucaugugggcuugccaaaagggaaacauuagauguaauaucugcaucuga

SEQ ID NO: 200850 - RNA, 1698 nt, Artificial Sequence
  derived and/or modified CDS sequence (opt5) from hemagglutinin__InfluenzaA__AFJ74653
augaaggugaaacugcucguccugcuuugcaccuucacagccacguacgcugacaccaucuguauuggcuaucacgccaacaauagcacagauaccguugacacagugcuggagaagaacgugaccgucacacauuccgugaaucuccuggaagauucucacaacgggaaacuuugccugcucaagggaaucgcgccccugcagcugggcaauuguagcguugcuggguggauucucggaaacccugagugcgaacugcuuaucuccaaagagucuuggagcuacauuguggaaaagccgaaucccgagaacggcaccuguuauccuggguacuuugccgacuaugaggaacugagagagcaacucuccucugucagcuccuucgaacgguuugagaucuuccccaaggagagcucuuggccuaaucauacggugaccggaguuuccgccagcugcucucacaacggcaaauccagcuuuuacaagaaucugcuuuggcugacaggcaaaaacgggcucuaucccaaucugucuaaguccuacgcuaacaauaaagaaaaggaggugcugguccucuggggagugcaucacccuccgaacaucggcgaucagcgcgcccuguaccacaccgacaacgcuuaugugagcgucguuuccucucauuacagcagaaaguucacacccgaaauugccaaacggccuaaggugcgcgaucaggaggggagaaucaauuauuacuggacccuucuggaacccggagacacgauuaucuuugaggcgaacggcaaucucauugccccucgguaugcuuucgcccugucccgcggguuuggaagcggcaucauuaacucuaaugcucccauggaugagugugacgccaaaugccagacaccgcaaggcgcgaucaacuccagccuuccuuuccagaaugugcaccccgucaccaucggggaauguccuaaguacgugagaucugccaaacugcggaugguuacaggacuccgcaacauucccagcauccaguccagaggccuguuuggggcuauugccggauucaucgagggcggguggaccggaaugguggauggcugguauggcuaccaucaccagaaugaacaagggucuggauacgcugccgaccaaaagagcacccagaacgccauuaauggcaucacaaacaaagucaauuccgugaucgagaagaugaacacgcaguuuaccgcuguugggaaggaguucaauaaacuggaacggcgcauggagaaccucaacaagaaaguggaugacggauucauugacaucuggacauauaaugcggaacugcuuguccugcucgagaacgaaagaacccuggauuuucacgacagcaaugugaagaaccuuuacgagaaagucaagucucagcugaagaauaacgccaaagaaauuggcaaugggugcuucgaguuuuaucauaaguguaacgaugagugcauggaauccgugaaaaauggcacauacgacuaucccaaguacagcgaggaaucuaaacucaaccgggagaagaucgauggaguuaagcuggaguccaugggcguguaucagauucuggcuaucuacagcaccgucgccuccucucucgugcugcuuguuagccugggggccaucuccuucuggaugugcucuaauggaagccuccagugucgcauuugcaucuga

SEQ ID NO: 200851 - RNA, 1698 nt, Artificial Sequence
  derived and/or modified CDS sequence (opt5) from hemagglutinin__InfluenzaA__AFJ74673
augaaggugaaacugcucguccugcuuugcaccuucacagccacguacgcugacaccaucuguauuggcuaucacgccaacaauagcacagauaccguugacacagugcuggagaagaacgugaccgucacacauuccgugaaucuccuggaagauucucacaacgggaaacuuugccugcucaagggaaucgcgccccugcagcugggcaauuguagcguugcuggguggauucucggaaacccugagugcgaacugcuuaucuccaaagagucuuggagcuacauuguggaaaagccgaaucccgagaacggcaccuguuauccuggguacuuugccgacuaugaggaacugagagagcaacucuccucugucagcuccuucgaacgguuugagaucuuccccaaggagagcucuuggccuaaucauacggugaccggaguuuccgccagcugcucucacaacggcaaauccagcuuuuacaagaaucugcuuuggcugacaggcaaaaacgggcucuaucccaaucugcgcaagucuuacgcuaacaauaaagaaaaggaggugcugguccucuggggagugcaucacccuccgaacaucggcgaucagagagcccuguaccacaccgacaacgcuuauguguccgucguuagcucccauuacucucggaaguucacacccgaaauugccaaacgcccuaaggugagagaucaggaggggcggaucaauuauuacuggacccuucuggaacccggagacacgauuaucuuugaggcgaacggcaaucucauugccccucgcuaugcuuucgcccugagcagaggguuuggauccggcaucauuaacagcaaugcucccauggaugagugugacgccaaaugccagacaccgcaaggcgcgaucaacucuucccuuccuuuccagaaugugcaccccgucaccaucggggaauguccuaaguacgugcggagcgccaaacugcgcaugguuacaggacucagaaacauucccucuauccagagccggggccuguuuggggcuauugccggauucaucgagggcggguggaccggaaugguggauggcugguauggcuaccaucaccagaaugaacaaggguccggauacgcugccgaccagaagucuacccagaacgccauuaauggcaucacaaacaaagucaauagcgugaucgagaagaugaacacgcaguuuaccgcuguugggaaggaguucaauaaacuggaacgcagaauggagaaccucaacaagaaaguggaugacggauucauugacaucuggacauauaaugcggaacugcuuguccugcucgagaacgaacggacccuggauuuucacgacuccaaugugaagaaccuuuacgagaaagucaagagccaacugaagaauaacgccaaagaaauuggcaaugggugcuucgaguuuuaucauaaguguaacgaugagugcauggaaucugugaaaaauggcacauacgacuaucccaaguacuccgaggaaagcaaacucaaccgcgagaagaucgauggaguuaagcuggagucuaugggcguguaucagauucuggcuaucuacuccaccgucgccagcucccucgugcugcuuguuucucugggggccaucagcuucuggaugugcuccaauggaucucuccaguguagaauuugcaucuga

SEQ ID NO: 200852 - RNA, 1701 nt, Artificial Sequence
  derived and/or modified CDS sequence (opt5) from hemagglutinin__InfluenzaA__AFJ74674
augaagaccaucauugcccugagcuacauccucugccugguguucgcucagaaacuucccggcaacgacaauuccacagccacgcugugucucgggcaccaugcggucccuaacggaacccugguuaagacaauuaccaaugaucaaaucgaggugacaaacgcuaccgaacuugugcagucuagcuccacaggcgggauuugcgacucuccgcaccagauccuggauggagagaauuguacccucaucgacgcccugcugggcgauccccauugcgacggguuucagaacaaaaagugggaucucuucgucgaaagaagcaaagccuauuccaauuguuacccuuaugacgugcccgauuacgcuucucugcggagccuuguugccuccagcggaacgcuggaguuuaacaaugaaucuuucaacuggaccggcguggcucaaaauggcacauccagcgccugcaagcgcagaucuaacaaguccuuuuucagccggcucaauuggcugcaccagcuuaaauauaaguacccugcgcugaacgucaccaugcccaauaacgagaaauuugacaagcucuauauuuggggagugcaucacccugggacagauucugaccagaucucccuguacgcccaggcuagcggccgcauuaccguuuccacgaaaagaucucaacagacagugaucccgaacauugggagccggccccgcgucagagauguguccagccggaucucuauuuacuggaccaucgugaagccuggagacauccugcucauuaauuccacaggcaaccugaucgcuccccgcggguauuucaagauuagaagcggacggucuagcaucaugcgcuccgacgccccuauuggcaaauguaauucugagugcaucacccccaacggcagcaucccgaaugauaagccuuuucagaacgucaauagaauuaccuacggggccuguccccgguauguuaaacagaacacacuuaagcuggcgacgggaaugcgcaaugugccugaaaaacaacccagaggcaucuucggggccauugcuggauuuaucgagaacggcugggaagggaugguggacggaugguacggcuuccggcaccaaaauuccgagggcaccgggcaggccgcugaucucaagagcacacaggccgccauuaaccagaucaauggaaaacugaacagacuuaucggcaagaccaaugagaaguuucaucagauugaaaaagaguucucugaagucgaggggcgcauccaggaccuggaaaaguauguggaggauacaaaaauugaccucugguccuacaacgcugagcugcugguugcgcucgaaaaccaacacaccaucgaucugacggacagcgagaugaauaaacuuuucgaacggacaaagaagcagcugagagagaacgccgaagauaugggaaauggcugcuuuaagauuuaucauaaaugugacaacgcuugcaucgggucuauucgcaauggcaccuacgaucacgacguguaccgggacgaggcccucaacaauagauuccagaucaagggagucgagcugaaauccggcuauaaggauuggauccuuuggauuagcuuugccaucuccugcuuccugcucuguguggcucugcugggguuuauuaugugggccugccagaaaggaaacauccgcuguaauauuugcaucuga

SEQ ID NO: 200853 - RNA, 1698 nt, Artificial Sequence; identical to SEQ ID NO: 200850
  derived and/or modified CDS sequence (opt5) from hemagglutinin__InfluenzaA__AFJ74694

SEQ ID NO: 200854 - RNA, 1701 nt, Artificial Sequence
  derived and/or modified CDS sequence (opt5) from hemagglutinin__InfluenzaA__AFJ74695
augaagaccaucauugcccugagcuacauccucugccugguguucgcucagaaacuucccggcaacgacaauuccacagccacgcugugucucgggcaccaugcggucccuaacggaacccugguuaagacaauuaccaaugaucaaaucgaggugacaaacgcuaccgaacuugugcaaaauucuagcacaggcagaauuugcgacuccccgcaccagauccuggauggggagaacuguacccucaucgacgcccugcugggagauccccauugcgacggcuuucagaauaaagaaugggaucucuucgucgagcggucuaaggccuauagcaacuguuacccuuaugacgugcccgauuacguuucccugcgcucucuuguggcuagcuccgggacgcuggaauuuaauaacgagagcuucaauuggaccggagucgcccaggacggcacaucuuccgcuugcaaaagacggagcgauaaguccuuuuucucucgccucaacuggcugcaccagcuuaaguauaaauacccugcccugaaugugaccaugcccaacaaugagaaguuugacaaacucuauauuuggggcguucaucacccugggacagauagcgaccagaucucucuguacgcgagagccuccggacgggugaccgucagcacgaagcgcucccagcaaacagugauuccgaacaucggcucuagacccugggugagaggggucagcuccaaaauuagcaucuacuggaccauuguuaagccuggagacauccugcucaucaacucuacaggcaaucugauugcuccccgcggguauuucaagaucagauccggaaaaagcucuauuaugcggagcgaugccccuaucggcaaguguaacuccgaaugcauuacccccaauggcucuaucccgaacgacaaaccuuuucagaaugugaaccgcaucaccuacgggcccuguccuagauaugugaagcagaauacacuuaaacuggcuacgggaaugcggaacguccccgagaagcagacccgcggcauuuucggggccaucgcgggauuuauugaaaauggcugggaggggaugguggauggaugguacggcuucagacaccaaaacagcgagggcacagggcaggccgcugaccucaaauccacccaggccgcuaucaaucaaauuaacggaaagcugaaucggcuuaucgaaaagacaaacgagaaauuucaucagaucgaaaaggaguucagcgaaguugagggccggauucaggaucuggagaaauauguggaagacaccaagaucgaucucuggucuuacaaugccgagcugcuggucgcccucgaaaaccagcacacgauugaccugacagauuccgagaugaacaaacuuuucgaacgcaccaagaagcaacugcgggagaaugcugaggacauggggaacggaugcuuuaaaaucuaucauaagugugauaaugcgugcauuggcagcaucagaaacgggaccuacgaccacgacguguaccgcgaugaagcccucaauaaccgguuccagauuaaaggcguugagcugaagucuggauauaaagacuggauccuuuggaucuccuuugcuauuagcugcuuccugcucuguaucgugcugcugggcuuuauuaugugggccugccagaaggggaauaucagauguaacauuugcaucuga

SEQ ID NO: 200855 - RNA, 1701 nt, Artificial Sequence
  derived and/or modified CDS sequence (opt5) from hemagglutinin__InfluenzaA__AFJ74727
augaagaccaucauugcccugagcuacauccucugccugguguucgcucagaaacuucccggcaacgacaauuccacagccacgcugugucucgggcaccaugcggucccuaacggaaccauuguuaagacaaucaccaaugaucaaauugaggugacaaacgcuaccgaacuggugcagucuagcuccacaggcgggaucugcgacucuccgcaccagauccuugauggagagaauuguacccugauugacgcccuccugggcgauccccagugcgacggguuucaaaacaaaaagugggaucuguucgucgaaagaagcaaagccuauuccaauuguuacccuuaugacgugcccgauuacgcuucucuccggagccugguugccuccagcggaacgcuugaguuuaacaaugaaucuuucaacuggaccggcgugacacagaauggcaccuccagcgcuugcaagcgcagaucuaacaaguccuuuuucagccggcugaauuggcucacacagcugaaauauaaguacccugcccuuaacgucaccaugcccaauaacgagaaauuugacaagcuguauaucuggggagugcaucacccugggacggauucugaccagauuucccucuacgcgcaagccagcggccgcaucacaguuuccaccaaaagaucucagcagacagugauuccgaacaucgggagccggccccgcgucagagauauuuccagccggaucucuaucuacuggaccauugugaagccuggagacauccugcugauuaauuccaccggcaaccucaucgcuccccgcggguauuucaagauuagaagcggaaaaucuagcaucaugcgguccgacgccccuaucggcaaguguaauucugagugcauuacacccaacggcagcaucccgaaugauaaaccuuuucagaacgugaaucgcauuacguacggggcuugucccagauaugucaagcaaaacacccugaaacuugccacaggaaugcggaauguuccugaaaagcagacccgcggcaucuucggggcgauugccggauuuaucgagaacggcugggaagggaugguggacggaugguacggcuucagacaucaaaauuccgagggcacagggcaggcugccgaucugaaaagcacccaggcugccaucaaccagauuaauggaaagcucaaccggcugaucggcaagacgaaugagaaauuucaccagauugaaaaggaguucucugaaguggaggggagaauccaagaccuugaaaaauaugucgaggauacaaagauugaccugugguccuacaacgccgagcuccugguggcucuggaaaaccagcacaccaucgaucucaccgacagcgagaugaauaaacuguucgaacgcacaaagaagcagcuucgggagaacgcggaagauaugggaaauggcugcuuuaaaauuuaucauaagugugacaacgccugcaucgggucuaucagauccggcaccuacgaucacgacguuuaccgcgacgaggcucugaauaaccgguuccagauuaaaggaguggagcucaagagcggcuauaaagauuggauccuguggauuuccuuugccaucucuugcuuccuucugugugucgcccuccugggguuuauuaugugggcuugccaaaagggaaauaucagauguaacaucugcauuuga

SEQ ID NO: 200856 - RNA, 1698 nt, Artificial Sequence; identical to SEQ ID NO: 200850
  derived and/or modified CDS sequence (opt5) from hemagglutinin__InfluenzaA__AFJ74743

SEQ ID NO: 200857 - RNA, 1701 nt, Artificial Sequence; identical to SEQ ID NO: 200849
  derived and/or modified CDS sequence (opt5) from hemagglutinin__InfluenzaA__AFJ74744

SEQ ID NO: 200858 - RNA, 1698 nt, Artificial Sequence; identical to SEQ ID NO: 200850
  derived and/or modified CDS sequence (opt5) from hemagglutinin__InfluenzaA__AFJ74760

SEQ ID NO: 200859 - RNA, 1701 nt, Artificial Sequence
  derived and/or modified CDS sequence (opt5) from hemagglutinin__InfluenzaA__AFJ74761
augaagaccaucauugcccugagcuacauccucugccugguguucgcucagaaacuucccggcaacgacaauuccacagccacgcugugucucgggcaccaugcggucccuaacggaaccauuguuaagacaaucaccaaugaucaaauugaggugacaaacgcuaccgaacuggugcagucuagcuccacaggcgggaucugcgacucuccgcaccagauccuugauggagagaauuguacccugauugacgcccuccugggcgauccccagugcgacggguuucaaaacaaaaagugggaucuguucgucgaaagaagcaaagccuauuccaauuguuacccuuaugacgugcccgauuacgcuucucuccggagccugguugccuccagcggaacgcuugaguuuaacaaugaaucuuucaacuggaccggcgugacacagaauggcaccuccagcgcuugcaagcgcagaucuaacaaguccuuuuucagccggcugaauuggcucacacagcugaaauauaaguacccugcccuuaacgucaccaugcccaauaacgagaaauuugacaagcuguauaucuggggagugcaucacccugggacggauucugaccagauuucccucuacgcgcaagccagcggccgcaucacaguuuccaccaaaagaucucagcagacagugauuccgaacaucgggagccggccccgcgucagagauauuuccagccggaucucuaucuacuggaccauugugaagccuggagacauccugcugauuaauuccaccggcaaccucaucgcuccccgcggguauuucaagauuagaagcggaaaaucuagcaucaugcgguccgacgccccuaucggcaaguguaauucugagugcauuacacccaacggcagcaucccgaaugauaaaccuuuucagaacgugaaucgcauuacguacggggcuugucccagauaugucaagcaaaacacccugaaacuugccacaggaaugcggaauguuccugaaaagcagacccgcggcaucuucggggcgauugccggauuuaucgagaacggcugggaagggaugguggacggaugguacggcuucagacaucaaaauuccgagggcacagggcaggcugccgaucugaaaagcacccaggcugccaucaaccagauuaauggaaagcucaaccggcugaucggcaagacgaaugagaaauuucaccagauugaaaaggaguucucugaaguggaggggagaauccaagaccuugaaaaauaugucgaggauacaaagauugaccugugguccuacaacgccgagcuccugguggcucuggaaaaccagcacaccaucgaucucaccgacagcgagaugaauaaacuguucgaacgcacaaagaagcagcuucgggagaacgcggaagauaugggaaauggcugcuuuaaaauuuaucauaagugugacaacgccugcaucgggucuaucagaaauggcaccuacgaucacgacguuuaccgcgacgaggcucugaacaaucgguuccagauuaaaggaguggagcucaaguccggcuauaaagauuggauccuguggauuagcuuugccaucuccugcuuccuucugugugucgcccuccugggguuuauuaugugggcuugccaaaagggaaacaucagauguaauaucugcauuuga

SEQ ID NO: 200860 - RNA, 1698 nt, Artificial Sequence; identical to SEQ ID NO: 200850
  derived and/or modified CDS sequence (opt5) from hemagglutinin__InfluenzaA__AFJ74779

SEQ ID NO: 200861 - RNA, 1701 nt, Artificial Sequence; identical to SEQ ID NO: 200849
  derived and/or modified CDS sequence (opt5) from hemagglutinin__InfluenzaA__AFJ74780

SEQ ID NO: 200862 - RNA, 1701 nt, Artificial Sequence
  derived and/or modified CDS sequence (opt5) from hemagglutinin__InfluenzaA__AFJ74804
augaagaccaucauugcccugagcuacauccucugccugguguucgcucagaaacuucccggcaacgacaauuccacagccacgcugugucucgggcaccaugcggucccuaacggaaccauuguuaagacaaucaccaaugaucaaauugaggugacaaacgcuaccgaacuggugcagucuagcuccacaggcgggaucugcgacucuccgcaccagauccuugauggagagaauuguacccugauugacgcccuccugggcgauccccagugcgacggguuucaaaacagaaaaugggaucuguucgucgaacggagcaaggccuauuccaauuguuacccuuaugacgugcccgauuacgcuucucuccgcagccugguugccuccagcggaacgcuugaguuuaacaaugaaucuuucgacuggaccggcgugacacagaacggcaccuccagcgcuugcaaaagacggucuaauaaguccuuuuucagccgccugaacuggcucacacaucugaaguauaaauacccugcccuuaaugucaccaugcccaacaaugagaaguuugauaaacuguauaucuggggagugcaccauccugggacggacucugaucagauuucccucuacgcgcaggccagcggcagaaucacaguuuccaccaagcggucucaacagacagugauuccgaacaucgggagccgccccagaguccgggacguguccagccgcauuucuaucuacuggaccaucgugaaaccuggagacauucugcugaucaacuccaccggcaaucucauugcucccagaggguauuucaagauccggagcggaaagucuagcauuaugcgcuccgaugccccuaucggcaaauguaacucugagugcaucacacccaauggcagcauuccgaacgacaagccuuuucagaaugucaacagaaucacguacggggcuuguccccgguauguuaaacagaauacccugaaacuugccacaggaaugcgcaacgugccugaaaaacaaaccagaggcauuuucggggcgaucgccggauuuauugagaauggcugggaagggaugguggauggaugguacggcuuccggcaccagaacuccgagggcacagggcaggcugccgaccucaagagcacccaagcugccaucaaucagaucaacggaaaacugaauagacugauuggcaagacgaacgagaaguuucaccagaucgaaaaagaguucucugaagucgaggggcgcauucaggaucuugaaaaguauguggaggacacaaaaaucgaucugugguccuacaaugccgagcuccugguugcucuggaaaaccaacauaccauugaccucaccgauagcgagaugaacaagcuguucgaacggacaaagaagcagcuuagagagaaugcggaagacaugggaaacggcugcuuuaagaucuaucacaaaugugauaaugccugcauugggucuauccgcaacggcaccuacgaccaugacguguaccgggaugaggcucugaauaacagauuccagaucaagggagucgagcucaaauccggcuauaaggacuggauucuguggaucagcuuugccauuuccugcuuccuucuguguguggcccuccugggguuuaucaugugggcuugccagaaaggaaauauucgcuguaacaucugcaucuga

SEQ ID NO: 200863 - RNA, 1701 nt, Artificial Sequence
  derived and/or modified CDS sequence (opt5) from hemagglutinin__InfluenzaA__AFJ74819
augaagaccaucauugcccugagcuacauccucugccugguguucgcucagaaacuucccggcaacgacaauuccacagccacgcugugucucgggcaccaugcggucccuaacggaaccauuguuaagacaaucaccaaugaucaaauugaggugacaaacgcuaccgaacuggugcagucuagcuccacaggcgggaucugcgacucuccgcaccagauccuugauggagagaauuguacccugauugacgcccuccugggcgauccccagugcgacggguuucaaaacaaaaagugggaucuguucgucgaaagaagcaaagccuauuccaauuguuacccuuaugacgugcccgauuacgcuucucuccggagccugguugccuccagcggaacgcuugaguuuaacaaugaaucuuucgacuggaccggcgugacacagaacggcaccuccagcgcuugcaagcgcagaucuaauaaguccuuuuucagccggcugaacuggcucacacaucugaaauauaaguacccugcccuuaaugucaccaugcccaacaaugagaaauuugauaagcuguauaucuggggagugcaccauccugggacggacucugaucagauuaaccucuacgcgcaggccuccggccgcaucacaguuagcaccaaaagaucccaacagacagugauuccgaacaucgggucucggccccgcgucagagacgugagcucccggauuagcaucuacuggaccaucgugaagccuggagacauucugcugaucaauucuaccggcaaccucauugcuccccgcggguauuucaagaucagauccggaaaaagcucuauuaugcggagcgaugccccuaucggcaaguguaauuccgagugcaucacacccaacggcucuauuccgaaugacaaaccuuuucagaacgucaaucgcaucacguacggggcuugucccagauauguuaagcagaacacccugaaacuugccacaggaaugcggaaugugccugaaaagcaaacccgcggcauuuucggggcgaucgccggauuuauugagaacggcugggaagggaugguggauggaugguacggcuucagacaccagaauagcgagggcacagggcaggcugccgaccugaaauccacccaagcugccaucaaccagaucaauggaaagcucaaccggcugauuggcaagacgaaugagaaauuucaccagaucgaaaaggaguucagcgaagucgaggggcgcauucaggaucuugaaaaauauguggaggacacaaagaucgaucuguggucuuacaacgccgagcuccugguugcucuggaaaaccaacauaccauugaccucaccgauuccgagaugaauaaacuguucgaaagaacaaagaagcagcuucgggagaacgcggaagacaugggaaauggcugcuuuaaaaucuaucacaagugugauaacgccugcauugggagcaucagaaauggcaccuacgaccaugacguguaccgcgaugaggcucugaacaaucgguuccagaucaaaggagucgagcucaagucuggcuauaaagacuggauucuguggaucuccuuugccauuagcugcuuccuucuguguguggcccuccugggguuuaucaugugggcuugccagaagggaaacauuagauguaauaucugcaucuga

SEQ ID NO: 200864 - RNA, 1701 nt, Artificial Sequence; identical to SEQ ID NO: 194717
  derived and/or modified CDS sequence (opt5) from hemagglutinin__InfluenzaA__AFJ74842

SEQ ID NO: 200865 - RNA, 1698 nt, Artificial Sequence
  derived and/or modified CDS sequence (opt5) from hemagglutinin__InfluenzaA__AFJ75036
augaaggugaaacugcucguccugcuuugcaccuucacagccacguacgcugacaccaucuguauuggcuaucacgccaacaauagcacagauaccguugacacagugcuggagaagaacgugaccgucacacauuccgugaaucuccuggaagauucucacaacgggaaacuuugccugcucaagggaaucgcgccccugcagcugggcaauuguagcguugcuggguggauucucggaaacccugagugcgaacugcuuaucuccagagagucuuggagcuacauuguggaaaaaccgaaucccgagaacggcaccuguuauccugggcauuuugccgacuacgaggaacugcgggagcaacucuccucugucagcuccuucgaacgcuuugagaucuuccccaaggagaauagcuggccuaaccacacggugaccggaguuucugccuccugcagccauaauggcaagucuuccuuuuauaaaaaccugcuuuggcugacaggcaagaaugggcucuaccccaaccugagcaaaucuuaugcuaauaacaaggaaaaagaggugcugguccucuggggagugcaccacccuccgaacaucggcgaucagagagcccuguaccauaccgaaaaugcuuacguguccgucguuagcucccacuauucucggaaguucacacccgagauugccaagcgcccuaaagugagagaccaggaagggcggaucaacuacuauuggacccuucuggagcccggagauacgauuaucuuugaggcgaauggcaaccucauugccccucgcuacgcuuucgcccugagcagaggguuuggauccggcaucauuaauagcaacgcucccauggacgaaugugaugccaagugccagacaccgcaaggcgcgaucaauucuucccuuccuuuccagaacgugcaucccgucaccaucggggaguguccuaaauaugugcggagcgccaagcugcgcaugguuacaggacucagaaauauucccucuauccagagccggggccuguuuggggcuauugccggauucaucgaaggcggguggaccggaaugguggacggcugguacggcuaucaccaccagaacgagcaaggguccggauacgcugccgaucagaaaucuacccagaaugccauuaacggcaucacaaauaaggucaacagcgugaucgaaaagaugaauacgcaguuuaccgcuguugggaaagaguucaacaagcuggagcgcagaauggaaaaccucaauaaaaagguggacgauggauucauugacaucuggacauacaacgcggagcugcuuguccugcucgaaaaugagcggacccuggacuuucaugauuccaacgugaaaaaucuuuaugaaaaggucaaaagccaacugaagaacaaugccaaggagauuggcaacgggugcuucgaguuuuaccacaaauguaaugacgaaugcauggagucugugaagaacggcacauaugauuaccccaaauauuccgaagagagcaagcucaaucgcgagaaaaucgacggaguuaagcuggaaucuaugggcguguaccagauucuggcuaucuauuccaccgucgccagcucccucgugcugcuuguuucucugggggccaucagcuucuggaugugcuccaacggaucucuccaguguagaauuugcaucuga

SEQ ID NO: 200866 - RNA, 1701 nt, Artificial Sequence; identical to SEQ ID NO: 192702
  derived and/or modified CDS sequence (opt5) from hemagglutinin__InfluenzaA__AFJ75047

SEQ ID NO: 200867 - RNA, 1698 nt, Artificial Sequence
  derived and/or modified CDS sequence (opt5) from hemagglutinin__InfluenzaA__AFJ75058
augaaggugaaacugcucguccugcuuugcaccuucacagccacguacgcugacaccaucuguauuggcuaucacgccaacaauagcacagauaccguugacacagugcuggagaagaacgugaccgucacacauuccgugaaucuccuggaagauucucacaacgggaaacuuugccugcucaagggaaucgcgccccugcagcugggcaauuguagcguugcuggguggauucucggaaacccugagugcgaacugcuuaucuccagagagucuuggagcuacauuguggaaaaaccgaaucccgagaacggcaccuguuauccugggcauuuugccgacuacgaggaacugcgggagcaacucuccucugucagcuccuucgaacgcuuugagaucuuccccaaggagagcucuuggccuaaucacacggugaccggaguuuccgccagcugcucucauaacggcaaguccagcuuuuauaaaaaucugcuuuggcugacaggcaagaacgggcucuaccccaaucugucuaaauccuaugcuaacaauaaggaaaaagaggugcugguccucuggggagugcaccacccuccgaacaucggcgaucagagagcccuguaccauaccgaaaacgcuuacgugagcgucguuuccucucacuauagccggaaguucacacccgagauugccaagcgcccuaaagugagagaccaggaagggcggaucaauuacuauuggacccuucuggagcccggagauacgauuaucuuugaggcgaacggcaaucucauugccccucgcuacgcuuucgcccuguccagaggguuuggaagcggcaucauuaacucuaaugcucccauggacgaaugugaugccaagugccagacaccgcaaggcgcgaucaacuccagccuuccuuuccagaaugugcaucccgucaccaucggggaguguccuaaauaugugcggucugccaagcugcgcaugguuacaggacucagaaacauucccagcauccagucccggggccuguuuggggcuauugccggauucaucgaaggcggguggaccggaaugguggacggcugguacggcuaucaccaccagaaugagcaagggucuggauacgcugccgaucagaaaagcacccagaacgccauuaauggcaucacaaacaaggucaauuccgugaucgaaaagaugaacacgcaguuuaccgcuguugggaaagaguucaauaagcuggagcgcagaauggaaaaccucaacaaaaagguggacgauggauucauugacaucuggacauacaaugcggagcugcuuguccugcucgaaaacgagcggacccuggacuuucaugauagcaaugugaaaaaccuuuaugaaaaggucaaaucucaacugaagaauaacgccaaggagauuggcaaugggugcuucgaguuuuaccacaaauguaacgacgaaugcauggaguccgugaagaauggcacauaugauuaccccaaauauagcgaagagucuaagcucaaccgcgagaaaaucgacggaguuaagcuggaauccaugggcguguaccagauucuggcuaucuauagcaccgucgccuccucucucgugcugcuuguuagccugggggccaucuccuucuggaugugcucuaauggaagccuccaguguagaauuugcaucuga

SEQ ID NO: 200868 - RNA, 1698 nt, Artificial Sequence
  derived and/or modified CDS sequence (opt5) from hemagglutinin__InfluenzaA__AFJ75069
augaaggugaaacugcucguccugcuuugcaccuucacagccacguacgcugacaccaucuguauuggcuaucacgccaacaauagcacagauaccguugacacagugcuggagaagaacgugaccgucacacauuccgugaaucuccuggaagauucucacaacgggaaacuuugccugcucaagggaaucgcgccccugcagcugggcaauuguagcguugcuggguggauucucggaaacccugagugcgaacugcuuaucuccagagagucuuggagcuacauuguggaaaaauccaauccggagaacggcaccuguuaucccgggcauuuugccgacuacgaggaacugcgggagcaacucucuagcgucuccagcuucgaacgcuuugagaucuucccuaaggagucuuccuggcccaaucacacgaccacaggagugagcgccucuugcucccauaacggcgaaagcucuuuuuauaagaaucugcuuuggcugaccggcaaaaacgggcucuacccuaaucuguccaagagcuaugcuaacaauaaagagaaggaaguucuggugcucuggggaguccaccaucccccuaacaucggcgaucagagagcccuguaccacacagagaacgcuuacguguccguggucucuagccacuauucccggaaauucaccccggaaauugccaagcgccccaagguuagagaccaggaggggcggaucaauuacuauuggacgcuucuggagccuggagauacaauuaucuuugaagcgaacggcaaucucauugcuccccgcuacgccuucgcccugagcagaggguuuggaucuggcaucauuaacuccaaugcuccuauggacgagugugaugccaaaugccagacaccccaaggcgcgaucaacagcucucuuccguuccagaaugugcauccugugaccaucggggaaugucccaaguauguccggagcgccaaacugcgcauggugaccggacucagaaacauuccuuccauccagucucggggccuguuuggggcuauugccggauucaucgagggcggguggaccggaaugguugacggcugguacggcuaucaccaccagaaugaacaagggagcggauacgcugccgaucagaaguccacacagaacgccauuaauggcaucacgaacaaagugaauagcgucaucgagaagaugaacacccaguuuacagcuguggggaaagaguucaauaagcuggaacgcagaauggagaaccucaacaagaaaguugacgauggauucauugacaucuggaccuacaaugcggaacugcuugugcugcucgagaacgaacggacacuggacuuucaugauucuaaugucaagaaccuuuaugagaaagugaagucccaacugaaaaauaacgccaaggagauuggcaaugggugcuucgaauuuuaccacaaguguaacgacgagugcauggaaagcgucaaaaauggcaccuaugauuaccccaaguauucugaggaguccaaacucaaccgcgaaaagaucgacggagugaaacuggagagcaugggcguuuaccagauucuggcuaucuauuccacgguggccucuagccucguccugcuugugucccugggggccaucucuuucuggaugugcagcaauggaucccuccaguguagaauuugcaucuga

SEQ ID NO: 200869 - RNA, 1701 nt, Artificial Sequence
  derived and/or modified CDS sequence (opt5) from hemagglutinin__InfluenzaA__AFJ75091
augaagaccaucauugcccugagcuacauccucugccugguguucgcucagaaacuucccggcaacgacaauuccacagccacgcugugucucgggcaccaugcggucccuaacggaaccauuguuaagacaaucaccaaugaucaaauugaggugacaaacgcuaccgaacuggugcagucuagcuccacaggcgggaucugcgacucuccgcaccagauccuugauggagagaauuguacccugauugacgcccuccugggcgauccccagugcgacggguuucaaaacaaaaagugggaucuguucgucgaaagaagcaaagccuauuccaauuguuacccuuaugacgugcccgauuacgcuucucuccggagccugguugccuccagcggaacgcuugaguuuaacaaugaaucuuucaacuggaccggcgugacacagaauggcaccuccagcgcuugcaagcgcagaucuaacaauuccuuuuucagccggcugaacuggcucacacaucugaaguuuaaauauccugcccuuaaugucaccaugcccaacaacgagaaguucgacaaacuguacaucuggggagugcaccauccugggacggauaaugaccagauuuuucucuaugcgcaggccucuggccgcaucacaguuuccaccaagauuagccaacagacagugaucccgaacauuggguccagaccccggguccgcaauaucccuucuagaaucagcauuuacuggaccaucgugaaacccggagauauucugcugaucaacuccaccggcaaucucauugcuccucggggguacuucaagauccgcagcggaaagucuuccaucaugagaagcgacgcccccauuggcaaauguaacucugagugcaucacaccgaauggcagcauuccuaacgacaagcccuuucagaaugugaaccggaucacguauggggcuuguccucgcuacgucaaacagaauacccugaaacuugccacaggaaugagaaacguucccgaaaagcaaacccggggcauuuucggggcgaucgccggauuuaucgagaauggcugggaagggaugguggauggaugguauggcuuccgccaccagaacuccgagggcauugggcaggcugccgaccugaagucuacacaagcugccaucgaucagauuaauggaaaacucaacagacugaucggcaagaccaacgagaaguuccaccagauugaaaaagaguuuagcgaaguggaggggcggauccaggaccuugaaaaguacgucgaggauacgaaaauugaccugugguccuauaaugccgaucuccugguggcucuggagaaccaacauacaaucgaccucaccgauagcgaaaugaauaagcuguucgagaaaaccaagaagcagcuuagagaaaacgcggaggacaugggaaauggcugcuuuaaaaucuaccacaagugugauaacgccugcauugggucuauccgcaauggcacauaugaccaugacguuuaccgggaugaagcucugaacaauagauuccagauuaaaggaguggagcucaaguccggcuacaaagacuggauccuguggauuagcuuugccaucucuugcuuccuucugugugucgcccuccugggguuuaucaugugggcuugccagaagggaaacauucgcuguaauaucugcauuuga

SEQ ID NO: 200870 - RNA, 1701 nt, Artificial Sequence
  derived and/or modified CDS sequence (opt5) from hemagglutinin__InfluenzaA__AFJ75449
augaagaccaucauugcccugagcuacauccucugccugguguucgcucagaaacuucccggcaacgacaauuccacagccacgcugugucucgggcaccaugcggucccuaacggaaccauuguuaagacaaucaccaaugaucaaauugaggugacaaacgcuaccgaacuggugcagucuagcuccacaggcgagaucugcgacucuccgcaccagauccuugauggggaaaauuguacccugauugacgcccuccugggagauccccagugcgacggcuuucaaaacaaaaagugggaucuguucgucgagagaagcaaagccuauuccaauuguuacccuuaugacgugcccgauuacgcuucucuccggagccugguugccuccagcgggacgcuugaauuuaacaaugagucuuucaacuggaccggagugacacagaauggcaccuccagcgcuugcauccgcagaucuaacaauuccuuuuucagccggcugaacuggcucacacaucugaaguuuaaguauccugcccuuaaugucaccaugcccaacaacgagaaauucgacaagcuguacauuuggggcgugcaccauccugggacggauaaugaccagaucuuucucuaugcgcaggccucuggaaaaauuacaguuuccaccaagcgcagccaacagacagugaucccgaacauuggcuccagaccccggguccgcaauaucccuucuagaaucagcauuuacuggaccaucgugaaacccggggauauucugcugaucaacuccaccggaaaucucauugcuccucggggcuacuucaagauccgcagcgggaagucuuccaucaugagaagcgacgcccccauuggaaaauguaacucugaaugcaucacaccgaauggcagcauuccuaacgacaagcccuuucagaaugugaaccggaucacguauggcgcuuguccucgcuacgucaaacagaauacccugaaacuugccacagggaugagaaacguucccgagaagcaaacccggggaauuuucggcgcgaucgccggguuuaucgaaaauggaugggagggcaugguggaugggugguauggauuccgccaccagaacuccgagggcacaggccaggcugccgaccugaagucuacccaagcugccauugaucagaucaaugggaaacucaacagacugauuggaaagacgaacgaaaaguuccaccagaucgagaaagaauuuagcgagguggaaggccggauucaggaccuugagaaguacgucgaggauacaaaaaucgaccugugguccuauaaugccgaacuccugguggcucuggagaaccaacauaccauugaucucaccgacagcgaaaugaauaagcuguucgagaaaacaaagaagcagcuuagagaaaacgcggaggauauggggaauggaugcuuuaaaaucuaccacaagugugacaacgccugcaucggcucuauucgcaaugggaccuaugaucaugacguuuaccgggacgaggcucugaacaauagauuccagaucaaaggcguggaacucaaguccggauacaaagauuggauucuguggaucagcuuugccauuucuugcuuccuucugugugucgcccuccugggcuuuaucaugugggcuugccagaaggggaacauccgcuguaauauuugcaucuga

SEQ ID NO: 200871 - RNA, 1701 nt, Artificial Sequence
  derived and/or modified CDS sequence (opt5) from hemagglutinin__InfluenzaA__AFJ75460
augaagaccaucauugcccugagcuacauccucugccugguguucacacagaaacuucccggcaacgacaauuccacggcuacccugugucucgggcaccaugccgucccuaacggaacaauuguuaagaccaucacaaaugaucaaauugaggugaccaacgcgacagaacuggugcagucuagcuccaccggcgagaucugcgacucuccgcaccagauccuugauggggaaaauuguacgcugauugacgcucuccugggagauccccagugcgacggcuuucaaaacaaaaagugggaucuguucgucgagagaagcaaagccuauuccaauuguuacccuuaugacgugcccgauuacgccucucuccggagccugguugcuuccagcgggacccuugaauuuaacaaugagucuuucaacuggacaggagugacccagaauggcacauccagcgccugcauccgcagaucuaacaauuccuuuuucagccggcugaacuggcucacccaucugaaguuuaaguauccugcucuuaaugucacgaugcccaacaacgagaauuucgacaaacuguacauuuggggcgugcaccauccugggacagauaacgaccagaucuuucucuaugcccaggcgucuggacgcauuaccguuuccacaaagagaagccaacagaccgugaucccgaauauuggcucccggccccgcgucagaaacaucccuucucggaucagcauuuacuggaccaucgugaaacccggggauauucugcugaucaauuccacaggaaaccucauugccccucgcggcuacuucaagaucagaagcgggaaaucuuccaucaugcggagcgacgcucccauuggaaaguguaauucugaaugcaucacgccgaacggcagcauuccuaaugacaagcccuuucagaacgugaaucgcaucaccuauggcgccuguccuagauacgucaaacagaacacacugaaacuugcuaccgggaugcggaauguucccgagaagcaaacacgcggaauuuucggcgccaucgcgggguuuaucgaaaacggaugggagggcaugguggaugggugguauggauucagacaccaaaauuccgagggcauuggccaggccgcugaccugaagucuacccaggccgcuguggaucagaucaacgggaaacucaaccggcugauuggaaagacgaaugaaaaauuccaccagaucgagaaggaauuuagcgaggucgaaggccgcauucaggaccuugagaaguacguggaggauacaaaaaucgaccugugguccuauaacgccgaacuccugguugcccuggagaaucaacauaccauugaucucaccgacagcgaaaugaacaagcuguucgagaaaacaaagaaacagcuuagagaaaaugcugaggauauggggaacggaugcuuuaagaucuaccacaagugugacaaugcgugcaucggcucuauucggaacgggaccuaugaucaugacguguacagagacgaggcccugaauaaccgcuuccagaucaaaggcgucgaacucaaguccggauacaaagauuggauucuguggaucagcuuugcuauuucuugcuuccuucuguguguggcccuccugggcuuuaucaugugggccugccagaaggggaauauccgguguaacauuugcaucuga

SEQ ID NO: 200872 - RNA, 1698 nt, Artificial Sequence
  derived and/or modified CDS sequence (opt5) from hemagglutinin__InfluenzaA__AFJ75517
augaaggugaaacugcucguccugcuuugcaccuucacagccacguacgcugacaccaucuguauuggcuaucacgccaacaauagcacagauaccguugacacagugcuggagaagaacgugaccgucacauacuccgugaaucuccuggaagauaaccauaaugggaaacuuugccugcucaagggaaucgcgccccugcagcugggcaacuguucuguugcuggguggauucucggaaauccugagugcgaacugcuuaucagcaaagaguccuggucuuauauuguggaaagaccgaaccccgagaauggcaccuguuacccugggcacuuugccgacuaugaggaacugcgggagcaacucagcuccgucucuagcuucgaacgcuuugagaucuuccccaaggaguccagcuggccuaaccauacggugaccggaguuucugccuccugcagccacaauggcgaaucuuccuuuuacaagaaccugcuuuggcugacaggcaaaaaugggcucuaucccaaccugagcaagucuuacgcuaauaacaaagagaaggaagugcugguccucuggggagugcaucacccuccgaacaucggcgaucagaugacccuguaccacaaaaagaaugccuauguguccgucguuagcucccauuacucuagaaaguucacacccgagauugcuaaacggccuaaggugcgcgaccaggaagggagaaucaacuauuacuggacccuucuggagcccggagauacgauuaucuuugaggccaauggcaaccucauugcgccucgguaugccuucgcucugaaucgcggguuuggaagcggcaucauuaacuccaaugcccccauggacgaaugugaugcuaaaugccagacaccgcaaggcgccaucaacagcucucuuccuuuccagaaugugcaccccgucaccaucggggaguguccuaaguacgugagauccgcgaaacugcggaugguuacaggacuccgcaacauucccagcauccagucuagaggccuguuuggggccauugcuggauucaucgaaggcggguggaccggaaugguggacggcugguauggcuaccaucaccagaaugagcaagggagcggauacgccgcugaucagaaguccacccagaacgccauuaauggcaucacaaacaaagucaauucugugaucgaaaagaugaacacgcaguuuaccgccguugggaaggaguucaacaaacuggagcggcgcauggaaaaucucaacaagaaaguggacgauggauucauugacgucuggacauauaaugcugagcugcuugugcugcucgaaaacgagagaacccuggacuuucacgauagcaaugucaagaaccuuuacgaaaaagugaagacacaacugaagaauaacgcgaaagagaucggcaaugggugcuucgaguuuuaucauaaguguaacgacgaaugcauggaguccguuaaaaauggcaccuacgauuaucccaaguacagcgaagagucuaaacucucccgggagaagauugacggagugaagcuggaaagcaugggcgucuaucagauccuggccauuuacucuacgguggcuuccagccucguucugcuugugucccugggggccaucucuuucuggaugugcagcaacggaucccuccagugucgcaucugcauuuga

SEQ ID NO: 200873 - RNA, 1698 nt, Artificial Sequence
  derived and/or modified CDS sequence (opt5) from hemagglutinin__InfluenzaA__AFJ75560
augaaggugaaacugcucguccugcuuugcaccuucacagccacguacgcugacaccaucuguauuggcuaucacgccaacaauagcacagauaccguugacacagugcuggagaagaacgugaccgucacacauuccgugaaucuccuggaagauaaccacaaugggaaacuuugccugcucaagggaaucgcgccccugcagcugggcaacuguucuguugcuggguggauucucggaaauccugagugcgaacugcuuaucagcaaagaguccuggucuuacauuguggaaagaccgaaccccgagaauggcaccuguuauccugggcauuuugccgacuacgaggaacugcgggagcaacucagcuccgucucuagcuucgaacgcuuugagaucuuccccaaggaguccagcuggccuaaccacacggugaccggaguuucugccuccugcagccauaauggcgaaucuuccuuuuauaagaaccugcuuuggcugacaggcaaaaaugggcucuaccccaaccugagcaagucuuaugcuaauaacaaagagaaggaagugcugguccucuggggagugcaccacccuccgaacaucggcgaucagaugacccuguaccauaaagagaaugccuacguguccgucguuagcucccacuauucuagaaaguucacacccgaaauugcuaagcggccuaaagugcgcgaccaggaggggagaaucaacuacuauuggacccuucuggagcccggagauacgauuaucuuugaagccaauggcaaccucauugcgccucgguacgccuucgcucugagccgcggguuuggauccggcaucauuaauagcaacgcccccauggacgagugugaugcuaagugccagacaccgcaaggcgccaucaauucuucccuuccuuuccagaacgugcaucccgucaccaucggggaauguccuaaauuugugagaagcgcgaagcugcggaugguuacaggacuccgcaauauucccucuauccagagcagaggccuguucggggccauugcuggauuuaucgagggcggguggaccggaaugguggacggcugguauggcuaccaccaccagaacgaacaaggguccggauaugccgcugaucagaaaucuacccagaaugccauuaacggcaucacaaauaaggucaacagcgugaucgagaaaaugaauacgcaguucaccgccguugggaaggaguucaacaagcuggaacggcgcauggagaaccucaauaaaaagguggacgauggauuuauugacgucuggacauacaacgcugaacugcuugugcugcucgagaaugaaagaacccuggacuuccaugauuccaacgucaaaaaucuuuacgagaaggugaaaaaccaacugcggaauaacgcgaaggagaucggcaaugggugcuuugaguucuaucacaaguguaacgacgaaugcauggaaagcguuaaaaauggcacauacgauuaucccaaguacucugaggaguccaaacucagccgcgaaaagauugacggagugaaacuggagucuaugggcgucuaucagauccuggccauuuacuccaccguggcuagcucccucguucugcuugugucucugggggccaucagcuuuuggaugugcuccaacggaucucuccaguguagaaucugcauuuga

SEQ ID NO: 200874 - RNA, 1698 nt, Artificial Sequence
  derived and/or modified CDS sequence (opt5) from hemagglutinin__InfluenzaA__AFJ75571
augaaggugaaacugcucguccugcuuugcaccuucacagccacguacgcugacaccaucuguauuggcuaucacgccaacaauagcacagauaccguugacacagugcuggagaagaacgugaccgucacacauuccgugaaucuccuggaagauaaccacaaugggaaacuuugccugcucaagggaaucgcgccccugcagcugggcaacuguucuguugcuggguggauucucggaaauccugagugcgaacugcuuaucagcaaagaguccuggucuuacauuguggaaagaccgaaccccgagaauggcaccuguuauccugggcauuuugccgacuacgaggaacugcgggagcaacucagcuccgucucuagcuucgaacgcuuugagaucuuccccaaggaguccagcuggccuaaccacacggugaccggaguuucugccuccugcagccauaauggcgaaaacucuuuuuauaagaaucugcuuuggcugacaggcaaaaacgggcucuaccccaaucuguccaagagcuaugcuaacaacaaagagaaggaagugcugguccucuggggagugcaccacccuccgaauaucggcgaucagaugacccuguaccauaaagagaacgccuacgugucugucguuuccagccacuauuccagaaaguucacacccgaaauugcuaagcggccuaaagugcgcgaccaggaggggagaaucaauuacuauuggacccuucuggagcccggagauacgauuaucuuugaagccaacggcaaucucauugcgccucgguacgccuucgcucugucucgcggguuuggaagcggcaucauuaacuccaaugcccccauggacgagugugaugcuaagugccagacaccgcaaggcgccaucaacagcucucuuccuuuccagaaugugcaucccgucaccaucggggaauguccuaaauaugugagauccgcgaagcugcggaugguuacaggacuccgcaacauucccagcauccagucuagaggccuguuuggggccauugcuggauucaucgagggcggguggaccggaaugguggacggcugguacggcuaucaccaccagaaugaacaagggagcggauacgccgcugaucagaaauccacccagaacgccauuaauggcaucacaaacaaggucaauucugugaucgagaaaaugaacacgcaguuuaccgccguugggaaggaguucaacaagcuggaacggcgcauggagaaucucaacaaaaagguggacgauggauucauugacgucuggacauacaaugcugaacugcuugugcugcucgagaacgaaagaacccuggacuuucaugauagcaaugucaaaaaccuuuaugagaaggugaaaaaucaacugaagaacaaugcgaaggagaucggcaacgggugcuucgaauuuuaccacaaauguaaugacgagugcauggaauccguuaagaacggcacauaugauuaccccaaauauagcgaggagucuaagcucucccgggaacgcauugacggagugaaacuggagagcaugggcgucuaccagauccuggccauuuauucuaccguggcuuccagccucguucugcuugugucccugggggccaucucuuucuggaugugcagcaauggaucccuccaguguagaaucugcauuuga

SEQ ID NO: 200875 - RNA, 1701 nt, Artificial Sequence
  derived and/or modified CDS sequence (opt5) from hemagglutinin__InfluenzaA__AFJ75593
augaagaccaucauugcccugagcuacauccucugccugguguucgcucagaaacuucccggcaacgacuccucuacagccacgcugugucucgggcaccaugcggucccuaauggaaccauuguuaagacaaucaccaacgaucaaauugaggugacaaaugcuaccgaacuggugcagagcuccucuacaggcgagaucugcaacagcccgcaccagauccuugacggggaaaauuguacccugauugaugcccuccugggagacccccagugcgauggcuuucaaaacaaaaagugggaccuguucgucgagagauccaaagccuauucuaauuguuacccuuaugaugugcccgacuacgcuagccuccggucccugguugccagcucugggacgcuugaauuuaacaaugaguccuucaacuggaccggagugacacagaauggcaccagcucugcuugcauccgcagauccaacaauagcuuuuucucucggcugaacuggcucacacaucugaaguuuaaguauccugcccuuaaugucaccaugcccaacaacgagaaauucgauaagcuguacauuuggggcgugcaccauccugggacggacaaugaucagaucuuucucuaugcgcaggccuccggacgcauuacaguuagcaccaaaagaucccaacagacagugaucccgaacauuggcucucggccccgcgucagaaauaucccuagccggaucuccauuuacuggaccaucgugaagcccggggacauucugcugaucaacagcaccggaaaucucauugcuccucgcggcuacuucaaaaucagaucugggaaguccagcaucaugcggucugaugcccccauuggaaaguguaacagcgaaugcaucacaccgaauggcuccauuccuaacgacaaacccuuucagaaugugaaccgcaucacguauggcgcuuguccuagauacgucaagcagaauacccugaaacuugccacagggaugcggaacguucccgagaagcaaacccgcggaauuuucggcgcgaucgccggguuuaucgaaaauggaugggagggcaugguggacgggugguauggauucagacaccagaacucugagggcauuggccaggcugccgaucugaaaagcacacaagcugccaucgaccagauuaaugggaagcucaaccggcugaucggaaaaaccaacgaaaaguuccaccagauugagaaggaauuuuccgagguggaaggcagaauccaggaucuugagaaauacgucgaggacacgaagguggaucuguggagcuauaaugccgaacuccugguugcucuggagaaccaacauacaauugaccucaccgauucugaaaugaauaaacuguucgagaagaccaaaaagcagcuucgcgaaaacgcggaggacauggggaauggaugcuuuaagaucuaccacaaaugugauaacgccugcaucggcuccauucggaaugggacauaugaccaugauguguacagagacgaggcucugaacaaucgcuuccagaucaagggcgucgaacucaaaagcggauacaaggacuggauucuguggaucucuuuugccauuuccugcuuccuucuguguguggcccuccugggcuuuaucaugugggcuugccagaaagggaacauccgguguaauauuugcaucuga

SEQ ID NO: 200876 - RNA, 1698 nt, Artificial Sequence
  derived and/or modified CDS sequence (opt5) from hemagglutinin__InfluenzaA__AFJ75615
augaaggugaaacugcucguccugcuuugcaccuucacagccacguacgcugacaccaucuguguuggcuaucacgccaacaauagcacagauaccguggacacagugcuggagaagaacgucaccgugacacauuccguuaaucuccuggaaaacucucacaaugggaaacuuugccugcucaagggaauugcgccccugcagcugggcaacuguagcguggcuggguggauccucggaaauccugagugcgaacugcuuauuuccaaagagucuuggagcuacaucgucgaaaagccgaaccccgagaauggcaccuguuauccugggcauuuugccgauuacgaggaacugagagagcaacucuccucugugagcuccuucgaacgguuugagauuuuccccaaggagagcucuuggccuaaccacacgguuaccggaguguccgccagcugcucucauaauggcgaauccagcuuuuaucgcaaccugcuuuggcugacaggcaaaaaugggcucuaccccaaccugucuaaguccuaugcuaauaacaaagagaaggaaguccuggugcucuggggagugcaccacccuccgaacaucggcgaccagaaagcccuguaccauaccgagaaugcuuacgucagcguuguguccucucacuauagcagaaaguucacacccgaaaucgccaagcggccuaaagugcgcgaucaggaggggagaauuaacuacuauuggacccuucuggagcccggagacacgaucauuuuugaagcgaauggcaaccucaucgccccucgguacgcuuucgcccugucccgcggguuuggaagcggcauuaucaauucuaacgcucccauggauaagugugacgccaaaugccagacaccgcaaggcgcgauuaauuccagccuuccuuuccagaacguccaucccgugaccaucggggaguguccuaaguauguuagaucugccaaacugcggauggugacaggacuccgcaauauccccagcauucaguccagaggccuguuuggggcuaucgccggauucauugaaggcggguggaccggaauggucgauggcugguacggcuaucaccaccagaacgagcaagggucuggauacgcugccgaccaaaagagcacccagaaugccaucaacggcauuacaaauaaagugaacuccguuaucgaaaagaugaauacgcaguuuaccgagguggggaaggaguucaacaaacuggaacggcgcauggagaaccucaauaagaaagucgaugacggauucaucgauauuuggacauacaacgcugaacugcuugugcugcucgagaaugaaagaacccuggacuuucaugacagcaacgucaagaaucuuuaugagaaagugaagucucagcugaagaacaaugcgaaagagaucggcaacgggugcuucgaauuuuaccacaaguguaaugaugagugcauggaauccguuaaaaacggcacauaugacuaccccaaguauagcgaggagucuaaacucaaucgggaaaagauugauggagugaagcuggaguccaugggcgucuaccagauccuggccauuuauagcaccguggcuuccucucucguucugcuugugagccugggggccaucuccuucuggaugugcucuaacggaagccuccagugucgcaucugcauuuga

SEQ ID NO: 200877 - RNA, 1701 nt, Artificial Sequence; identical to SEQ ID NO: 197424
  derived and/or modified CDS sequence (opt5) from hemagglutinin__InfluenzaA__AFJ75630

SEQ ID NO: 200878 - RNA, 1701 nt, Artificial Sequence; identical to SEQ ID NO: 197424
  derived and/or modified CDS sequence (opt5) from hemagglutinin__InfluenzaA__AFJ75641

SEQ ID NO: 200879 - RNA, 1698 nt, Artificial Sequence
  derived and/or modified CDS sequence (opt5) from hemagglutinin__InfluenzaA__AFJ75651
augaaggugaaacugcucguccugcuuugcaccuucacagccacguacgcugacaccaucuguauuggcuaucacgccaacaauagcacagauaccguugacacagugcuggagaagaacgugaccgucacacauuccgugaaucuccuggaaaacucucacaaugggaaacuuugccugcucaagggaaucgcgccccugcagcugggcaacuguagcguugcuggguggauucucggaaauccugagugcgaacugcuuaucuccaaagagucuuggagcuacauuguggaaaagccgaaccccgagaauggcaccuguuauccugggcauuuugccgauuacgaggaacugagagagcaacucuccucugucagcuccuucgaacgguuugagaucuuccccaaggagagcucuuggccuaaccacacggugaccggaguuuccgccagcugcucucauaauggcgaauccagcuuuuaucgcaaccugcuuuggcugacaggcaaaaaugggcucuaccccaaccugucuaaguccuaugcuaauaacaaagagaaggaagugcugguccucuggggagugcaccacccuccgaacaucggcgaccagaaagcccuguacagaaccgagaaugcuuacgugagcgucguuuccucucauuauagccggaaguucacacccgaaauugccaagcgcccuaaagugagagaucaggaggggcggaucaacuacuauuggacccuucuggagcccggagacacgauuaucuuugaagcgaauggcaaccucauugccccucgcuacgcuuucgcccuguccagaggguuuggaagcggcaucauuaauucugaugcucccauggacaagugugaugccaaaugccagacaccgcaaggcgcgaucaacuccagccuuccuuuccagaaugugcaccccgucaccaucggggaguguccuaaguaugugcggucugccaaacugcgcaugguuacaggacucagaaacauucccagcauccagucccggggccuguuuggggcuauugccggauucaucgaaggcggguggaccggaaugguggacggcugguacggcuaucaucaccagaaugagcaagggucuggauacgcugccgaucaaaagagcacccagaacgccauuaauggcaucacaaacaaagucaauuccgugaucgaaaagaugaacacgcaguuuaccgcuguugggaaggaguucaauaaacuggagcgcagaauggaaaaccucaacaagaaaguggacgauggauucauugacaucuggacauacaaugcggagcugcuuguccugcucgaaaacgagcggacccuggacuuucacgauagcaaugugaagaaccuuuaugaaaaagucaagucucagcugaagaauaacgccaaagagauuggcaaugggugcuucgaguuuuaccauaaguguaacgacgaaugcauggaguccgugaaaaauggcacauaugauuaccccaaguauagcgaagagucuaaacucaaccgcgagaagaucgacggaguuaagcuggaauccaugggcguguaccagauucuggcuaucuauagcaccgucgccuccucucucgugcugcuuguuagccugggggccaucuccuucuggaugugcucuaauggaagccuccaguguagaauuugcaucuga

SEQ ID NO: 200880 - RNA, 1701 nt, Artificial Sequence
  derived and/or modified CDS sequence (opt5) from hemagglutinin__InfluenzaA__AFJ75662
augaagaccaucauugcccugagcuacauccucugccugguguucgcucagaaacuucccggcaacgacaauuccacagccacgcugugucucgggcaccaugcggucccuaacggaaccauuguuaagacaaucaccaaugaucaaauugaggugacaaacgcuaccgaacuggugcagucuagcuccacaggcgagaucugcgacucuccgcaccagauccuugauggggaaaauuguacccugauugacgcccuccugggagauccccagugcgacggcuuucaaaacaaaaagugggaucuguucgucgagagaagcaaagccuauuccaauuguuacccuuaugacgugcccgauuacgcuucucuccggagccugguugccuccagcgggacgcuugaauuuaacaaugagucuuucaacuggaccggagugacacagaauggcaccuccagcgcuugcauccgcagaucuaacaauuccuuuuucagccggcugaacuggcucacacaucugaaguuuaaguauccugcccuuaaugucaccaugcccaacaacgaggaguucgacaaacuguacauuuggggcgugcaccauccugggacggauaaugaccagaucuuucucuaugcgcaggccucuggacgcauuacaguuuccaccaagagaagccaacagacagugaucccgaacauuggcucccggccccgcgucagaaauaucccuucucggaucagcauuuacuggaccaucgugaaacccggggauauucugcugaucaacuccaccggaaaucucauugcuccucgcggcuacuucaagaucagaagcgggaaaucuuccaucaugcggagcgacgcccccauuggaaaguguaacucugaaugcaucacaccgaauggcagcauuccuaacgacaagcccuuucagaaugugaaccgcaucacguauggcgcuuguccuagauacgucaaacagaauacccugaaacuugccacagggaugcggaacguucccgaaaaacaaacccgcggaauuuucggcgcgaucgccggguuuaucgagaauggaugggagggcaugguggaugggugguauggauucagacaccagaacuccgaaggcacaggccaggcugccgaccugaagucuacccaagcugccauugaucagaucaaugggaaacucaaccggcugauuggaaagacgaacgagaaauuccaccagaucgaaaaggaguuuagcgaaguggagggccgcauucaggaccuugagaaguacgucgaagauacaaaaaucgaccugugguccuauaaugccgagcuccugguggcucuggaaaaccaacauaccauugaucucaccgacagcgagaugaauaagcuguucgaaaagacaaagaaacagcuuagagagaacgcggaggauauggggaauggaugcuuuaagaucuaccacaagugugacaacgccugcaucggcucuauucggaaugggaccuaugaucaugacguuuacagagacgaagcucugaacaaucgcuuccagaucaaaggcguggagcucaaguccggauacaaagauuggauucuguggaucagcuuugccauuucuugcuuccuucugugugucgcccuccugggcuuuaucaugugggcuugccagaaggggaacauccgguguaauauuugcaucuga

SEQ ID NO: 200881 - RNA, 1698 nt, Artificial Sequence
  derived and/or modified CDS sequence (opt5) from hemagglutinin__InfluenzaA__AFJ75673
augaaggugaaacugcucguccugcuuugcaccuucacagccacguacgcugacaccaucuguauuggcuaucacgccaacaauagcacagauaccguugacacagugcuggagaagaacgugaccgucacauacuccgugaaucuccuggaagauaaccauaaugggaaacuuugccugcucaagggaaucgcgccccugcagcugggcaacuguucuguugcuggguggauucucggaaauccugagugcgaacugcuuaucagcaaagaguccuggucuuauauuguggaaagaccgaaccccgagaauggcaccuguuacccugggcacuuugccgacuaugaggaacugcgggagcaacucagcuccgucucuagcuucgaacgcuuugagaucuuccccaaggaguccagcuggccuaaccauacggugaccggaguuucugccuccugcagccacaauggcgaaucuuccuuuuacaagaaccugcuuuggcugacaggcaaaaaugggcucuaucccaaccugagcaagucuuacgcuaauaacaaagagaaggaagugcugguccucuggggagugcaucacccuccgaacaucggcaaucagaugacccuguaccacaaagagaacgccuauguguccgucguuagcucccauuacucuagaaaguucacacccgaaauugcuaagcggccuaaagugcgcgaucaggaggggagaaucaauuauuacuggacccuucuggagcccggagacacgauuaucuuugaagccaacggcaaucucauugcgccucgguaugccuucgcucugaaccgcggguuuggaagcggcaucauuaauuccaacgcccccauggaugagugugacgcuaagugccagacaccgcaaggcgccaucaauagcucucuuccuuuccagaacgugcaccccgucaccaucggggaauguccuaaauacgugagauccgcgaagcugcggaugguuacaggacuccgcaauauucccagcauccagucuagaggccuguuuggggccauugcuggauucaucgagggcggguggaccggaaugguggauggcugguauggcuaccaucaccagaacgaacaagggagcggauacgccgcugaccagaaauccacccagaaugccauuaacggcaucacaaauaaggucaacucugugaucgagaaaaugaacacgcaguuuaccgccguugggaaggaguucaauaagcuggaacggcgcauggagaaccucaauaaaaagguggaugacggauucauugaugucuggacauauaacgcugaacugcuugugcugcucgagaaugaaagaacccuggacuuucacgacagcaacgucaaaaaucuuuacgagaaggugaaaacacaacugaagaacaaugcgaaggagaucggcaacgggugcuucgaauuuuaucauaaauguaaugaugagugcauggaauccguuaagaacggcaccuacgacuaucccaaauacagcgaggagucuaagcucucccgggagaaaauugauggagugaagcuggaaagcaugggcgucuaucagauccuggccauuuacucuacgguggcuuccagccucguucugcuugugucccugggggccaucucuuucuggaugugcagcaauggaucccuccagugucgcaucugcauuuga

SEQ ID NO: 200882 - RNA, 1701 nt, Artificial Sequence; identical to SEQ ID NO: 194741
  derived and/or modified CDS sequence (opt5) from hemagglutinin__InfluenzaA__AFJ76119

SEQ ID NO: 200883 - RNA, 1701 nt, Artificial Sequence; identical to SEQ ID NO: 195094
  derived and/or modified CDS sequence (opt5) from hemagglutinin__InfluenzaA__AFJ76131

SEQ ID NO: 200884 - RNA, 1701 nt, Artificial Sequence
  derived and/or modified CDS sequence (opt5) from hemagglutinin__InfluenzaA__AFJ76155
augaaggccauccuggugguccuccuguacaccuucgcuacagccaacgcggacacgcuuugcauuggcuaucacgcuaauaacagcaccgauacaguugacaccgugcuggagaaaaaugugacagucacccauuccgugaaccuccuggaagauaagcacaaugggaaacuuuguaagcugagaggaaucgcuccccuccaucugggcaaaugcaacauugccggguggauccugggaaauccugagugugaaucucucagcacagccuccucuuggagcuacauuguugagaccuccucuagcgacaacggcacgugcuauccgggggauuuuaucgacuacgaagaacugcgggagcagcuuuccagcgugucuuccuucgaacgcuuugagaucuuccccaagaccagcucuuggccuaaucacgauuccaacaagggagucacagccgcuuguccccaugccggcgcgaaaucuuuuuauaagaaucugauuuggcucgugaaaaagggcaacagcuacccuaaacuguccaagagcuauaucaaugacaaggggaaagaaguucuugugcuguggggcauucaccaccccuccaccucugccgaucaacagagccucuaccagaacgcugacgccuacgucuucgugggaacauccagauauagcaagaaauuuaagccugagaucgcuauucggccgaaagugcgcgagcaggaagggagaaugaauuacuauuggacccuggucgagcccggagauaagaucacguucgaagccacaggcaaccugguugugccucgguacgcguuugccauggagcgcaaagcugggucuggaauuaucaucuccgacacccccgugcaugauugcaacacaaccugucaaaccccuaagggcgccauuaauacaagccuccccuuccagaacauccacucuauuacgaucggcaagugcccgaaauaugucaagagcaccaaacugagacuugcuacagggcugcggaaugugccuuccauucagucucgcggacucuuuggcgccaucgccggguucaucgaaggaggcuggaccgggaugguugacggaugguacggcuaucaucaccagaacgagcaaggcagcggguacgcugcggaccugaaguccacacagaaugccauugaugagaucaccaacaaagugaauagcgucauugaaaagaugaacacgcaguuuacagcugugggaaaggaguucaaucaccuugagaaaagaaucgagaaccugaauaagaaaguugacgauggcuuccucgacauuuggaccuacaacgccgaacugcuggugcuccuggagaaugagcggacccuugauuaucaugacucuaacgucaagaaucuguacgaaaaagugcgcucccagcucaagaacaacgccaaggagaucgggaauggauguuuugaguucuaucacaaaugcgauaacacauguauggaaagcgucaagaauggcaccuacgacuaucccaaauacucugaagaggcuaagcugaacagagaggaaaucgauggggugaaacuugaguccacacggauuuaucaaauccuggccauuuacagcacgguugcguccucucucgugcuggucgugagccugggcgcuaucuccuuuuggaugugcucuaauggaagccuccagugccgcauuuguaucuga

SEQ ID NO: 200885 - RNA, 1698 nt, Artificial Sequence
  derived and/or modified CDS sequence (opt5) from hemagglutinin__InfluenzaA__AFJ76186
augaaggugaaacugcucguccugcuuugcaccuucacagccacguacgcugacaccaucuguauuggcuaucacgccaacaauagcacagauaccguugacacagugcuggagaagaacgugaccgucacacauuccgugaaucuccuggaaaacucucacaaugggaaacuuugccugcucaagggaaucgcgccccugcagcugggcaacuguagcguugcuggguggauucucggaaauccugagugcgaacugcuuaucuccaaagagucuuggagcuacauuguggaaaagccgaaccccgagaauggcaccuguuauccugggcauuuugccgauuacgaggaacugagagagcaacucuccucugucagcuccuucgaacgguuugagaucuuccccaaggagagcucuuggccuaaccacacggugaccggaguuuccgccagcugcucucauaauggcgaauccagcuuuuaucgcaaccugcuuuggcugacaggcaaaaaugggcucuaccccaaccugucuaaguccuaugcuaauaacaaagagaaggaagugcugguccucuggggagugcaccacccuccgaacaucggcgaccagaaagcccuguaccauaccgagaaugcuuacgugagcgucguuuccucucacuauagcagaaaguucacacccgaaauuaccaagcggccuaaagugcgcgaucaggaggggagaaucaacuacuauuggacgcuucuggagcccggagacacaauuaucuuugaagccaauggcaaccucauugcgccucgguacgccuucgcucugucccgcggguuuggaagcggcaucauuaauucugaugcccccauggacaagugugaugcuaaaugccagaccccgcaaggcgccaucaacuccagccuuccuuuccagaaugugcaucccgucacaaucggggaguguccuaaguaugugagaucugcgaaacugcggaugguuaccggacuccgcaacauucccagcauccaguccagaggccuguuuggggccauugcuggauucaucgaaggcggguggaccggaaugguggacggcugguacggcuaucaccaccagaaugagcaagggucuggauacgccgcugaucaaaagagcacacagaacgccauuaauggcaucacgaacaaagucaauuccgugaucgaaaagaugaacacccaguuuacagccguugggaaggaguucaauaaacuggagcggcgcauggaaaaccucaacaagaaaguggacgauggauucauugacaucuggaccuacaaugcugagcugcuuguccugcucgaaaacgagagaacacuggacuuucaugauagcaaugugaagaaccuuuaugaaaaagucaagucucagcugaagaauaacgcgaaagagauuggcaaugggugcuucgaguuuuaccacaaguguaacgacgaaugcauggaguccgugaaaaauggcaccuaugauuaccccaaguauagcgaagagucuaaacucaaccgggagaagaucgacggaguuaagcuggaauccaugggcguguaccagauucuggccaucuauagcacggucgcuuccucucucgugcugcuuguuagccugggggccaucuccuucuggaugugcucuaauggaagccuccagugucgcauuugcaucuga

SEQ ID NO: 200886 - RNA, 1701 nt, Artificial Sequence; identical to SEQ ID NO: 194741
  derived and/or modified CDS sequence (opt5) from hemagglutinin__InfluenzaA__AFJ76203

SEQ ID NO: 200887 - RNA, 1701 nt, Artificial Sequence
  derived and/or modified CDS sequence (opt5) from hemagglutinin__InfluenzaA__AFJ76213
augaagaccaucauugcccugagcuacauccucugccugguguucgcucagaaacuucccggcaacgacaauuccacagccacgcugugucucgggcaccaugcggucccuaacggaaccauuguuaagacaaucaccaaugaucaaauugaggugacaaacgcuaccgaacuggugcagucuagcuccacaggcgggaucugcgacucuccgcaccagauccuugauggagagaauuguacccugauugacgcccuccugggcgauccccagugcgacggguuucaaaacaaaaagugggaucuguucgucgaaagaagcaaagccuauuccaauuguuacccuuaugacgugcccgauuacgcuucucuccggagccugguugccuccagcggaacgcuugaguuuaacaaugaaucuuucgacuggaccggcgugacacagaacggcaccuccagcgcuugcaagcgcagaucuaauaaguccuuuuucagccggcugaacuggcucacacauucuaaauauaaguacccugcccugaaugucaccaugcccaacaaugagaaauuugauaagcuguauaucuggggagugcaccauccugggacggacuccgaucagauuagccuguacgcgcaggccuccggccgcaucacaguuucuaccaaaagaagccaacagacagugauuccgaacaucgggucccggccccgcgucagagacgugagcucucggauuuccaucuacuggaccaucgugaagccuggagacauucuccugaucaacagcaccggcaaucugauugcuccccgcggguauuucaagaucagaucuggaaaaagcuccauuaugcggucugaugccccuaucggcaaguguaacagcgagugcaucacacccaauggcuccauuccgaacgacaaaccuuuucagaaugucaaccgcaucacguacggggcuugucccagauauguuaagcagaauacccucaaacuggccacaggaaugcggaacgugccugaaaagcaaacccgcggcauuuucggggcgaucgccggauuuauugagaauggcugggaagggaugguggauggaugguacggcuucagacaccagaacagcgagggcacagggcaggcugccgaccuuaaaucuacccaagcugccaucaaucagaucaacggaaagcugaaucggcucauuggcaagacgaacgagaaauuucaccagaucgaaaaggaguucuccgaagucgaggggcgcauucaggaucuggaaaaauauguggaggacacaaagaucgaucuuuggagcuacaaugccgagcugcucguugcucuggaaaaccaacauaccauugaccugaccgauucugagaugaacaaacucuucgaaagaacaaagaagcagcugcgggagaaugcggaagacaugggaaacggcugcuuuaaaaucuaucacaagugugauaaugccugcauuggguccaucagaaacggcaccuacgaccaugacguguaccgcgaugaggcucuuaauaaccgguuccagaucaaaggagucgagcuuaagagcggcuauaaagacuggauucucuggaucuccuuugccauuucuugcuuccugcuuuguguggcccugcucggguuuaucaugugggcuugccagaagggaaauauuagauguaacaucugcaucuga

SEQ ID NO: 200888 - RNA, 1701 nt, Artificial Sequence
  derived and/or modified CDS sequence (opt5) from hemagglutinin__InfluenzaA__AFJ77408
augaagaccaucauugcccugagcuacauccucugccugauuuucgcucagaaacuucccggcaacgacaauuccacagccacgcugugucucgggcaccaugcggugccuaacggaacccuggucaagacaaucaccaaugaucaaauugagguuacaaacgcuaccgaacuugugcagucuagcuccacaggcagaaucugcaauucuccgcaccggauccuggacggggagaacuguacccucauugaugcccugcugggagacccccauugcgauggcuuucagaauaaagaaugggaccucuucguggagcgcagcaaggccuauuccaacuguuacccuuaugauguccccgacuacgcuucucugagaagccuuguggccuccagcgggacgcuggaauuuaccaaagagggauucaauuggacaggcguugcucaggauggcaagucuuauuccugcaagcgggggagcgugaacuccuuuuucucucgccucaauuggcugcacaaacuugaguacaaguauccugcccugaacgucaccaugcccaauaacgacaaauuugauaagcucuacaucuggggagugcaucacccuagcacagacucugaucaaaccucccuguacguucaggcgagcggcagagugacggucuccacaaaacggucucagcagaccgugauuccgaauaucgggagccgccccugggugagaggaauuuccagccggaucucuauuuauuggacaaucgucaagccuggcgacauccugcucauuaacuccaccgggaaccugaucgcuccccgcggauacuucaagauuagaaauggcaaaagcucuaucaugcggagcgacgccccuauuggcaacuguaauuccgaaugcaucacccccaacgggucuaucccgaaugauaagccuuuucaaaacguuaaucgcauuacauauggagccugucccagauacgugaaacagaacacgcuuaagcuggcuaccggcaugcggaaugugccugagaaacagacacgcgggaucuucggagccauugcgggcuuuaucgaaaacgggugggagggaauggucgacggcugguauggcuucagacaccagaauagcgaggggaccggacaagccgcugaucucaaguccacacaggccgcuauuaaccagaucaauggcaaacugaaccggcuuaucgaaaagaccaaugagaaguuucaucaaauugaaaaagaguucagcgaaguggaggggagaauccaggaccuggagaaguacguugaagauacgaaaauugaccucuggucuuauaacgccgagcugcugguggcccucgaaaaccagcacacaaucgaucugaccgacuccgagaugaauaaacuuuucgaacgcacccggaagcagcugagagagaacgcugaggauaugggaaauggcugcuuuaagauuuaccauaagugugacaacgcgugcaucgggagcauucgcaauggcacauacgaucacgacgucuaucgggacgaagcccucaacaauagauuccaaaucaaaggaguggagcugaagucuggcuacaaagauuggauccuuuggauuuccuuugcuaucagcugcuuccugcucuguguugugcugcugggguuuauuaugugggccugccagaagggaaacauccgcuguaauauuugcaucuga

SEQ ID NO: 200889 - RNA, 1701 nt, Artificial Sequence
  derived and/or modified CDS sequence (opt5) from hemagglutinin__InfluenzaA__AFJ77430
augaagaccaucauugcccugagcuacauccucugccugauuuucgcucagaaacuucccggcaacgacaauuccacagccacgcugugucucgggcaccaugcggugccuaacggaacccuggucaagacaaucaccaaugaucaaauugagguuacaaacgcuaccgaacuugugcagucuagcuccacaggcagaaucugcgacucuccgcaccggauccuggauggggagaauuguacccucauugacgcccugcugggagaucccaacugcgacggcuuucagaauaaagaaugggaucucuucguggagcgcagcaaggccuauuccaacuguuacccuuaugacguccccgauuacgcuucucugagaagccuuguggccuccagcgggacgcuggaauuuaccaaagagggauucaauuggacaggcguugcucaggacggcaagucuuauuccugcaagcgggggagcgugaacuccuuuuucucucgccucaauuggcugcauaaacuugaguacaaguauccugcccugaacgucaccaugcccaauaacgauaaauuugacaagcucuacaucuggggagugcaccauccuagcacagauucugaccaaauuucccuguacgcgcaggccagcggcagaguuaccguguccacgaaacggucucagcagacagucaucccgaauauugggagccgccccugggugagaggaaucuccagccggauuucuaucuauuggaccaucgugaagccuggcgacauucugcucaucaacuccacagggaaccugauugcuccccgcggauacuucaagaucagaaauggcaaaagcucuauuaugcggagcgaugccccuaucggcaacuguaauuccgaaugcaucacccccaacgggucuauuccgaaugacaagccuuuucaaaacgucaaucgcaucaccuauggagcuugucccagauacguuaaacagaacacacuuaagcuggccacgggcaugcggaaugugccugagaaacagacccgcgggauuuucggagcgaucgccggcuuuauugaaaacgggugggagggaaugguggauggcugguauggcuucagacaccagaauagcgaggggacaggacaagcugccgaccucaaguccacccaggcugccaucaaccagaucaauggcaaacugaaccggcuuauugaaaagacaaaugagaaguuucaccaaaucgaaaaagaguucagcgaagucgaggggcgcauucaggaucuggagaaguacguggaagacaccaaaaucgaucucuggucuuauaacgccgagcugcugguugcucucgaaaaccagcauacgauugaccugacagauuccgagaugaauaaacuuuucgaaagaacccggagacagcugcgcgagaacgcggaggacaugggaaauggcugcuuuaagaucuaccacaagugugauaacgccugcauugggagcauccggaauggcaccuacgaccaugacguguauagagaugaagcucucaacaaucgcuuccaaaucaagggagucgagcugaaaucuggcuacaaggacuggauucuuuggaucuccuuugccauuagcugcuuccugcucugugugguucugcugggguuuaucaugugggccugccagaaaggaaacauucgguguaauaucugcaucuga

SEQ ID NO: 200890 - RNA, 1701 nt, Artificial Sequence
  derived and/or modified CDS sequence (opt5) from hemagglutinin__InfluenzaA__AFJ77440
augaagaccaucauugcccugagcuacauccucugccugguguucgcucagaaacuucccggcaacgacaauuccacagccacgcugugucucgggcaccaugcggucccuaacggaacccugguuaagacaauuaccaaugaucaaaucgaggugacaaacgcuaccgaacuugugcagucuagcuccacaggcagaauuugcgacucuccgcaccggauccuggaugggaaaaauuguacccucaucgacgcccugcugggagauccccauugcgacggcuuucagaacaaggagugggaucucuucgucgaacgcagcaaagccuauuccaauuguuacccuuaugacgugcccgauuacgcuucucugagaagccuuguugccuccagcgggacgcuggaguuuaccucugaaggauucaacuggacaggcguggcucaggacggcaccuccuaugccugcaagcgggggagcgucaagucuuucuucucccgccucaauuggcugcacaaacuugaguacaaguauccugcgcugaacgugacaaugcccaauaacgauaaauuugacaagcucuacauuuggggaguucaucacccuagcaccgauucugaccaaacgucccuguacgugcaggccagcggcagagucacaguguccaccaaacggucucagcagacagugaucccgaauauugggagccgccccugggucagaggaguuuccagccggaucucuauuuauuggaccaucgugaagccuggcgacauucugcucaucaacuccaccgggaaucugaucgcuccccgcggauacuucaagauuagaagcggcaaaucuagcaucaugcgguccgaugccccuauuggcaacuguaacucugagugcaucacacccaaugggagcauuccgaacgacaagccuuuucaaaaugugaaccgcaucacguauggagcuugucccagauacgucaaacagaauacccuuaagcuggccacaggcaugcggaacgugccugaaaaacagacccgcgggaucuucggagcgauugccggcuuuaucgagaaugggugggaaggaaugguugauggcugguauggcuucagacaccagaacuccgaggggacaggacaagcugccgaccucaagagcacccaggcugccauuaaucagaucaacggcaaacugaaucggcuuauugagaagacgaacgaaaaguuucaucaaaucgagaaagaauuuucugagguggaagggagaauccaggaucuggagaaguacgucgaggacacaaaaauugaucucugguccuauaaugccgaacugcugguggcucucgagaaccagcacaccaucgaccugaccgauagcgaaaugaauaaacuuuucgagcgcacacggaagcagcugagagaaaacgcggaggacaugggaaacggcugcuuuaagauuuaccauaagugugauaaugccugcaucgggucuauucgcaacggcaccuacgaccacgacguuuaucgggaugaggcucucaauaacagauuccaaaucaaaggaguggaacugaaguccggcuacaaagacuggauucuuuggaucagcuuugccaucuccugcuuccugcucugugucgugcugcugggguuuauuaugugggccugccagaagggaaauauccgcuguaacauuugcaucuga

SEQ ID NO: 200891 - RNA, 1701 nt, Artificial Sequence
  derived and/or modified CDS sequence (opt5) from hemagglutinin__InfluenzaA__AFJ77451
augaagaccaucauugcccugagcuacauccucugccugguguucgcucagaaacuucccggcaacgacaauuccacagccacgcugugucucgggcaccaugcggucccuaacggaacccugguuaagacaauuaccaaugaucaaaucgaggugacaaacgcuaccgaacuugugcagucuagcuccacaggcagaauuugcgacucuccgcaccggauccuggaugggaaaaauuguacccucaucgacgcccugcugggagauccccauugcgacggcuuucagaacaaggagugggaucucuucgucgaacgcagcaaagccuauuccaauuguuacccuuaugacgugcccgauuacgcuucucugagaagccuuguugccuccagcgggacgcuggaguuuaacaaugaaucuuucaacuggaccggaguggcucagaauggcacauccuaugccugcaagcggcgcagcgucaaguccuuuuucucuagacucaacuggcugcacaaacuugaguacaaguauccugcgcugaaugugaccaugcccaacaaugacaaauuugauaagcucuacauuuggggcguucaucacccuagcacagacucugaucaaaccucccuguacgugcaggccagcgggcgggucacgguguccacaaaacgcucucagcagaccgugaucccgaacauuggaagcagacccuggguccggggcguuuccagccgcaucucuauuuauuggacaaucgugaagccuggggacauucugcucaucaacuccaccggaaaucugaucgcucccagaggcuacuucaagauucggagcgggaaaucuagcaucaugcgcuccgacgccccuauuggaaacuguaauucugagugcaucacccccaacggcagcauuccgaaugauaagccuuuucaaaacgugaauagaaucacauauggcgcuuguccccgguacgucaaacagaacacgcuuaagcuggccaccgggaugcgcaaugugccugaaaaacagacaagaggaaucuucggcgcgauugccggguuuaucgagaacggaugggaaggcaugguugacgggugguauggauuccggcaccaaaauuccgagggcaccggccaggcugccgaucucaagagcacacaggcugccauuaaccagaucaaugggaaacugaacagacuuauugagaagaccaauggaaaguuucaucaaaucgaaaaagaguucucugaaguggagggccgcauccaggaccuggaaaaguacgucgaggauacgaaaauugaccucugguccuauaacgccgagcugcugguggcucucgaaaaccagcacacaaucgaucugaccgacagcgagaugaauaaacuuuucgaacggaccagaaagcagcugcgcgagaacgcggaagauauggggaauggaugcuuuaagauuuaccauaagugugacaacgccugcaucggcucuauucggaaugggacauacgaucacgacguuuauagagacgaggcucucaacaaucgcuuccaaaucaaaggcguggagcugaaguccggauacaaagauuggauucuuuggaucagcuuugccaucuccugcuuccugcucugugucgugcugcugggcuuuauuaugugggccugccagaaggggaacauccgguguaauauuugcaucuga

SEQ ID NO: 200892 - RNA, 1701 nt, Artificial Sequence
  derived and/or modified CDS sequence (opt5) from hemagglutinin__InfluenzaA__AFJ77462
augaagaccaucauugcccugagcuacauccucugccugguguucgcucagaaacuucccggcaacgacaauuccacagccacgcugugucucgggcaccaugcggucccuaacggaacccugguuaagacaauuaccaaugaucaaaucgaggugacaaacgcuaccgaacuugugcagucuagcuccacaggcagaauuugcgacucuccgcaccggauccuggaugggaaaaauuguacccucaucgacgcccugcugggagauccccauugcgacggcuuucagaacaaggagugggaucucuucgucgaacgcagcaaagccuauuccaauuguuacccuuaugacgugcccgauuacgcuucucugagaagccuuguugccuccagcgggacgcuggaguuuaccaacgaaggauucaauuggacaggcguggcucaggacggcaccucuuaugccugcaagcggggguccgucaagagcuuuuucucucgccucaacuggcugcacaaacuugaguacaaguauccugcgcugaaugugacaaugcccaacaaugauaaauuugacaagcucuacauuuggggaguucaucacccuuccaccgauagcgaccaaacgucucuguacgugcaggccuccggcagagucacagugagcaccaaacggucccagcagacagugaucccgaacauugggucucgccccugggucagaggaguuagcucccggaucagcauuuauuggaccaucgugaagccuggcgacauucugcucaucaauucuaccgggaaccugaucgcuccccgcggauacuucaagauuagauccggcaaaagcucuaucaugcggagcgaugccccuauuggcaacuguaauuccgagugcaucacacccaacgggucuauuccgaaugacaagccuuuucaaaacgugaaucgcaucacguauggagcuugucccagauacgucaaacagaacacccuuaagcuggccacaggcaugcggaaugugccugaaaaacagacccgcgggaucuucggagcgauugccggcuuuaucgagaacgggugggaaggaaugguugauggcugguauggcuucagacaccagaauagcgaggggacaggacaagcugccgaccucaaguccacccaggcugccauuaaccagaucaauggcaaacugaaccggcuuauugagaagacgaaugaaaaguuucaucaaaucgagaaagaguucagcgaaguggaagggagaauccaggaucuggagaaguacgucgaggacacaaaaauugaucucuggucuuauaacgccgaacugcugguggcucucgagaaucagcacaccaucgaccugaccgauuccgaaaugaacaaacuuuucgagcgcacacggaagcagcugagagaaaacgcggaggacaugggaaauggcugcuuuaagauuuaccauaagugugauaacgccugcaucgggagcauucgcaauggcaccuacgaccacgacguuuaucgggaugaggcucucaacaauagauuccaaaucaaaggaguggaacugaagucuggcuacaaagacuggauucuuuggaucuccuuugccaucagcugcuuccugcucugugucgugcugcugggguuuauuaugugggccugccagaagggaaacauccgcuguaauauuugcaucuga

SEQ ID NO: 200893 - RNA, 1701 nt, Artificial Sequence
  derived and/or modified CDS sequence (opt5) from hemagglutinin__InfluenzaA__AFJ77473
augaagaccaucauugcccugagcuacauccucugccagguguucgcucaaaaacugcccggcaacgacaauuccacagccacgcuuugucuggggcaccaugcggucccuaacggaacccucguuaagacaauuaccaaugaucagaucgaggugacaaacgcuaccgaacuggugcagucuagcuccacaggcagaauuugcgacucuccgcaccagauccuugauggggagaauuguacccugaucgacgcccuccugggagauccccauugcgacggcuuucaaaacaaagaaugggaucuguucgucgagcggagcaaggccuauuccaauuguuacccuuaugacgugcccgauuacgcuucucuccgcagccugguugccuccagcgggacgcuugaauuuaacaaugagucuuucaacuggaccggaguggcucagaauggcacauccagcgccugcaaaagacggucuauuaaguccuuuuucagccgccugaacuggcuccaccagcugaaguauaaauacccugcgcuuaaugucaccaugcccaacaaugagaaguuugacaaacuguauaucuggggcgugcaucacccuucuacagauuccgaccagauuagccucuacgcccaagccuccgggagaguuaccgugucuacgaagcggagccagcagacagucaucccgaacauuggaucccgccccugggugagaggcgugagcucucggaucuccauuuacuggaccaucgucaaaccuggggauauccugcugauuaacagcacaggaaaucucaucgcuccccgcggcuauuucaagauuagaucuggaaagagcuccaucaugcggucugacgcuccuauugggaaauguaacagcgaaugcaucacccccaauggcuccaucccgaacgacaagccuuuucagaauguuaaccgcauuaccuacggcgccugucccagauaugugaaacaaaauacacugaaacuugcgacggggaugcggaacgugccugagaagcagacccgcggaaucuucggcgccauugcuggguuuaucgaaaauggaugggagggcauggucgaugggugguacggauucagacaccagaacagcgagggcacaggccaagccgcugaccugaagucuacccaggccgccauuaaucagaucaacgggaaacucaaucggcugaucgaaaagacaaacgagaaguuucaucagauugaaaaagaguucuccgaaguggagggaagaauccaagaucuugagaaguauguugaagacaccaaaauugaucuguggagcuacaaugcugagcuccugguggcgcuggaaaaccagcacacgaucgaccucacagauucugagaugaacaagcuguucgaacgcaccaaaaagcagcuucgggagaaugccgaggacaugggcaacgggugcuuuaagauuuaucauaaaugugauaaugcuugcaucggauccauuagaaacggcaccuacgaccacgaugucuaccgcgacgaagcccugaauaaccgguuccagaucaaggggguggagcucaaaagcggcuauaaggacuggauccuguggauuuccuuugccaucucuugcuuccuucuguguguugugcuccugggauuuauuaugugggcuugccaaaaaggcaauaucagauguaacauuugcaucuga

SEQ ID NO: 200894 - RNA, 1701 nt, Artificial Sequence; identical to SEQ ID NO: 192258
  derived and/or modified CDS sequence (opt5) from hemagglutinin__InfluenzaA__AFJ77484

SEQ ID NO: 200895 - RNA, 1701 nt, Artificial Sequence; identical to SEQ ID NO: 192260
  derived and/or modified CDS sequence (opt5) from hemagglutinin__InfluenzaA__AFJ77495

SEQ ID NO: 200896 - RNA, 1701 nt, Artificial Sequence; identical to SEQ ID NO: 192258
  derived and/or modified CDS sequence (opt5) from hemagglutinin__InfluenzaA__AFJ77506

SEQ ID NO: 200897 - RNA, 1701 nt, Artificial Sequence
  derived and/or modified CDS sequence (opt5) from hemagglutinin__InfluenzaA__AFJ77517
augaagaccaucauugcccugagcuacauccucugccugguguucgcucagaaaauucccggcaacgacaauuccacagccacgcuuugucuggggcaccaugcggucccuaacggaacccucguuaagacaaucaccaaugaucaaauugaggugacaaacgcuaccgaacuggugcagucuagcuccacaggcagaaucugcgacucuccgcaccggauccuugauggggagaauuguacccugauugacgcccuccugggagauccccauugcgacggcuuucagaacaaagaaugggaucuguucgucgagcgcagcaaggccuauuccaauuguuacccuuaugacgugcccgauuacgcuucucucagaagccugguugccuccagcgggacgcuugaauuuaacaaugagucuuucaacuggaccggaguggcucagaauggcacauccaacgccugcaaacggcgcagcaugaagucuuucuucuccagacugaauuggcuccaccaacugaaguauaaauacccugcgcuuaacgucaccaugcccaauaacgacaaguuugauaaacuguauaucuggggcgugcaucacccuagcacagacucugaucagaccucccucuacgcccaggcuagcgggcggguuacgguguccacacagcgcucucaacagaccgucauuccgaacaucggaagcagacccugggugcggggcguguccagccgcauuucuaucuacuggacaauugucaagccuggggacauccugcugaucaauuccaccggaaaccucauugcccccagaggcuauuucaaaauccggagcgggaagucuagcauuauccgcuccgacgcuccuauuggaaaguguaauucugagugcaucacccccaacggcagcaucccgaaugauaaaccuuuucagaacguuaauagaauuacauacggcgccuguccccgguaugugaagcagaacacgcugaaacuugcgaccgggaugcgcaaugugccugaaaagcaaacaagaggaaucuucggcgccauugcuggguuuaucgagaacggaugggaaggcauggucgacgggugguacggauuccggcaccaaaauuccgagggcaccggccaggccgcugaucugaaaagcacacaggccgccauuaaccagaucaaugggaagcucaacagacugaucgagaaaaccaaugaaaaguuucaucagauugagaaggaauuuucugagguggaaggacgcauccaggaccuugagaaauauguugaggauacgaagauugaccugugguccuacaacgcugaacuccugguggcgcuggagaaccaacacacaaucgaucucaccgacagcgaaaugaauaaacuguucgagcggaccagaaagcagcuucgcgaaaacgccgaggauaugggcaaugggugcuuuaaaauuuaucauaagugugacaacgcuugcaucggaucuauucggaauggcacauacgaucacgacgucuacagagacgaggcccugaacaaucgcuuccagaucaaggggguggaacucaaauccggcuauaaggauuggauccuguggauuagcuuugccauguccugcuuccuucuguguguugugcuccugggauuuaucaugugggcuugccagaaaggcaacauucgguguaauaucugcauuuga

SEQ ID NO: 200898 - RNA, 1701 nt, Artificial Sequence; identical to SEQ ID NO: 192095
  derived and/or modified CDS sequence (opt5) from hemagglutinin__InfluenzaA__AFJ77528

SEQ ID NO: 200899 - RNA, 1698 nt, Artificial Sequence
  derived and/or modified CDS sequence (opt5) from hemagglutinin__InfluenzaA__AFJ77550
augaagaccaucauugcccugagcuacauccucugccagguguucgcucaaaaacugcccggcaacgacaauuccacagccacgcuuugucuggggcaccaugcggucccuaacggaacccucguuaagacaauuaccaaugaucagaucgaggugacaaacgcuaccgaacuggugcagucuagcuccacaggcagaauuugcgacucuccgcaccagauccuugauggggagaauuguacccugaucgacgcccuccugggagauccccauugcgacggcuuucaaaacaaagaaugggaucuguucgucgagcggagcaaggccuauuccaauuguuacccuuaugacgugcccgauuacgcuucucuccgcagccugguugccuccagcgggacgcuugaauuuaacaaugagucuuucaacuggaccggaguggcucagaauggcacauccagcgccugcaaaagacggucuauuaaguccuuuuucagccgccugaacuggcuccaccagcugaaguauaaauacccugcgcuuaaugucaccaugcccaacaaugagaaguuugacaaacuguauaucuggggcgugcaucacccuucuacagauuccgaccagauuagccucuacgcccaagccuccgggagaguuaccgugucuacgaagcggagccagcagacagucaucccgaacauuggaucccgccccugggugagaggcgugagcucucggaucuccauuuacuggaccaucgucaaaccuggggauauccugcugauuaacagcacaggaaaucucaucgcuccccgcggcuauuucaagauuagaucuggaaagagcuccaucaugcggucugacgcuccuauugggaaauguaacagcgaaugcaucacccccaauggcuccaucccgaacgacaagccuuuucagaauguuaaccgcauuaccuacggcgccugucccagauaugugaaacaaaauacacugaaacuugcgacggggaugcggaacgugccugagaagacccgcggaaucuucggcgccauugcuggguuuaucgaaaauggaugggagggcauggucgaugggugguacggauucagacaccagaacagcgagggcacaggccaggccgcugaccugaagucuacccaagccgccauuaaucagaucaacgggaaacucaaucggcugaucgaaaagacaaacgagaaguuucaucagauugaaaaagaguucuccgaaguggagggaagaauccaggaucuugagaaguauguugaagacaccaaaauugaucuguggagcuacaaugcugagcuccugguggcgcuggaaaaccaacacacgaucgaccucacagauucugagaugaacaagcuguucgaacgcaccaaaaagcagcuucgggagaaugccgaggacaugggcaacgggugcuuuaagauuuaucauaaaugugauaaugcuugcaucggauccauuagaaacggcaccuacgaccacgaugucuaccgcgacgaagcccugaauaaccgguuccagaucaaggggguggagcucaaaagcggcuauaaggacuggauccuguggauuuccuuugccaucucuugcuuccuucuguguguugugcuccugggauuuauuaugugggcuugccagaaaggcaauaucagauguagcauuugcaucuga

SEQ ID NO: 200900 - RNA, 1701 nt, Artificial Sequence
  derived and/or modified CDS sequence (opt5) from hemagglutinin__InfluenzaA__AFJ77561
augaagaccaucauugcccugagcuacauccucugccugguguucgcucagaaacuucccggcaacgacaauuccacagccacgcugugucucgggcaccaugcggucccuaacggaacccugguuaagacaauuaccaaugaucaaaucgaggugacaaacgcuaccgaacuugugcagucuagcuccacaggcagaauuugcgacucuccgcaccggauccuggaugggaaaaauuguacccucaucgacgcccugcugggagauccccauugcgacggcuuucagaacaaggagugggaucucuucgucgaacgcagcaaagccuauuccaauuguuacccuuaugacgugcccgauuacgcuucucugagaagccuuguugccuccagcgggacgcuggaguuuaacaaugaaucuuucaacuggaccggaguggcucagaauggcacauccuaugccugcaagcggcgcagcgucaagucuuucuucuccagacucaacuggcugcacaaacuugaguacaaguauccugcgcugaaugugaccaugcccaacaaugacaaauuugauaagcucuacauuuggggcguucaucacccuagcacagacucugaucaaaccucccuguacgcccaggcuagcgggcgggugacggucuccacaaaacgcucucagcagaccgugaucccgaacauuggaagcagacccugggugcggggcgucuccagccgcaucucuauuuauuggacaaucguuaagccuggggacauucugcucaucuacuccaccggaaaccugaucgcccccagaggcuauuucaagauucggagcgggaaaucuagcaucaugcgcuccgacgcuccuauuggaaauuguucuagcgagugcaucacccccaacggcuccauuccgaaugauaagccuuuucaaaacgugaauagaaucacauacggcgccuguccccgguaugugaaacagaacacgcuuaagcuggcgaccgggaugcgcaaugucccugaaaaacagacaagaggaaucuucggcgccauugcuggguuuaucgagaacggaugggaaggcaugguggacgggugguacggauuccggcaccagaauagcgagggcaccggccaagccgcugaucucaagucuacacaggccgccauuaaccagaucaaugggaaacugaacagacuuauugagaagaccaaugaaaaguuucaucaaaucgagaaagaauuuuccgagguugaaggacgcauccaggaccuggagaaguauguggaggauacgaaaauugaccucuggagcuacaacgcugaacugcuggucgcgcucgagaaucagcacacaaucgaucugaccgacucugaaaugaacaagcuguucgagcggaccagaaaacagcugcgcgaaaacgccgaggauaugggcaaugggugcuuuaagauuuaccauaagugugacaacgcuugcaucggauccauucggaauggcacauaugaucacgacguguacagagacgaggcccucaacaaucgcuuccaaaucaaagggguugaacuuaagagcggcuauaaagauuggauucuuuggaucuccuuugccaucucuugcuuccugcucugugugguccugcugggauuuauuaugugggcuugccagaagggcaacauccgguguaauauuugcaucuga

SEQ ID NO: 200901 - RNA, 1698 nt, Artificial Sequence
  derived and/or modified CDS sequence (opt5) from hemagglutinin__InfluenzaA__AFJ77572
augaagaccaucauugcccugagcuacauccucugccagguguucgcucaaaaacugcccggcaacgacaauuccacagccacgcuuugucuggggcaccaugcggucccuaacggaacccucguuaagacaauuaccaaugaucagaucgaggugacaaacgcuaccgaacuggugcagucuagcuccacaggcagaauuugcgacucuccgcaccagauccuugauggggagaauuguacccugaucgacgcccuccugggagauccccauugcgacggcuuucaaaacaaagaaugggaucuguucgucgagcggagcaaggccuauuccaauuguuacccuuaugacgugcccgauuacgcuucucuccgcagccugguugccuccagcgggacgcuugaauuuaacaaugagucuuucaacuggaccggaguggcucagaauggcacauccagcgccugcaaaagacggucuauuaaguccuuuuucagccgccugaacuggcuccaccagcugaaguauaaauacccugcgcuuaaugucaccaugcccaacaaugagaaguuugacaaacuguauaucuggggcgugcaucacccuucuacagauuccgaccagauuagccucuacgcccaagccuccgggagaguuaccgugucuacgaagcggagccagcagacagucaucccgaacauuggauccggccccugggugcgcggggugagcucuagaaucuccauuuacuggaccaucgucaaaccuggagauauccugcugauuaacagcacaggcaaucucaucgcuccccggggguauuucaagauucgcucuggaaagagcuccaucaugagaucugacgcuccuauuggcaaauguaacagcgaaugcaucacccccaauggcuccaucccgaacgacaagccuuuucagaauguuaaccggauuaccuacggggccuguccccgcuaugugaaacaaaauacacugaaacuugcgacgggaaugagaaacgugccugagaagacccggggcaucuucggggccauugcuggauuuaucgaaaauggcugggaggggauggucgauggaugguacggcuuccgccaccagaacagcgagggcacagggcaggccgcugaccugaagucuacccaagccgccauuaaucagaucaacggaaaacucaauagacugaucgaaaagacaaacgagaaguuucaucagauugaaaaagaguucuccgaaguggagggccggauccaggaucuugagaaguauguugaagacaccaaaauugaucuguggagcuacaaugcugagcuccugguggcgcuggaaaaccaacacacgaucgaccucacagauucugagaugaacaagcuguucgaaagaaccaaaaagcagcuucgcgagaaugccgaggacauggggaacggaugcuuuaagauuuaucauaaaugugauaaugcuugcaucggcuccauucggaacgggaccuacgaccacgaugucuacagagacgaagcccugaauaaccgcuuccagaucaagggcguggagcucaaaagcggauauaaggacuggauccuguggauuuccuuugccaucucuugcuuccuucuguguguugugcuccugggcuuuauuaugugggcuugccagaaagggaauauccgguguagcauuugcaucuga

SEQ ID NO: 200902 - RNA, 1701 nt, Artificial Sequence
  derived and/or modified CDS sequence (opt5) from hemagglutinin__InfluenzaA__AFJ77583
augaagaccaucauuacacugagcuacauccucugccugguguucgcccagaaacuucccgucaaggacaacuccacggcuacccugugucucggccaccaugccguuccuaaugggacacuggugaaaaccauuacaaacgaucacaucgaggugaccaaugcgacagaacuuguccaaucuagcuccaccggaagaauuugcgacucuccgcaucagauccuggauggcgagaacuguacgcucaucgacgcucugcugggggauccccacugcgacggauuucagaauaaggaaugggaucucuucguggagcggagcaccgccuauuccaacuguuacccuuaugacguucccgauuacgccucucugcgcagccuuguggcuuccagcggcacacuggaauuuaauaacgagucuuucaauuggaccggggucgcccagaacggaacauccagcgcuugcaaaagacggucuauuaaguccuuuuucagccgccucaauuggcugcaucaacuuaaguauaaauacccugcccugaacgugaccaugcccaauaacgagaaguuugacaaacucuauaucuggggcguucaccacccuucuacggauuccgaccagauuagccuguacgcgcaggccuccggcagagugacagucucuaccaagcggagccagcaaacagugaucccgaauauugggucccgccccugggugagaggagucagcucucggaucuccauuuacuggaccaucguuaaaccuggcgauauccugcucauuaacagcaccgggaaccugaucgcuccccgcggauauuucaagauuagaucuggcaagagcuccaucaugcggucuaaugccccuauugggaaauguaacagcgaaugcaucacacccaauggauccaucccgaacgacaagccuuuucagaaugugaaccgcauuacguacggcgcuugucccagauaugugaaacagaauacccuuaagcuggccacaggcaugcggaacgucccugagaaacagacccgcgggaucuucggagcgauugccggcuuuaucgaaaaugggugggagggaaugguggacggcugguacggguucagacaucaaaacagcgagggaacaggccaggcugccgaucucaagucuacccaggcugccauuaaucaaaucaacggcaaacugaaucggcuuaucgaaaagacgaacgagaaguuucaccagauugaaaaagaguucuccgaaguugaggggagaauccaggaccuggagaaguauguggaagauacaaaaauugaccucuggagcuacaaugccgagcugcuggucgcucucgaaaaccagcauaccaucgaucugaccgacucugagaugaacaagcuguucgaacgcacacggaaacaacugagagagaaugcggaggauaugggaaacggcugcuuuaagauuuaucacaagugugacaaugccugcaucggguccauucgcaacggaaccuacgaucacgacguguaccgggaugaagcucucaauaacagauuccagaucaaaggcguugagcuuaagagcggguauaaagacuggauccuuuggauuuccuuugccaucucuugcuuccugcucugugugguccugcugggcuuuauuaugugggccugccagaagggaaauauccgcuguaacauuugcaucuga

SEQ ID NO: 200903 - RNA, 1701 nt, Artificial Sequence
  derived and/or modified CDS sequence (opt5) from hemagglutinin__InfluenzaA__AFJ77594
augaagaccaucauugcccugagcuacauccucugccugguguucgcucagaaacuucccgucaaggacaacuccacagccacgcugugucucggccaccaugcgguuccuaaugggacccuggugaaaacaauuaccaacgaucacaucgaggugacaaaugcuaccgaacuuguccaaucuagcuccacaggaagaauuugcgacucuccgcaucagauccuggauggcgagaacuguacccucaucgacgcccugcugggggauccccacugcgacggauuucagaauaaggaaugggaucucuucguggagcggagcacggccuauuccaacuguuacccuuaugacguucccgauuacgcuucucugcgcagccuuguggccuccagcggcacccuggaauuuaauaacgagucuuucaauuggacaggggucgcucagaacggaaccuccagcgccugcaaaagacggucuauuaaguccuuuuucagccgccucaauuggcugcaucaacuuaaguauaaauacccugcgcugaacgugacaaugcccaauaacgagaaguuugacaaacucuauaucuggggcguucaccacccuucuaccgauuccgaccagauuagccuguacgcccaggcuuccggcagagugacggucucuacaaagcggagccagcaaaccgugaucccgaauauugggucccgccccugggugagaggagucagcucucggaucuccauuuacuggacaaucguuaaaccuggcgauauccugcucauuaacagcaccgggaaccugaucgcuccccgcggauauuucaagauuagaucuggcaagagcuccaucaugcggucuaaugccccuauugggaaauguaacagcgaaugcaucacccccaauggauccaucccgaacgacaagccuuuucagaaugugaaccgcauuacauacggcgccugucccagauaugugaaacagaauacgcuuaagcuggcgaccggcaugcggaacgucccugagaaacagacacgcgggaucuucggagccauugcuggcuuuaucgaaaaugggugggagggaaugguggacggcugguacggguucagacaucaaaacagcgagggaaccggccaggccgcugaucucaagucuacacaggccgccauuaaucaaaucaacggcaaacugaaucggcuuaucgaaaagaccaacgagaaguuucaccagauugaaaaagaguucuccgaaguugaggggagaauccaggaccuggagaaguauguggaagauacgaaaauugaccucuggagcuacaaugcugagcugcuggucgcgcucgaaaaccagcauacaaucgaucugaccgacucugagaugaacaagcuguucgaacgcacccggaaacaacugagagagaaugccgaggauaugggaaacggcugcuuuaagauuuaucacaagugugacaaugcuugcaucggguccauucgcaacggaacauacgaucacgacguguaccgggaugaagcccucaauaacagauuccagaucaaaggcguugagcuuaagagcggguauaaagacuggauccuuuggauuuccuuugccaucucuugcuuccugcucugugugguccugcugggcuuuauuaugugggcuugccagaagggaaauauccgcuguaacauuugcaucuga

SEQ ID NO: 200904 - RNA, 1701 nt, Artificial Sequence
  derived and/or modified CDS sequence (opt5) from hemagglutinin__InfluenzaA__AFJ77605
augaagaccaucauugcccugagcuacauccucugccugauuuucgcucagaaacuucccggcaacgacaauuccacagccacgcugugucucgggcaccaugcggugccuaacggaacccuggucaagacaaucaccaaugaucaaauugagguuacaaacgcuaccgaacuugugcagucuagcuccacaggcaaaaucugcgacucuccgcaccagauccuggauggggagaauuguacccucauugacgcccugcugggagauccccauugcgacggcuuucagaacaaggaaugggaucucuucguggagagaagcaaagccuauuccaauuguuacccuuaugacguccccgauuacgcuucucugcggagccuuguggccuccagcgggacgcuggaauuuaacaaugagucuuucaacuggaccggaguugcucaaaauggcacauccagcgccugcaagcgcagaucuaacaaguccuuuuucagccggcucaauuggcugcaccagcuuaaauauaaguacccugcgcugaacgugaccaugcccaauaacgagaaauuugacaagcucuauaucuggggcguccaucacccuucuacagauuccgaccagauuagccuguacgcccaggcuuccgggcgcgugaccguuucuacgaaaagaagccaacagacagugaucccgaacauuggaucccggcccuggguccgcggcgugagcucuagaaucuccauuuacuggaccaucgugaagccuggggauauccugcucauuaauagcacaggaaaccugaucgcuccccggggcuauuucaagauucgcucugggaaaagcuccaucaugagaucugacgccccuauuggaaaguguaauagcgaaugcaucacccccaacggcuccaucccgaaugacaaaccuuuucagaacgucaaucggauuaccuacggcgccuguccccgcuauguuaagcagaacacacuuaaacuggcgacggggaugagaaaugugccugagaagcaaacccggggaaucuucggcgccauugcuggguuuaucgaaaacggaugggagggcaugguggaugggugguacggauuccgccaccagaauagcgagggcacaggccaggccgcugaccucaaaucuacccaagccgccauuaaccagaucaaugggaagcugaacagacuuaucgaaaagacaaaugagaaauuucaucagauugaaaaggaguucuccgaagucgagggacggauccaggaucuggagaaauauguggaagacaccaagauugaucucuggagcuacaacgcugagcugcugguugcgcucgaaaaccaacacacgaucgaccugacagauucugagaugaauaaacuuuucgaaagaaccaagaagcagcugcgcgagaacgccgaggacaugggcaaugggugcuuuaaaauuuaucauaagugugauaacgcuugcaucggauccauucggaauggcaccuacgaccacgauguguacagagacgaagccgucaacaaucgcuuccagaucaaagggguggagcucaagagcggcuauaaagacuggauccuguggauuuccuuugccaucucuugcuuccuucuguguguugugcuccugggauuuauuaugugggcuugccagaagggcaacauccgguguaauauuugcaucuga

SEQ ID NO: 200905 - RNA, 1701 nt, Artificial Sequence
  derived and/or modified CDS sequence (opt5) from hemagglutinin__InfluenzaA__AFJ77616
augaagaccaucauugcccugagcuacauccucugcauggugcuggcucagaaacuucccgucaaggacaacuccacagccacgcugugucucggccaccaugcgguuccuaaugggacccuggugaaaacaauuaccaacgaucacaucgaggugacaaaugcuaccgaacuuguccaaucuagcuccacaggaagaauuugcgacucuccgcaucagauccuggauggcgagaacuguacccucaucgacgcccugcugggggauccccacugcgacggauuccagaauaaggaaugggaucucuuuguggagcggagcacggccuauuccaacuguuacccuuaugacguucccgauuacgcuucucugcgcagccuuguggccuccagcggcacccuggaguucaauaacgaaucuuuuaauuggacaggggucgcucagaacggaaccuccagcgccugcaaaagacggucuauuaaguccuucuuuagccgccucaauuggcugcaucaacuuaaguauaaauacccugcgcugaacgugacaaugcccaauaacgagaaguucgacaaacucuauaucuggggcguucaccacccuucuaccgauuccgaccagauuagccuguacgcccaggcuuccggcagagugacggucucuacaaagcggagccagcaaaccgugaucccgaauauugggucccgccccugggugagaggagucagcucucggaucuccauuuacuggacaaucguuaaaccuggcgauauccugcucauuaacagcaccgggaaccugaucgcuccccgcggauauuuuaagauuagaucuggcaagagcuccaucaugcggucuaaugccagcauugggaaauguaacuccgaaugcaucaccccuaauggaagcauccccaacgacaagccguuccagaaugugaaccgcauuacauacggcgccuguccuagauaugugaaacagaauacgcuuaagcuggcgaccggcaugcggaacguccccgagaaacagacacgcgggaucuuuggagccauugcuggcuucaucgaaaaugggugggagggaaugguggacggcugguacggguuuagacaucaaaacucugagggaaccggccaggccgcugaucucaaguccacacaggccgccauuaaucaaaucaacggcaaacugaaucggcuuaucgaaaagaccaacgagaaguuccaccagauugaaaaagaguuuagcgaaguugaggggagaauccaggaccuggagaaguauguggaagauacgaaaauugaccucuggucuuacaaugcugagcugcuggucgcgcucgaaaaccagcauacaaucgaucugaccgacuccgagaugaacaaacuuuucgaacgcacccggaagcaacugagagagaaugccgaggauaugggaaacggcugcuucaagauuuaucacaagugugacaaugcuugcaucgggagcauucgcaacggaacauacgaucacgacguguaccgggaugaagcccucaauaacagauuucagaucaaaggcguugagcugaaguccggguauaaagacuggauccuuuggauuucuuucgccaucagcugcuuucugcucugugugguccugcugggcuucauuaugugggcuugccagaagggaaauauccgcuguaacauuugcaucuga

SEQ ID NO: 200906 - RNA, 1701 nt, Artificial Sequence
  derived and/or modified CDS sequence (opt5) from hemagglutinin__InfluenzaA__AFJ77627
augaagaccaucauugcccugagcuacauccucugccuggugcuugcucagaaacugcccgucaaggacaacuccacagccacgcucugucugggccaccaugcgguuccuaaugggacccuugugaaaacaauuaccaacgaucacaucgaggugacaaaugcuaccgaacugguccaaucuagcuccacaggaagaauuugcgacucuccgcaucagauccucgauggcgagaacuguacccugaucgacgcccugcucggggauccccacugcgacggauuccagaauaaggaaugggaucuguuuguggagcggagcacggccuauuccaacuguuacccuuaugacguucccgauuacgcuucucuucgcagccugguggccuccagcggcacccucgaguucaauaacgaaucuuuuaauuggacaggggucgcucagaacggaaccuccagcgccugcaaaagacggucuauuaaguccuucuuuagccgccugaauuggcuucaucaacugaaguauaaauacccugcgcucaacgugacaaugcccaauaacgagaaguucgacaaacuguauaucuggggcguucaccacccuucuaccgauuccgaccagauuagccuguacgcccaggcuuccggcagagugacggucucuacaaagcggagccagcaaaccgugaucccgaauauugggucccgccccugggugagaggagucagcucucggaucuccauuuacuggacaaucguuaaaccuggcgauauccuccugauuaacagcaccgggaaccuuaucgcuccccgcggauauuuuaagauuagaucuggcaagagcuccaucaugcggucuaaugccagcauugggaaauguaacuccgaaugcaucaccccuaauggaagcauccccaacgacaagccguuccagaaugugaaccgcauuacauacggcgccuguccuagauaugugaaacagaauacgcugaagcucgcgaccggcaugcggaacguccccgagaaacagacacgcgggaucuuuggagccauugcuggcuucaucgaaaaugggugggagggaaugguggacggcugguacggguuuagacaucaaaacucugagggaaccggccaggccgcugaucugaaguccacacaggccgccauuaaucaaaucaacggcaaacuuaaucggcugaucgaaaagaccaacgagaaguuccaccagauugaaaaagaguuuagcgaaguugaggggagaauccaggaccucgagaaguauguggaagauacgaaaauugaccuguggucuuacaaugcugagcugcucgucgcgcuggaaaaccagcauacaaucgaucuuaccgacuccgagaugaacaagcuguucgaacgcacccggaaacaacucagagagaaugccgaggauaugggaaacggcugcuucaagauuuaucacaagugugacaaugcuugcaucgggagcauucgcaacggaacauacgaucacgacguguaccgggaugaagcccugaauaacagauuucagaucaaaggcguugagcuuaaguccggguauaaagacuggauccuguggauuucuuucgccaucagcugcuuucuccugugugugguccugcucggcuucauuaugugggcuugccagaagggaaauauccgcuguaacauuugcaucuga

SEQ ID NO: 200907 - RNA, 1701 nt, Artificial Sequence
  derived and/or modified CDS sequence (opt5) from hemagglutinin__InfluenzaA__AFJ77638
augaagaccaucauugcccugagcuacauccucugccugguguucgcucagaaacuucccggcaacgacaauuccacagccacgcugugucucgggcaccaugcggucccuaacggaacccugguuaagacaauuaccaaugaucaaaucgaggugacaaacgcuaccgaacuugugcagucuagcuccacaggcagaauuugcgacucuccgcaccagauccuggauggggagaauuguacccucaucgacgcccugcugggagauccccauugcgacggcuuucagaacaaagaaugggaucucuucgucgagcggagcaaggccuauuccaauuguuacccuuaugacgugcccgauuacgcuucucugcgcagccuuguugccuccagcgggacgcuggaauuuaacaaugagucuuucaacuggaccggaguggcucaaaauggcacauccagcgccugcaaaagacggucuaacaaguccuuuuucagccgccucaauuggcugcaccagcuuaaguauaaauacccugcgcugaacgucaccaugcccaauaacgagaaguuugacaaacucuauauuuggggcgugcaucacccuucuacagauuccgaccagaucagccuguacgcccaggcuuccgggagaguuaccgugucuacgaagcggagccaacagacagucauuccgaacaucggaucccgccccugggugagaggcgugagcucucggauuuccaucuacuggaccauugucaaaccuggggauauccugcucaucaauagcacaggaaaccugauugcuccccgcggcuauuucaagaucagaucuggaaagagcuccauuaugcggucugacgccccuaucgggaaauguaauagcgaaugcaccacccccaacggcuccauuccgaaugacaagccuuuucagaacguuaaucgcaucacauacggcgccugucccagauaugugaaacagaacacgcuuaagcuggcgaccgggaugcggaaugugccugagaaacaaacacgcggaaucuucggcgccauugcuggguuuaucgaaaacggaugggagggcauggucgaugggugguacggauucagacaccagaauagcgagggcaccggccaggccgcugaccucaagucuacacaagccgccauuaaccagaucaaugggaaacugaaccggcuuauuggaaagaccaaugaaaaguuucaucagaucgagaaagaguucuccgaaguggaaggcagaauccaggaucuggagaaguauguugaggacacgaaaauugaucucuggagcuacaacgcugaacugcugguggcgcucgagaaccaacacacaaucgaccugaccgauucugaaaugaauaaacuuuucgagcgcaccaagaagcagcugcgggaaaacgccgaggacauggggaauggaugcuuuaagauuuaucauaaaugugauaacgcuugcaucggcuccauuagaaaugggacauacgaccacgaugucuaccgcgacgaggcccucaacaaucgguuccagaucaagggcguggaacugaaaagcggauauaaggacuggauucuuuggaucuccuuugccaucucuugcuuccugcucuguguugugcugcugggcuuuauuaugugggcuugccagaaagggaacaucagauguaauauuugcaucuga

SEQ ID NO: 200908 - RNA, 1701 nt, Artificial Sequence
  derived and/or modified CDS sequence (opt5) from hemagglutinin__InfluenzaA__AFJ77649
augaagaccaucauugcccugagcuacauccucugccugguguucgcucagaaacuucccggcaacgacaauuccacagccacgcugugucucgggcaccaugcggucccuaacggaacccugguuaagacaauuaccaaugaucaaaucgaggugacaaacgcuaccgaacuugugcagucuagcuccacaggcagaauuugcgacucuccgcaccagauccuggauggggagaauuguacccucaucgacgcccugcugggagauccccauugcgacggcuuucagaacaaagaaugggaucucuucgucgagcggagcaaggccuauuccaauuguuacccuuaugacgugcccgauuacgcuucucugcgcagccuuguugccuccagcgggacgcuggaauuuaacaaugagucuuucaacuggaccggaguggcucaaaauggcacauccagcgccugcaaaagacggucuaacaaguccuuuuucagccgccucaauuggcugcaccagcuuaaguauaaauacccugcgcugaacgucaccaugcccaauaacgagaaguuugacaaacucuauauuuggggcgugcaucacccuucuacagauuccgaccagaucagccuguacgcccaggcuuccgggagaguuaccgugucuacgaagcggagccaacagacagucauuccgaacaucggaucccgccccugggugagaggcgugagcucucggauuuccaucuacuggaccauugucaaaccuggggauauccugcucaucaauaacacaggaaaucugauugcccccagaggcuauuucaagaucagaaacggaaagagcucuauuaugcggagcgacgcuccuaucgggaaauguaauuccgaaugcauuacccccaacggcucuaucccgaaugacaagccuuuucagaacguuaaucgcaucaccuacggcgccugucccagauaugugaaacagaacacacuuaagcuggcgacggggaugcggaaugugccugagaaacaaacccgcggaauuuucggcgccaucgcuggguuuauugaaaacggaugggagggcauggucgaugggugguacggauucagacaccagaauagcgagggcacaggccaggccgcugaccucaaguccacccaagccgccaucaaccagauuaaugggaaacugaaccggcuuaucggaaagacaaacgaaaaguuucaucagaucgagaaagaguucagcgaaguggaaggccgcauucaggaucuggagaaguauguugaggacaccaaaaucgaucucuggucuuacaaugcugaacugcugguggcgcucgagaaccaacacacgauugaccugacagauuccgaaaugaauaaacuuuucgagcgcaccaagaagcagcugcgggaaaacgccgaggacauggggaauggaugcuuuaagaucuaucauaaaugugauaacgcuugcauuggcagcaucagaaaugggaccuacgaccacgaugucuaccgcgacgaggcccucaacaaucgguucaagauuaaaggcguggaacugaagucuggauauaaagacuggauccuuuggaucuccuuugccauuagcugcuuccugcucuguguugugcugcugggcuuuaucaugugggcuugccagaaggggaacauuagauguaauaucugcauuuga

SEQ ID NO: 200909 - RNA, 1701 nt, Artificial Sequence; identical to SEQ ID NO: 192275
  derived and/or modified CDS sequence (opt5) from hemagglutinin__InfluenzaA__AFJ77660

SEQ ID NO: 200910 - RNA, 1701 nt, Artificial Sequence; identical to SEQ ID NO: 192275
  derived and/or modified CDS sequence (opt5) from hemagglutinin__InfluenzaA__AFJ77671

SEQ ID NO: 200911 - RNA, 1701 nt, Artificial Sequence; identical to SEQ ID NO: 192275
  derived and/or modified CDS sequence (opt5) from hemagglutinin__InfluenzaA__AFJ77682

SEQ ID NO: 200912 - RNA, 1701 nt, Artificial Sequence
  derived and/or modified CDS sequence (opt5) from hemagglutinin__InfluenzaA__AFJ77693
augaagaccaucauugcccugagcuacauccucugccugguguucgcucagaaacuucccgucaacgacaauuccacagccacgcugugucucggccaccauaccguuccuaacgggacacuggugaagaccauuacaaaugauaacaucgaggugaccaaugcgacagaacuuguccaaucuagcuccaccggaagaauuugcgacucuccgcaccagauccuggauggcgagaacuguacgcucaucgacgcucugcugggggauccccauugcgacggauuucagaauaaagaaugggaucucuucguggagcggagcaccgccuauuccaacuguuacccuuaugacguucccgauuacgccucucugcgcagccuuguggcuuccagcggcacacuggaauuuaauaacgagucuuucaauuggaccggggucgaccagaacggaacauccagcgccugcaagagacggucuaauaaauccuuuuucagccgccucaacuggcugcaccaacuuaaguauaaguacccugcucugaaugugaccaugcccaacaacgagaaauuugauaagcucuauauuuggggcguucaucacccuucuacggacuccgaucagaucagccuguacgcccaggcguccggcagagugacagucucuaccaaacggagccagcaaacagugauuccgaauaucgggucccgccccugggugagaggagucagcucucggauuuccaucuacuggaccauuguuaagccuggcgacauccugcucaucaacagcaccgggaaucugauugcccccagaggauauuucaaaaucagaucuggcaagagcuccauuaugcggucuaacgcuccuaucgggaaguguaauagcgaaugcauuacacccaacggauccaucccgaaugacaaaccuuuucagaacgugaaucgcaucacguacggcgccugucccagauaugugaagcagaacacccuuaaacuggcuacaggcaugcggaaugucccugagaagcagacccgcgggauuuucggagccaucgcgggcuuuauugaaaacgggugggagggaaugguggauggcugguacggguucagacaccaaaauuuugagggaacaggccaggccgcugaccucaaaagcacccaggccgcuaucaaccaaauuaauggcaagcugaaccggcuuaucgagaaaacgaacgaaaaguuccaucagaucgaaaaggaguucucugaaguugaggggcgcauucaggaucuggagaaauauguggaagacacaaagaucgaucucugguccuacaaugccgagcugcuggucgcccucgaaaaccagcacaccauugaccugaccgauagcgagaugaauaaacuuuuugaacgcacacggaagcaacugagagagaacgcugaggacaugggaaauggcugcuucaaaaucuaucauaagugugauaacgcgugcauugggucuauccgcaauggaaccuacgaccacgauguguaccgggacgaagcccucaacaauagauuucagauuaagggcguugagcugaaauccggguauaaggacuggauccuuuggaucagcuucgcuauuuccugcuuucugcucugugugguccugcugggcuucaucaugugggccugccagaaaggaaacauucgcuguaauaucugcauuuga

SEQ ID NO: 200913 - RNA, 1701 nt, Artificial Sequence; identical to SEQ ID NO: 192275
  derived and/or modified CDS sequence (opt5) from hemagglutinin__InfluenzaA__AFJ77704

SEQ ID NO: 200914 - RNA, 1701 nt, Artificial Sequence; identical to SEQ ID NO: 200753
  derived and/or modified CDS sequence (opt5) from hemagglutinin__InfluenzaA__AFJ77715

SEQ ID NO: 200915 - RNA, 1701 nt, Artificial Sequence; identical to SEQ ID NO: 200753
  derived and/or modified CDS sequence (opt5) from hemagglutinin__InfluenzaA__AFJ77726

SEQ ID NO: 200916 - RNA, 1701 nt, Artificial Sequence; identical to SEQ ID NO: 200849
  derived and/or modified CDS sequence (opt5) from hemagglutinin__InfluenzaA__AFJ77737

SEQ ID NO: 200917 - RNA, 1701 nt, Artificial Sequence; identical to SEQ ID NO: 192104
  derived and/or modified CDS sequence (opt5) from hemagglutinin__InfluenzaA__AFJ77748

SEQ ID NO: 200918 - RNA, 1701 nt, Artificial Sequence; identical to SEQ ID NO: 192104
  derived and/or modified CDS sequence (opt5) from hemagglutinin__InfluenzaA__AFJ77759

SEQ ID NO: 200919 - RNA, 1701 nt, Artificial Sequence
  derived and/or modified CDS sequence (opt5) from hemagglutinin__InfluenzaA__AFJ77781
augaagaccaucauugcccugagcuacauccucugccugguguucgcucagaaacuucccggcaacgacaauuccacagccacgcugugucucgggcaccaugcggucccuaacggaaccauuguuaagacaaucaccaaugaucaaauugaggugacaaacgcuaccgaacuggugcagucuagcuccacaggcgggaucugcgacucuccgcaccagauccuugauggagagaauuguacccugauugacgcccuccugggcgauccccagugcgacggguuucaaaacaaaaagugggaucuguucgucgaaagaagcaaagccuauuccaauuguuacccuuaugacgugcccgauuacgcuucucuccggagccugguugccuccagcggaacgcuugaguuuaacucugaauccuucgacuggaccggcgugacacagaauggcaccagcucugcuugcaagcgcagauccaacaagagcuuuuucucucggcugaauuggcucacacaucugaaauauaaguacccugcccuuaacgucaccaugcccaauaacgagaaauuugauaagcuguauaucuggggagugcaccauccugggacggacuccgaucagauuagccucuacgcgcaggccuccggccgcaucacaguuucuaccaaaagaagccaacagacagugauuccgaauaucgggucccggccccgcgucagagacgugagcucucggauuuccaucuacuggaccaucgugaagccuggagacauucugcugaucaacagcaccggcaaccucauugcuccccgcggguauuucaagaucagaucuggaaaaagcuccauuaugcggucugaugccccuaucggcaaguguaauagcgagugcaucacacccaacggcuccauuccgaaugacaaaccuuuucagaacgucaaucgcaucacguacggggcuugucccagauauguuaagcagaacacccugaaacuugccacaggaaugcggaaugugccugaaaagcaaacccgcggcauuuucggggcgaucgccggauuuauugagaacggcugggaagggaugguggauggaugguacggcuucagacaccagaauagcgagggcacagggcaggcugccgaccugaaaucuacccaagcugccaucaaccagaucaauggaaagcucaaccggcugauuggcaagacgaaugagaaauuucaccagaucgaaaaggaguucuccgaagucgaggggcgcauucaggaucuugaaaaauauguggaggacacaaagaucgaucuguggagcuacaacgccgagcuccugguugcucuggaaaaucaacauaccauugaccucaccgauucugagaugaacaaacuguucgaaagaacaaagaagcagcuucgggagaacgcggaagacaugggaaauggcugcuuuaaaaucuaucacaagugugauaacgccugcauuggguccaucagaaauggcaccuacgaccaugacguguaccgcgaugaggcucugaacaaucgguuccagaucaaaggagucgagcucaagagcggcuauaaagacuggauucuguggaucuccuuugccauuucuugcuuccuucuguguguggcccuccugggguuuaucaugugggcuugccagaagggaaacauuagauguaauaucugcaucuga

SEQ ID NO: 200920 - RNA, 1701 nt, Artificial Sequence; identical to SEQ ID NO: 193867
  derived and/or modified CDS sequence (opt5) from hemagglutinin__InfluenzaA__AFJ77792

SEQ ID NO: 200921 - RNA, 1701 nt, Artificial Sequence; identical to SEQ ID NO: 193867
  derived and/or modified CDS sequence (opt5) from hemagglutinin__InfluenzaA__AFJ77803

SEQ ID NO: 200922 - RNA, 1701 nt, Artificial Sequence; identical to SEQ ID NO: 193867
  derived and/or modified CDS sequence (opt5) from hemagglutinin__InfluenzaA__AFJ77814

SEQ ID NO: 200923 - RNA, 1701 nt, Artificial Sequence; identical to SEQ ID NO: 193867
  derived and/or modified CDS sequence (opt5) from hemagglutinin__InfluenzaA__AFJ77825

SEQ ID NO: 200924 - RNA, 1701 nt, Artificial Sequence; identical to SEQ ID NO: 193867
  derived and/or modified CDS sequence (opt5) from hemagglutinin__InfluenzaA__AFJ77836

SEQ ID NO: 200925 - RNA, 1701 nt, Artificial Sequence; identical to SEQ ID NO: 193867
  derived and/or modified CDS sequence (opt5) from hemagglutinin__InfluenzaA__AFJ77847

SEQ ID NO: 200926 - RNA, 1701 nt, Artificial Sequence
  derived and/or modified CDS sequence (opt5) from hemagglutinin__InfluenzaA__AFJ77858
augaagaccaucauugcccugagcuacauccucugccugguguucgcucagaaacuucccggcaacgacaauuccacagccacgcugugucucgggcaccaugcggucccuaacggaaccauuguuaagacaaucaccaaugaucaaauugaggugacaaacgcuaccgaacuggugcagucuagcuccacaggcgggaucugcgacucuccgcaccagauccuugauggagagaauuguacccugauugacgcccuccugggcgauccccagugcgacggguuucaaaacaaaaagugggaucuguucgucgaaagaagcaaagccuauuccaauuguuacccuuaugacgugcccgauuacgcuucucuccggagccugguugccuccagcggaacgcuugaguuuaacaaugaaucuuucaacuggaccggcgugacacagaauggcaccuccagcgcuugcaagcgcagaucuaacaauuccuuuuucagccggcugaacuggcucacacaucugaaguuuaaauauccugcccuuaaugucaccaugcccaacaacgagaaguucgacaaacuguacaucuggggagugcaccauccugggacggauaaugaccagauuucucucuaugcgcaggccuccggccgcaucacaguuagcacccaaagaucccagcagacagugauuccgaacaucgggucucggccccgcgucagagauauuccuagccggaucuccaucuacuggaccauugugaagcccggagacaugcugcugaucaauagcaccggcaaccucauugcuccucgcggguacuuuaaaaucagaucuggaaaguccagcauuaugcggucugacgcccccaucggcaaguguaauagcgagugcaucacaccgaacggcuccauuccuaaugauaaacccuuccagaacgugaaucgcaucacguauggggcuuguccuagauacgucaagcaaaacacccugaaacuugccacaggaaugcggaauguucccgaaaagcagacccgcggcauuuuuggggcgaucgccggauucauugagaacggcugggaagggaugguggacggaugguauggcuuuagacaccaaaauucugagggcacagggcaggcugccgaucugaaaagcacccaggcugccaucaaccagaucaauggaaagcucaacaaacugauuggcaagacgaacgagaaguuccaccagaucgaaaaagaguucuccgaaguggaggggcggauucaagaccuugaaaaguacgucgaggauacaaaaaucgaccuguggagcuauaaugccgagcuccugguggcucuggaaaaccagcauaccauugaucucaccgacucugagaugaauaagcuguuugaaagaaccaaaaagcagcuucgcgagaacgcggaagauaugggaaauggcugcuucaagaucuaccacaaaugugacaacgccugcauuggguccauccggaauggcacauaugaucaugacguuuacagagacgaggcucugaacaaucgcuuucagaucaagggaguggagcucaaaagcggcuacaaggauuggauucuguggaucucuuucgccauuuccugcuuucuuuucugugucgcccugcucggguuuaucaugugggcuugccaaaaaggaaacauucgguguaauaucugcaucuga

SEQ ID NO: 200927 - RNA, 1701 nt, Artificial Sequence
  derived and/or modified CDS sequence (opt5) from hemagglutinin__InfluenzaA__AFJ77869
augaagaccaucauugccuucagcuacauccugugccucguguuugcucagaaacugcccggcaacgacaauuccacagccacgcuuugucuggggcaccaugcggucccuaacggaaccauuguuaagacaaucaccaaugaucaaauugaggugacaaacgcuaccgaacucgugcagucuagcuccacaggcgggaucugcgacucuccgcaccagauccuggauggagagaauuguacccuuauugacgcccugcucggcgauccccagugcgacggguuccaaaacaaaaagugggaucuguuugucgaaagaagcaaagccuauuccaauuguuacccuuaugacgugcccgauuacgcuucucugcggagccucguugccuccagcggaacgcuggaguucaacaaugaaucuuuuaacuggaccggcgugacacagaauggcaccuccagcgcuugcaagcgcagaucuaacaauuccuucuuuagccggcuuaacuggcugacacaucucaaguucaaauauccugcccugaaugucaccaugcccaacaacgagaaguuugacaaacuuuacaucuggggagugcaccauccugggacggauaaugaccagauuucucuguaugcgcaggccuccggccgcaucacaguuagcaccaagagaucccaacagacagugauuccgaacaucgggucucggccccgcgucagagauauuccuagccggaucuccaucuacuggaccauugugaaacccggagacauccuccugauuaauagcaccggcaaccugaucgcuccucgcggguacuucaagauuagaucuggaaaguccagcaucaugcggucugacgcccccaucggcaaauguaauagcgagugcauuacaccgaacggcuccaucccuaaugauaagcccuuucagaacgugaaucgcauuacguauggggcuuguccuagauacgucaaacagaacacccucaagcuggccacaggaaugcggaauguucccgaaaaacaaacccgcggcaucuucggggcgauugccggauuuaucgagaacggcugggaagggaugguggacggaugguauggcuucagacaccaaaauucugagggcacagggcaggcugccgaucuuaagagcacccaggcugccaucaaccagauuaauggaaaacugaaccggcucaucggcaagacgaacgagaaguuccaccagauugaaaaagaguuuuccgaaguggaggggagaauccaggaccuggaaaaguacgucgaggauacaaaaauugaccuuuggagcuauaaugccgagcugcucguggcucuggaaaaccaacauaccaucgaucugaccgacucugagaugaauaaacucuucgaacgcacaaagaagcagcugcgggagaacgcggaagauaugggaaauggcugcuuuaagauuuaccacaaaugugacaacgccugcaucggguccaucagaaauggcaccuaugaucaugacguuuaccgcgacgaggcucuuaacaaucgguuccagauuaagggaguggagcugaaaagcggcuacaaggauuggauccucuggauuucuuuugccaucuccugcuuccugcuuugugucgcccugcucggguuuauuaugugggcuugccagaaaggaaacaucagauguaauaucugcauuuga

SEQ ID NO: 200928 - RNA, 1701 nt, Artificial Sequence
  derived and/or modified CDS sequence (opt5) from hemagglutinin__InfluenzaA__AFJ77880
augaagaccaucauugcccugagcuacauccucugccugguguucgcucagaaacuucccggcaacgacaauuccacagccacgcugugucucgggcaccaugcggucccuaacggaaccauuguuaagacaaucaccaaugaucaaauugaggugacaaacgcuaccgaacuggugcagucuagcuccacaggcgggaucugcaauucuccgcaccagauccuugacggagagaacuguacccugauugaugcccuccugggcgacccccagugcgauggguuucaaaauaaaaagugggaccuguucgucgaaagaagcaaagccuauuccaacuguuacccuuaugaugugcccgacuacgcuucucuccggagccugguugccuccagcggaacgcuugaguuuaauaacgaaucuuucaauuggaccggcgugacacagaacggcaccuccagcgcuugcaagcgcagaucuaauaaguccuuuuucagccggcugaacuggcucacacaucugaaauuuaaguauccugcccuuaaugucaccaugcccaacaacgagaaauucgauaagcuguacaucuggggagugcaccauccugggacggacaaugaucagauuucucucuaugcgcaggccuccggccgcaucacaguuagcaccaaaagaucccaacagacagugauuccgaacaucgggucucggccccgcgucagagacgugccuagccggauuuccaucuacuggaccaucgugaagcccggagauauucugcugaucaauagcaccggcaaccucauugcuccucgcggguacuuuaagaucagaucuggaaaauccagcauuaugcggucugacgcccccaucggcaaguguaauagcgagugcaucacaccgaacggcuccauuccuaaugacaaacccuuccagaacgucaaucgcaucacguauggggcuuguccuagauacguuaagcagaacacccugaaacuugccacaggaaugcggaaugugcccgaaaagcaaacccgcggcauuuuuggggcgaucgccggauucauugagaacggcugggaagggaugguggauggaugguauggcuuuagacaccaaaauucugagggcacagggcaggcugccgaccugaaaagcacccaggcugccaucaaccagaucaauggaaagcucaaccggcugauuggcaagacgaacgagaaauuccaccagaucgaaaaggaguucuccgaagucgaggggcgcauucaggaucuugaaaaauacguggaggacacaaagaucgaucuguggagcuauaaugccgagcuccugguugcucuggaaaaccaacauaccauugaccucaccgauucugagaugaauaaacuguuugaaagaacaaagaagcagcuucgggagaacgcggaagacaugggaaauggcugcuucaaaaucuaccacaagugugauaacgccugcauuggguccaucagaaauggcaccuaugaccaugauguguaccgcgacgaggcucugaacaaucgguuucagaucaaaggagucgagcucaagagcggcuacaaagacuggauucuguggaucucuuucgccauuuccugcuuucuucuguguguggcccuccugggguucaucaugugggcuugccagaagggaaacauuagauguaauaucugcaucuga

SEQ ID NO: 200929 - RNA, 1701 nt, Artificial Sequence
  derived and/or modified CDS sequence (opt5) from hemagglutinin__InfluenzaA__AFJ77902
augaagaccaucauugcccugagcuacauccucugccugguguucgcucagaaacuucccggcaacgacaauuccacagccacgcugugucucgggcaccaugcggucccuaacggaaccauuguuaagacaaucaccaaugaucaaauugaggugacaaacgcuaccgaacuggugcagucuagcuccacaggcgggaucugcgacucuccgcaccagauccuugauggagagaauuguacccugauugacgcccuccugggcgauccccagugcgacggguuucaaaacaaaaagugggaucuguucgucgaaagaagcaaagccuauuccaauuguuacccuuaugacgugcccgauuacgcuucucuccggagccugguugccuccagcggaacgcuugaguuuaacaaugaaucuuucaacuggaccggcgugacacagaauggcaccuccagcgcuugcaagcgcagaucuaacaauuccuuuuucagccggcugaacuggcucacacaucugaaguuuaaauauccugcccuuaaugucaccaugcccaacaacgagaaguucgacaaacuguacaucuggggagugcaccauccugggacggauaaugaccagauuggccucuaugcgcaggccucugggcgcaucacaguuuccaccaagagaagccaacagacagugauuccgaacaucggaucccggccccgcgucagagauauuccuucucggaucagcaucuacuggaccauugugaaacccggcgacaugcugcugaucaauuccaccgggaaccucauugcuccucgcggauacuuuaagaucagaagcggcaagucuuccauuaugcggagcgacgcccccaucggcaaauguaauucugagugcaucacaccgaacgggagcauuccuaaugauaagcccuuccagaacgugaaucgcaucacguauggagcuuguccuagauacgucaaacagaacacccugaaacuugccacaggcaugcggaauguucccgaaaaacaaacccgcgggauuuuuggagcgaucgccggcuucauugagaacgggugggaaggaaugguggacggcugguauggcuuuagacaccaaaauuccgaggggacaggacaggcugccgaucugaagucuacccaggcugccaucaaccagaucaauggcaaacucaaccggcugauugggaagacgaacgagaaguuccaccagaucgaaaaagaguucagcgaaguggagggacgcauucaggaccuugaaaaguacgucgaggauacaaaaaucgaccugugguccuauaaugccgagcuccugguggcucuggaaaaccaacauaccauugaucucaccgacagcgagaugaauaagcuguuugaaagaacaaagaagcagcuucgggagaacgcggaagauaugggcaaugggugcuucaagaucuaccacaaaugugacaacgccugcauuggcucuaucagaaauggaaccuaugaucaugacguuuaccgcgacgaggcucugaacaaucgguuucagaucaagggcguggagcucaaauccggguacaaggauuggauucuguggaucagcuucgccauuucuugcuuucuucugugugucgcccuccugggauucaucaugugggcuugccagaaaggcaacauuagauguaauaucugcaucuga

SEQ ID NO: 200930 - RNA, 1701 nt, Artificial Sequence
  derived and/or modified CDS sequence (opt5) from hemagglutinin__InfluenzaA__AFJ77913
augaagaccaucauugcccugagcuacauccucugccugguguucgcucagaaacuucccggcaacgacaauuccacagccacgcugugucucgggcaccaugcggucccuaacggaaccauuguuaagacaaucaccaaugaucaaauugaggugacaaacgcuaccgaacuggugcagucuagcuccacaggcgggaucugcgacucuccgcaccagauccuugauggagagaauuguacccugauugacgcccuccugggcgauccccagugcgacggguuucaaaacaaaaagugggaucuguucgucgaaagaagcaaagccuauuccaauuguuacccuuaugacgugcaggauuacgcuucucuccggagccugguugccuccagcggaacgcuugaguuuaacaaugaaucuuucaacuggaccggcgugacacagaauggcaccuccagcgcuugcaagcgcagaucuaacaauuccuuuuucagccggcugaacuggcucacacaucugaaguuuaaauaucccgcccuuaaugucaccaugccuaacaacgagaaguucgacaaacuguacaucuggggagugcaccaucccgggacggauaaugaccagauuucucucuaugcgcaagccuccggccgcaucacaguuagcaccaagagaucccagcagacagugauuccuaacaucgggucucggccgcgcgucagagauauucccagccggaucuccaucuacuggaccauugugaaaccuggagacaugcugcugaucaauagcaccggcaaccucauugcuccccgcggguacuuuaagaucagaucuggaaaguccagcauuaugcggucugacgccccuaucggcaaauguaauagcgagugcaucacacccaacggcuccauuccgaaugauaagccuuuccagaacgugaaucgcaucacguauggggcuugucccagauacgucaaacaaaacacccugaaacuugccacaggaaugcggaauguuccugaaaaacagacccgcggcauuuuuggggcgaucgccggauucauugagaacggcugggaagggaugguggacggaugguauggcuuuagacaccagaauagcgagggcacagggcaagcugccgaucugaagucuacccaggcugccaucaaccagaucaauggaaaacucaaccggcugauuggcaagacgaacgagaaguuccaccagaucgaaaaagaguucuccgaaguggaggggcgcauucaagaccuugaaaaguacgucgaggauacaaaaaucgaccuguggagcuauaaugccgagcuccugguggcucuggaaaaccagcauaccauugaucucaccgacucugagaugaauaagcuguuugaaagaacaaagaagcagcuucgggagaacgcggaagauaugggaaauggcugcuucaagaucuaccacaaaugugacaacgccugcauuggguccaucagaaauggcaccuaugaucaugacguuuaccgcgacgaggcucugaacaaucgguuucagaucaagggaguggagcucaaaagcggcuacaaggauuggauucuguggaucucuuucgccauuuccugcuuucuucugugugucgcccuccugggguucaucaugugggcuugccaaaaaggaaacauuagauguaauaucugcaucuga

SEQ ID NO: 200931 - RNA, 1701 nt, Artificial Sequence; identical to SEQ ID NO: 193185
  derived and/or modified CDS sequence (opt5) from hemagglutinin__InfluenzaA__AFJ77924

SEQ ID NO: 200932 - RNA, 1701 nt, Artificial Sequence
  derived and/or modified CDS sequence (opt5) from hemagglutinin__InfluenzaA__AFJ77935
augaagaccaucauugcccugagcuacauccucugccugguguucgcucagaaacuucccggcaacgacaauuccacagccacgcugugucucgggcaccaugcggucccuaacggaaccguugugaagacaauuaccaaugaucaaaucgaggugacaaacgcuaccgaacugguccagucuagcuccacaggcgggauuugcgacucuccgcaccagauccuugauggagagaauuguacccugauggacgcccuccugggcgauccccagugcgacggguuucaaaacaaaaagugggaucuguucguggaaagaagcaaagccuauuccaauuguuacccuuaugacguucccgaucaugcuucucuccggagccugguggccuccagcggaacgcuugaguuuaacaaugaaucuuucaacuggaccggcgucacacagaauggcaccuccagcgcuugcaagcgcagaucuaacaauuccuuuuucagccggcugaacuggcucacacaccugaaguuuaaauacccugcccuuaaugugaccaugcccaacaacgagacguucgacaagcuguauaucuggggaguucaucacccugggacagauaaugaccagauuucucucuacgcgcaggccuccggccgcaucaccgugagcacaaaaagaucccaacagaccgucauuccgaacaucgggucucggccccgcgugagagauauuccuagccggaucuccauuuauuggaccaucgugaagcccggagacauccugcugauuaauagcacaggcaaccucaucgcuccucgcggguacuuuaaaauuagaucuggaaaguccagcaucaugcggucugacgcccccauuggcaaguguaauagcgagugcaucacgccgaacggcuccaucccuaaugauaaacccuuccagaacgucaaucgcauuaccuacggggcuuguccuagauauguuaagcagaacacacugaaacuugccaccggaaugcggaaugugcccgaaaagcaaacacgcggcaucuuuggggcgauugccggauucaucgagaacggcugggaagggaugguggacggaugguacggcuuuagacaccaaaauucugagggcaccgggcaggcugccgaucugaaaagcacgcaggcugccauuaaccagaucaauggaaagcucaaccggcugaucggcaaaacaaacgagaaguuccaucagauugaaaaggaguucuccgaagucgaggggagaauccaggaccuugaaaaauauguggaggauaccaagauugaccuguggagcuacaaugccgagcuccugguugcucuggaaaaccaacacaccaucgaucucacagacucugagaugaauaaacuguuugaacgcaccaagaaacagcuucgggagaacgcggaagauaugggaaauggcugcuucaagauuuaucauaagugugacaacgccugcaucggguccauuagaaauggcacauacgaucacgacguguaucgcgacgaggcucugaacaaucgguuucagaucaaaggagucgagcucaagagcggcuacaaagauuggauccuguggauuucuuucgccaucuccugcuuucuucuguguguggcccuccugggguucauuaugugggcuugccagaagggaaacaucagauguaauauuugcaucuga

SEQ ID NO: 200933 - RNA, 1701 nt, Artificial Sequence
  derived and/or modified CDS sequence (opt5) from hemagglutinin__InfluenzaA__AFJ77946
augaagaccaucauugcccugagcuacauccucugccugguguucgcucagaaacuucccggcaacgacaauuccacagccacgcugugucucgggcaccaugcggucccuaacggaaccauuguuaagacaaucaccaaugaucaaauugaggugacaaacgcuaccgaacuggugcagucuagcuccacaggcgggaucugcgacucuccgcaccagauccuugauggagagaauuguacccugauugacgcccuccugggcgauccccagugcgacggguuucaaaacaaaaagugggaucuguucgucgaaagaagcaaagccuauuccaauuguuacccuuaugacgugcccgauuacgcuucucuccggagccugguugccuccagcggaacgcuugaguuuaacaaugaaucuuucaacuggaccggcgugacacagaauggcaccuccagcgcuugcaagcgcagaucuaacaauuccuuuuucagccggcugaacuggcucacacaucugaaguuuaaauauccugcccuuaaugucaccaugcccaacaacgagaaguucgacaaacuguacaucuggggagugcaccauccugggacggauaaugaccagauuucucucuaugcgcaggccuccggccgcaucacaguuagcaccaagagaucccaacagacagugauuccgaacaucgggucucggccccgcgucagagauauuccuagccggaucuccaucuacuggaccauugugaaacccggagacaugcugcugaucaauagcaccggcaaccucauugcuccucgcggguacuuuaagaucagaucuggaaaguccagcauuaugcggucugacgcccccaucggcaaauguaauagcgagugcaucacaccgaacggcuccauuccuaaugauaagcccuuccagaacgugaaucgcaucacguauggggcuuguccuagauacauuaaacagaacacccugaaacuugccacaggaaugcggaauguccccgaaaaacaaacccgcggcaucuuuggggcgauugccggauucaucgagaacggcugggaagggaugguugacggaugguauggcuuuagacaccagaauagcgagggcacagggcaggcugccgaucugaagucuacccaagcugccaucaaccagauuaauggaaaacucaaccggcugaucggcaagacgaacgagaaguuccaccagauugaaaaagaguucuccgaaguggaggggagaauccaggaccuugaaaaguacguggaggauacaaaaauugaccuguggagcuauaaugccgagcuccuggucgcucuggaaaaccaacauaccaucgaucucaccgacucugagaugaauaagcuguuugaacgcacaaagaagcagcuucgggagaacgcggaagauaugggaaauggcugcuucaagauuuaccacaaaugugacaacgccugcaucggguccaucagaaauggcaccuaugaucaugacguguaccgcgacgaggcucugaacaaucgguuucagauuaagggaguugagcucaaaagcggcuacaaggauuggaucauuuggaucucuuucgccauuuccugcuuucugcuuuguguggcccugcucggguucaucaugugggcuugccagaaaggaaacaucagauguaauauuugcaucuga

SEQ ID NO: 200934 - RNA, 1701 nt, Artificial Sequence; identical to SEQ ID NO: 193825
  derived and/or modified CDS sequence (opt5) from hemagglutinin__InfluenzaA__AFJ77957

SEQ ID NO: 200935 - RNA, 1701 nt, Artificial Sequence; identical to SEQ ID NO: 192702
  derived and/or modified CDS sequence (opt5) from hemagglutinin__InfluenzaA__AFJ77968

SEQ ID NO: 200936 - RNA, 1701 nt, Artificial Sequence
  derived and/or modified CDS sequence (opt5) from hemagglutinin__InfluenzaA__AFJ77979
augaagaccaucauugcccugagcuacauccucugccugguguucgcucagaaacuucccggcaacgacaauuccacagccacgcugugucucgggcaccaugcggucccuaacggaaccauuguuaagacaaucaccaaugaucaaauugaggugacaaacgcuaccgaacuggugcagucuagcuccacaggcgggaucugcgacucuccgcaccagauccuugauggagagaauuguacccugauugacgcccuccugggcgauccccagugcgacggguuucaaaacaaaaagugggaucuguucgucgaaagaagcaaagccuauuccaauuguuacccuuaugacgugcccgauuacgcuucucuccggagccugguugccuccagcggaacgcuugaguuuaacaaugaaucuuucaacuggaccggcgugacacagaauggcaccuccagcgcuugcaagcgcagaucuaacaauuccuuuuucagccggcugaacuggcucacacaucugaaguuuaaauauccugcccuuaaugucaccaugcccaacaacgagaaguucgacaaacuguacaucuggggagugcaccauccugggacggauaaugaccagauuuuucucuaugcgcaggccucuggccgcaucacaguuuccaccaagagaagccaacagacagugauuccgaacaucgggucccggccccgcgucagaaauauuccuucucggaucagcaucuacuggaccauugugaaacccggagauauccugcugauuaacuccaccggcaaucucaucgcuccucgcggguacuucaagauuagaagcggaaagucuuccaucaugcggagcgacgcccccaucggcaaauguaacucugagugcauuacaccgaauggcagcaucccuaacgacaagcccuuucagaaugugaaccgcauuacguauggggcuuguccuagauacgucaaacagaauacccugaaacuugccacaggaaugcggaacguucccgaaaagcaaacccgcggcaucuucggggcgauugccggauuuaucgagaauggcugggaagggaugguggauggaugguauggcuucagacaccagaacuccgagggcaucgggcaggcugccgaccugaagucuacacaagcugccauuaaucagaucaacggaaaacucaaccggcugauuggcaagaccaaugagaaguuccaccagaucgaaaaagaguuuagcgaaguggaggggcgcauucaggaucuugaaaaguacgucgaggacacgaaaaucgaucugugguccuauaacgccgagcuccugguggcucuggaaaaucaacauacaauugaccucaccgauagcgagaugaacaagcuguucgaaagaaccaaaaagcagcuucgggagaaugcggaagacaugggaaacggcugcuuuaagaucuaccacaaaugugauaaugccugcaucgggucuauuagaaacggcacauaugaccaugauguuuaccgcgacgaggcucugaauaaccgguuccagaucaagggaguggagcucagauccggcuacaaagacuggauucuguggaucagcuuugccauuucuugcuuccuucugugugucgcccuccugggguuuaucaugugggcuugccagaagggaaauauccgcuguaacauuugcaucuga

SEQ ID NO: 200937 - RNA, 1701 nt, Artificial Sequence
  derived and/or modified CDS sequence (opt5) from hemagglutinin__InfluenzaA__AFJ77990
augaagaccaucauugcccugagcuacauccucugccugguguucgcucagaaacuucccggcaacgacaauuccacagccacgcugugucucgggcaccaugcggucccuaacggaaccauuguuaagacaaucaccaaugaucaaauugaggugacaaacgcuaccgaacuggugcagucuagcuccacaggcgggaucugcgacucuccgcaccagauccuugauggagagaauuguacccugauugacgcccuccugggcgauccccagugcgacggguuucaaaacaaaaagugggaucuguucgucgaaagaagcaaagccuauuccaauuguuacccuuaugacgugcccgauuacgcuucucuccggagccugguugccuccagcggaacgcuugaguuuaacaaugaaucuuucaacuggaccggcgugacacagaauggcaccuccagcgcuugcaagcgcagaucuaacaauuccuuuuucagccggcugaacuggcucacacaucugaaguuuaaauauccugcccuuaaugucaccaugcccaacaacgagaaguucgacaaacuguacaucuggggagugcaccauccugggacggauaaugaccagauuuuucucuaugcgcaggccucuggccgcaucacaguuuccaccaagagaagccaacagacagugauuccgaacaucgggucccggccccgcgucagaaauauuccuucucggaucagcaucuacuggaccauugugaaacccggagauauccugcugauuaacuccaccggcaaucucaucgcuccucgcggguacuucaagauuagaagcggaaagucuuccaucaugcggagcgacgcccccaucggcaaauguaacucugagugcauuacaccgaauggcagcaucccuaacgacaagcccuuucagaaugugaaccgcauuacguauggggcuuguccuagauacgucaaacagaauacccugaaacuugccacaggaaugcggaacguucccgaaaagcaaacccgcggcaucuucggggcgauugccggauuuaucgagaauggcugggaagggaugguggauggaugguauggcuucagacaccagaacuccgagggcaucgggcaggcugccgaccugaagucuacacaagcugccauuaaucagaucaacggaaaacucaaccggcugauuggcaagaccaaugagaaguuccaccagaucgaaaaagaguuuagcgaaguggaggggcgcauucaggaucuugaaaaguacgucgaggacacgaaaaucgaucugugguccuauaacgccgagcuccugguggcucuggaaaaucaacauacaauugaccucaccgauagcgagaugaacaagcuguucgaaagaaccaaaaagcagcuucgggagaaugcggaagacaugggaaacggcugcuuuaagaucuaccacaaaugugauaaugccugcaucgggucuauuagaaacggcacauaugaccaugaugaguaccgcgacgaggcucugaauaaccgguuccagaucaagggaguugaacucaaauccggcuacaaggacuggauucuguggaucagcuuugccauuucuugcuuccuucugugugugacccuccugggguuuaucaugugggccugccagaaaggaaauaucagauguaacauuugcaucuga

SEQ ID NO: 200938 - RNA, 1701 nt, Artificial Sequence
  derived and/or modified CDS sequence (opt5) from hemagglutinin__InfluenzaA__AFJ78001
augaagaccaucauugcccugagcuacauccucugccugguguucgcucagaaacuucccggcaacgacaauuccacagccacgcugugucucgggcaccaugcggucccuaacggaaccauuguuaagacaaucaccaaugaucaaauugaggugacaaacgcuaccgaacuggugcagucuagcuccacaggcgggaucugcgacucuccgcaccagauccuugauggcaaaaauuguacccugauugacgcccuccugggagauccccagugcgacgauuuucaaaacaagaaaugggaccuguucgucgagagaagcaaggccuauuccaauuguuacccuuaugaugugcccgacuacgcuucucuccggagccugguugccuccagcgggacgcuugaauuuaacaaugagucuuucaacuggaccggagugacacagaauggcaccuccagcgcuugcaagcgcagaucuaacaauuccuuuuucagccggcugaacuggcucacacaucugaaauuuaaguauccugcccuuaaugucaccaugcccaacaacgaaaaauucgauaagcuguacaucuggggcgugcaccauccugggacggacaaugaucagauuuuucucuaugcgcaggccucuggacgcaucacaguuuccaccaaaagaagccaacagacagugauuccgaacaucggcucccggccccgcgucagaaauauuccuucucggaucagcaucuacuggaccauugugaagcccggggacauccugcugauuaacuccaccggaaaucucaucgcuccucgcggcuacuucaagauuagaagcgggaaaucuuccaucaugcggagcgacgcccccaucggaaaguguaacucugagugcauuacaccgaauggcagcaucccuaacgauaaacccuuucagaaugugaaccgcauuacguauggcgcuuguccuagauacgucaagcagaauacccugaaacuugccacagggaugcggaacguucccgagaagcaaacccgcggaaucuucggcgcgauugccggguuuaucgaaaauggaugggagggcaugguggacgggugguauggauucagacaccagaacuccgaaggcaucggccaggcugccgaucugaaaucuacacaagcugccauuaaucagaucaacgggaagcucaaccggcugauuggaaagaccaaugagaaauuccaccagaucgagaaggaauuuagcgagguggaaggccgcauucaggaccuugagaaauacgucgaagauacgaagaucgaccugugguccuauaacgccgagcuccugguggcucuggagaaucaacauacaauugaucucaccgacagcgaaaugaacaaacuguucgagagaaccaagaagcagcuucgggaaaaugcggaggauauggggaacggaugcuuuaaaaucuaccacaagugugacaaugccugcaucggcucuauuagaaacgggacauaugaucaugacguuuaccgcgacgaagcucugaauaaccgguuccagaucaaaggcguggagcucaaguccggauacaaagauuggauucuguggaucagcuuugccauuucuugcuuccuucugugugucacccuccugggcuuuaucaugugggccugccagaaggggaauaucagauguaacauuugcaucuga

SEQ ID NO: 200939 - RNA, 1701 nt, Artificial Sequence
  derived and/or modified CDS sequence (opt5) from hemagglutinin__InfluenzaA__AFJ78012
augaagaccaucauugcccugagcuacauccucugccugguguucgcucagaaacuucccggcaacgacaauuccacagccacgcugugucucgggcaccaugcggucccuaacggaaccauuguuaagacaaucaccaaugaucaaauugaggugacaaacgcuaccgaacuggugcagucuagcuccacaggcgggaucugcgacucuccgcaccagauccuugauggagagaauuguacccugauugacgcccuccugggcgauccccagugcgacggguuucaaaacaaaaagugggaucuguucgucgaaagaagcaaagcccauuccaauuguuauccuuacgacgugcccgauuaugcuucucuccggagccugguugccuccagcggaacgcuugaguuuaacaaugaaucuuucaacuggaccggcgugacacagaauggcaccuccagcgcuugcaagcgcagaucuaacaauuccuuuuucagccggcugaacuggcucacacaccugaaguuuaaauacccugcccuuaaugucaccaugcccaacaacgagaaguucgacaaacuguauaucuggggagugcaucacccugggacggauaaugaccagauuuuucucuacgcgcaggccucuggccgcaucacaguuuccaccaagagaagccaacagacagugauuccgaacaucgggucccggccccgcgucagaaauauuccuucucggaucagcaucuauuggaccauugugaaacccggagauauccugcugauuaacuccaccggcaaucucaucgcuccucgcggguacuucaagauuagaagcggaaagucuuccaucaugcggagcgacgcccccaucggcaaauguaacucugagugcauuacaccgaauggcagcaucccuaacgacaagcccuuucagaaugugaaccgcauuacguacggggcuuguccuagauaugucaaacagaauacccugaaacuugccacaggaaugcggaacguucccgaaaagcaaacccgcggcaucuucggggcgauugccggauuuaucgagaauggcugggaagggaugguggauggaugguacggcuucagacaccagaacuccgagggcaucgggcaggcugccgaccugaagucuacacaagcugccauugaucagaucaauggaaaacucaaccggcugauuggcaagaccaacgagaaguuccaucagaucgaaaaagaguuuagcgaaguggaggggcgcauucaggaccuugaaaaguaugucgaggauacgaaaaucgaccugugguccuacaaugccgagcuccugguggcucuggaaaaccaacacacaauugaucucaccgacagcgagaugaauaagcuguucgaaagaaccaaaaagcagcuucgggagaacgcggaagauaugggaaauggcugcuuuaagaucuaucauaaaugugacaacgccugcaucgggucuauuagaaauggcacauacgaucacgacguuuaucgcgacgaggcucugaacaaucgguuccagaucaagggaguggagcucaaauccggcuacaaggauuggauucuguggaucagcuuugccauuucuugcuuccuucugugugucgcccuccugggguuuaucaugugggcuugccagaaaggaaacaucagauguaauauuugcaucuga

SEQ ID NO: 200940 - RNA, 1701 nt, Artificial Sequence
  derived and/or modified CDS sequence (opt5) from hemagglutinin__InfluenzaA__AFJ78023
augaagaccaucauugcccugagcuacauccucugccugguguucgcucagaaacuucccggcaacgacaauuccacagccacgcugugucucgggcaccaugcggucccuaacggaaccauuguuaagacaaucaccaaugaucaaauugaggugacaaacgcuaccgaacuggugcagucuagcuccacaggcgggaucugcgacucuccgcaccagauccuugauggagagaauuguacccugauugacgcccuccugggcgauccccagugcgacggguuucaaaacaaaaagugggaucuguucgucgaaagaagcaaagccuauuccaauuguuacccuuaugacgugcccgauuacgcuucucuccggagccugguugccuccagcggaacgcuugaguuuaacaaugaaucuuucaacuggaccggcgugacacagaauggcaccuccagcgcuugcaagcgcaagucuaacaauuccuuuuucagcagacugaacuggcucacacaucugaaauuuaaguauccugcccuuaaugucaccaugcccaacaacgagaaauucgacaagcuguacaucuggggagugcaccauccugggacggauaaugaccagauuuuucucuaugcgcaggccucuggccggaucacaguuuccaccaaacgcagccaacagacagugauuccgaacaucggguccagaccccggguccgcaauauuccuucuagaaucagcaucuacuggaccauugugaagcccggagauauccugcugauuaacuccaccggcaaucucaucgcuccucggggguacuucaagauucgcagcggaaaaucuuccaucaugagaagcgacgcccccaucggcaaguguaacucugagugcauuacaccgaauggcagcaucccuaacgacaaacccuuucagaaugugaaccggauuacguauggggcuuguccucgcuacgucaagcagaauacccugaaacuugccacaggaaugagaaacguucccgaaaagcaaacccggggcaucuucggggcgauugccggauuuaucgagaauggcugggaagggaugguggauggaugguauggcuuccgccaccagaacuccgagggcaucgggcaggcugccgaccugaaaucuacacaagcugccauuaaucagaucaacggaaagcucaacagacugauuggcaagaccaaugagaaauuccaccagaucgaaaaggaguuuagcgaaguggaggggcggauucaggaucuugaaaaauacgucgaggacacgaagaucgaucugugguccuauaacgccgagcuccugguggcucuggaaaaucaacauacaauugaccucaccgauagcgagaugaacaaacuguucgaaagaaccaagaagcagcuucgcgagaaugcggaagacaugggaaacggcugcuuuaaaaucuaccacaagugugauaaugccugcaucgggucuauucggaacggcacauaugaccaugauguuuacagagacgaggcucugaauaaccgcuuccagaucaaaggaguggagcucaaguccggcuacaaagacuggauucuguggaucagcuuugccauuucuugcuuccuucugugugucgcccuccugggguuuaucaugugggcuugccagaagggaaauauccgguguaacauuugcaucuga

SEQ ID NO: 200941 - RNA, 1701 nt, Artificial Sequence; identical to SEQ ID NO: 192702
  derived and/or modified CDS sequence (opt5) from hemagglutinin__InfluenzaA__AFJ78034

SEQ ID NO: 200942 - RNA, 1701 nt, Artificial Sequence
  derived and/or modified CDS sequence (opt5) from hemagglutinin__InfluenzaA__AFJ78045
augaagaccaucauugcccugagcuacauccucugccugguguucgcucagaaacuucccggcaacgacaauuccacagccacgcugugucucgggcaccaugcggucccuaacggaaccauuguuaagacaaucaccaaugaucaaauugaggugacaaacgcuaccgaacuggugcagucuagcuccacaggcgggaucugcgacucuccgcaccagauccuugauggagagaauuguacccugauugacgcccuccugggcgauccccagugcgacggguuucaaaacaaaaagugggaucuguucgucgaaagaagccgggccuauuccaauuguuacccuuaugacgugcccgauuacgcuucucuccgcagccugguugccuccagcggaacgcuugaguuuaacaaugaaucuuucaacuggaccggcgugacacagaauggcaccuccagcgcuugcaaaagacggucuaacaauuccuuuuucagccgccugaacuggcucacacaucugaaguuuaaguauccugcccuuaaugucaccaugcccaacaacgagaaauucgacaagcuguacaucuggggagugcaccauccugggacggauaaugaccagauuuuucucuaugcgcaggccucuggcagaaucacaguuuccaccaaacggagccaacagacagugauuccgaacaucgggucccgccccagaguccggaauauuccuucucgcaucagcaucuacuggaccauugugaagcccggagauauccugcugauuaacuccaccggcaaucucaucgcuccuagaggguacuucaaaauucggagcggaaagucuuccaucaugcgcagcgacgcccccaucggcaaguguaacucugagugcauuacaccgaauggcagcaucccuaacgacaaacccuuucagaaugugaacagaauuacguauggggcuuguccucgguacgucaagcagaauacccugaaacuugccacaggaaugcgcaacguucccgaaaagcaaaccagaggcaucuucggggcgauugccggauuuaucgagaauggcugggaagggaugguggauggaugguauggcuuccggcaccagaacuccgagggcauggggcaggcugccgaccugaaaucuacacaagcugccaucaaucagauuaacggaaagcucaacagacugaucggcaaaaccaaugagaaguuccaccagauugaaaaggaguuuagcgaaguggaggggcgcauccaggaucuugaaaaauacgucgaggacacgaagauugaucugugguccuauaacgccgagcuccugguggcucuggaaaaucaacauacaaucgaccucaccgauagcgagaugaacaaacuguucgaacggaccaagaaacagcuuagagagaaugcggaagacaugggaaacggcugcuuuaagauuuaccacaagugugauaaugccugcaucgggucuauccgcaacggcacauaugaccaugauguuuaccgggacgaggcucugaauaacagauuccagauuaaaggaguggagcucaaguccggcuacaaagacuggauccuguggauuagcuuugccaucucuugcuuccuucugugugucgcccuccugggguuuauuaugugggcuugccagaagggaaauaucaaauguaacaucugcauuuga

SEQ ID NO: 200943 - RNA, 1701 nt, Artificial Sequence; identical to SEQ ID NO: 192702
  derived and/or modified CDS sequence (opt5) from hemagglutinin__InfluenzaA__AFJ78056

SEQ ID NO: 200944 - RNA, 1701 nt, Artificial Sequence
  derived and/or modified CDS sequence (opt5) from hemagglutinin__InfluenzaA__AFJ78067
augaagaccaucauugcccugagcuacauccucugccugguguucgcucagaaacuucccggcaacgacaauuccacagccacgcugugucucgggcaccaugcggucccuaacggaaccauuguuaagacaaucaccaaugaucaaauugaggugacaaacgcuaccgaacuggugcagucuagcuccacaggcgggaucugcgacucuccgcaccagauccuugauggagagaauuguacccugauugacgcccuccugggcgauccccagugcgacggguuucaaaacaaaaagugggaucuguucgucgaaagaagcaaagccuauuccaauuguuacccuuaugacgugcccgauuacgcuucucuccggagccugguugccuccagcggaacgcuugaguuuaacaaugaaucuuucaacuggaccggcgugacacagaauggcaccuccagcgcuugcaagcgcagaucuaacaauuccuuuuucagccggcugaacuggcucacacaucugaaguuuaaauauccugcccuuaaugucaccaugcccaacaacgagaaguucgacaaacuguacaucuggggagugcaccauccugggacggauaaugaccagauuuuucucuaugcgcaggccucuggccgcaucacaguuuccaccaagagaagccaacagacagugauuccgaacaucgggucccggccccgcgucagaaauauuccuucucggaucagcaucuacuggaccauugugaaacccggagauauccugcugauuaacuccaccggcaaucucaucgcuccucgcggguacuucaagauuagaagcggacggucuuccaucaugcgcagcgacgcccccaucggcaaguguaacucugagugcauuacaccgaauggcagcaucccuaacgacaaacccuuucagaaugugaacagaauuacguauggggcuuguccucgguacgucaagcagaauacccugaaacuugccacaggaaugcgcaacguucccgaaaagcaaaccagaggcaucuucggggcgauugccggauuuaucgagaauggcugggaagggaugguggauggaugguauggcuuccggcaccagaacuccgagggcaucgggcaggcugccgaccugaaaucuacacaagcugccauuaaucagaucaacggaaagcucaacagacugauuggcaaaaccaaugagaaguuccaccagaucgaaaaggaguuuagcgaaguggaggggcgcauucaggaucuugaaaaauacgucgaggacacgaagaucgaucugugguccuauaacgccgagcuccugguggcucuggaaaaucaacauacaauugaccucaccgauagcgagaugaacaaacuguucgaacggaccaagaaacagcuuagagagaaugcggaagacaugggaaacggcugcuuuaagaucuaccacaagugugauaaugccugcaucgggucuauucgcaacggcacauaugaccaugauguuuaccgggacgaggcucugaauaacagauuccagaucaaaggaguggagcucaaguccggcuacaaagacuggauucuguggaucagcuuugccauuucuugcuuccuucugugugucgcccuccugggguuuaucaugugggcuugccagaagggaaauauccgcuguaacauuugcaucuga

SEQ ID NO: 200945 - RNA, 1701 nt, Artificial Sequence
  derived and/or modified CDS sequence (opt5) from hemagglutinin__InfluenzaA__AFJ78078
augaagaccaucauugcccugagcuacauccucugccugguguucgcucagaaacuucccggcaacgacaauuccacagccacgcugugucucgggcaccaugcggucccuaacggaaccauuguuaagacaaucaccaaugaucaaauugaggugacaaacgcuaccgaacuggugcagucuagcuccacaggcgggaucugcgacucuccgcaccagauccuugauggagagaauuguacccugauugacgcccuccugggcgauccccagugcgacggguuucaaaacaaaaagugggaucuguucgucgaaagaagcaaagccuauuccaauuguuacccuuaugacgugcccgauuacgcuucucuccggagccugguugccuccagcggaacgcuugaguuuaacaaugaaucuuucaacuggaccggcgugacacagaauggcaccuccagcgcuugcaagcgcagaucuaacaauuccuuuuucagccggcugaacuggcucacacaucugaaguuuaaauauccugcccuuaaugucaccaugcccaacaacgagaaguucgacaaacuguacaucuggggagugcaccauccugggacggauaaugaccagauuuuucucuaugcgcaggccucuggccgcaucacaguuuccaccaagagaagccaacagacagugauuccgaacaucgggucccggccccgcgucagaaauauuccuucucggaucagcaucuacuggaccauugugaaacccggagauauccugcugauuaacuccaccggcaaucucaucgcuccucgcggguacuucaagauuagaagcggaaagucuuccaucaugcggagcgacgcccccaucgacaaauguaacucugagugcauuacaccgaauggcagcaucccuaacgauaagcccuuucagaaugugaaccgcauuacguauggcgcuuguccuagauacgucaaacagaauacccugaaacuugccacagggaugcggaacguucccgaaaaacaaacccgcggaaucuucggcgcgauugccggguuuaucgagaauggaugggaaggcaugguggacgggugguauggauucagacaccagaacuccgagggcaucggccaggcugccgaucugaagucuacacaagcugccauugaccagaucaaugggaaacucaaccggcugauuggaaagaccaacgagaaguuccaccagaucgaaaaagaguuuagcgaaguggagggccgcauucaggaucuugaaaaguacgucgaggacacgaaaaucgaucugugguccuauaaugccgagcuccugguggcucuggaaaaccaacauacaauugaccucaccgauagcgagaugaauaagcuguucgaaaagaccaagaagcagcuuagagagaacgcggaagacauggggaauggaugcuuuaaaaucuaccacaagugugauaacgccugcaucggcucuauucggaaugggacauaugaccaugacguuuacagagaugaggcucugaacaaucgcuuccagaucaaaggcguggagcucaaguccggauacaaagacuggauucuguggaucagcuuugccauuucuugcuuccuucugugugucgcccuccugggcuuuaucaugugggcuugccagaaggggaacauccgguguaauauuugcaucuga

SEQ ID NO: 200946 - RNA, 1701 nt, Artificial Sequence; identical to SEQ ID NO: 200869
  derived and/or modified CDS sequence (opt5) from hemagglutinin__InfluenzaA__AFJ78089

SEQ ID NO: 200947 - RNA, 1701 nt, Artificial Sequence; identical to SEQ ID NO: 193900
  derived and/or modified CDS sequence (opt5) from hemagglutinin__InfluenzaA__AFJ78100

SEQ ID NO: 200948 - RNA, 1701 nt, Artificial Sequence
  derived and/or modified CDS sequence (opt5) from hemagglutinin__InfluenzaA__AFJ78111
augaagaccaucauugcccugagcuacauccucugccugguguucgcucagaaacuucccggcaacgacaauuccacagccacgcugugucucgggcaccaugcggucccuaacggaaccauuguuaagacaaucaccaaugaucaaauugaggugacaaacgcuaccgaacuggugcagucuagcuccacaggcgggaucugcgacucuccgcaccagauccuugauggagagaauuguacccugauugacgcccuccugggcgauccccagugcgacggguuucaaaacaaaaagugggaucuguucgucgaaagaagcaaagccuauuccaauuguuacccuuaugacgugcccgauuacgcuucucuccggagccugguugccuccagcggaacgcuugaguuuaacaaugaaucuuucaacuggaccggcgugacacagaauggcaccuccagcgcuugcaagcgcagaucuaacaauuccuuuuucagccggcugaacuggcucacacaucugaaguuuaaauauccugcccuuaaugucaccaugcccaacaacgagaauuucgacaagcuguacaucuggggagugcaccauccugggacggauaacgaccagauuuuucucuaugcgcaggccucuggccgcaucacaguuuccaccaaaagaagccaacagacagugauuccgaauaucgggucccggccccgcgucagaaacauuccuucucggaucagcaucuacuggaccauugugaagcccggagauauccugcugauuaauuccaccggcaaccucaucgcuccucgcggguacuucaaaauuagaagcggaaagucuuccaucaugcggagcgacgcccccaucggcaaguguaauucugagugcauuacaccgaacggcagcaucccuaaugacaaacccuuucagaacgugaaucgcauuacguauggggcuuguccuagauacgucaagcagaacacccugaaacuugccacaggaaugcggaauguucccgaaaagcaaacccgcggcaucuucggggcgauugccggauuuaucgagaacggcugggaagggaugguggauggaugguauggcuucagacaccaaaauuccgagggcaucgggcaggcugccgaccugaaaucuacacaggcugccauugaucagaucaacggaaagcucaaccggcugauuggcaaaaccaaugagaaguuccaccagaucgaaaaggaguuuagcgaaguggaggggcgcauucaggaccuugaaaaauacgucgaggauacgaagaucgaccugugguccuauaacgccgagcuccugguggcucuggaaaaucaacauacaauugaucucaccgacagcgagaugaacaaacuguucgaaaagaccaaaaagcagcuuagagagaaugcggaagauaugggaaacggcugcuuuaagaucuaccacaaaugugacaaugccugcaucgggucuauucggaacggcacauaugaucaugacguuuacagagacgaggcucugaauaaccgcuuccagaucaagggaguggagcucaaauccggcuacaaggauuggauucuguggaucagcuuugccauuucuugcuuccuucugugugucgcccuccugggguuuaucaugugggcuugccagaaaggaaauauccgguguaacauuugcaucuga

SEQ ID NO: 200949 - RNA, 1701 nt, Artificial Sequence
  derived and/or modified CDS sequence (opt5) from hemagglutinin__InfluenzaA__AFJ78122
augaagaccaucauugcccugagcuacauccucugccugauuuucgcucagaaacuucccggcaacgacaauuccacagccacgcugugucucgggcaccaugcggugccuaacggaaccaucgucaagacaauuaccaaugaucaaaucgagguuacaaacgcuaccgaacuggugcagucuagcuccacaggcgggaucugcgacucuccgcaccagauucuugauggagagaauuguacccugaucgacgcccuccugggcgauccccagugcgacggguuucaaaacaaaaagugggaucuguucguggaaagaagcaaagccuauuccaauuguuacccuuaugacguccccgauuacgcuucucuccggagccugguggccuccagcggaacgcuugaguuuaacaaugaaucuuucaacuggaccggcguuacacagaauggcaccuccagcgcuugcaagcgcagaucuaacaauuccuuuuucagccggcugaacuggcucacacaucugaaguuuaaauauccugcccuuaaugugaccaugcccaacaacgagaaguucgacaaacuguacauuuggggaguccaccauccugggacggauaaugaccagaucuuucucuaugcgcaggccucuggccgcauuacaguguccaccaagagaagccaacagacaguuaucccgaacauugggucccggccccgcgugagaaauaucccuucucggaucagcauuuacuggaccaucgucaaacccggagauauucugcugaucaacuccaccggcaaucucauugcuccucgcggguacuucaagaucagaagcggacggucuuccaucaugcgcagcgacgcccccauugacaaguguaacucugagugcaucacaccgaauggcagcauuccuaacgauaaacccuuucagaaugugaacagaaucacguauggcgcuuguccucgguacgugaagcagaauacccugaaacuugccacagggaugcgcaacguccccgaaaagcaaaccagaggaauuuucggcgcgaucgccggguuuaucgagaauggaugggaaggcaugguugacgggugguauggauuccggcaccagaacuccgagggcauuggccaggcugccgaucugaaaucuacacaagcugccaucgaccagauuaaugggaagcucaacagacugauccgcaaaaccaacgagaaguuccaccagauugaaaaggaguuuagcgaaguggagggacggauccaggaucuugaaaaauacguggaggacacgaagauugaucugugguccuauaaugccgagcuccuggucgcucuggaaaaccaacauacaaucgaccucaccgauagcgagaugaauaaacuguucgaaaagaccaaaaagcagcuuagagagaacgcggaagacaugggcaaugggugcuuuaagaucuaccacaaaugugauaacgccugcauuggaucuauccgcaauggcacauaugaccaugacguguaccgggaugaggcucugaacaauagauuccagauuaaggggguugagcucaaauccggcuacaaggacuggauccuguggauuagcuuugccaucucuugcuuccuucuguguguggcccuccugggauuuaucaugugggcuugccagaaaggcaacauucgcuguaauaucugcauuuga

SEQ ID NO: 200950 - RNA, 1701 nt, Artificial Sequence
  derived and/or modified CDS sequence (opt5) from hemagglutinin__InfluenzaA__AFJ78144
augaagaccaucauugcccugagcuacauccucugccugguguucgcucagaaacuucccggcaacgacaauuccacagccacgcugugucucgggcaccaugcggucccuaacggaaccauuguuaagacaaucaccaaugaucaaauugaggugacaaacgcuaccgaacuggugcagucuagcuccacaggcgagaucugcgacucuccgcaccagauccuugauggggaaaauuguacccugauugacgcccuccugggagauccccagugcgacggcuuucaaaacaaaaagugggaucuguucgucgagagaagcaaagccuauuccaauuguuacccuuaugacgugcccgauuacgcuucucuccggagccugguugccuccagcgggacgcuugaauuuaacaaugagucuuucaacuggaccggagugacacagaauggcaccuccagcucuugcauccgcagauccaacaauagcuuuuucucucggcugaacuggcucacacaucugaaguuuaaguauccugcucuuaaugucaccaugcccaacaacgagaaauucgacaagcuguacauuuggggcgugcaccauccugggacggauaaugaccagaucuuucucuaugcccaggcguccggacgcauuacaguuagcaccaaaagaucccaacagacagugaucccgaacauuggcucucggccccgcgucagaaauaucccuagccggaucuccauuuacuggaccaucgugaagcccggggauauucugcugaucaacagcaccggaaaucucauugccccucgcggcuacuucaaaaucagaucugggaaguccagcaucaugcggucugacgcucccauuggaaaguguaacagcgaaugcaucacaccgaauggcuccauuccuaacgacaaacccuuucagaaugugaaccgcaucacguauggcgccuguccuagauacgucaagcagaauacccugaaacuugcuacagggaugcggaacguucccgagaagcaaacccgcggaauuuucggcgccaucgcgggguuuaucgaaaauggaugggagggcaugguggaugggugguauggauucagacaccagaacucugagggcauuggccaggccgcugaccugaaaagcacacaagccgcuaucgaucagauuaaugggaagcucaaccggcugaucggaaaaaccaacgaaaaguuccaccagauugagaaggaauuuuccgagguggaaggcagaauccaggaccuugagaaauacgucgaggauacgaagguggaccuguggagcuauaaugccgaacuccugguugcccuggagaaccaacauacaauugaucucaccgacucugaaaugaauaaacuguucgagaagaccaaaaagcagcuucgcgaaaacgcugaggauauggggaauggaugcuuuaagaucuaccacaaaugugacaacgcgugcaucggcuccauucggaaugggacauaugaucaugacguguacagagacgaggcccugaacaaucgcuuccagaucaagggcgucgaacucaaaagcggauacaaggauuggauucuguggaucucuuuugcuauuuccugcuuccuucuguguguggcccuccugggcuuuaucaugugggccugccagaaagggaacauccgguguaauauuugcaucuga

SEQ ID NO: 200951 - RNA, 1701 nt, Artificial Sequence; identical to SEQ ID NO: 200950
  derived and/or modified CDS sequence (opt5) from hemagglutinin__InfluenzaA__AFJ78155

SEQ ID NO: 200952 - RNA, 1701 nt, Artificial Sequence
  derived and/or modified CDS sequence (opt5) from hemagglutinin__InfluenzaA__AFJ78166
augaagaccaucauugcccugagcuacauccucugccugguguucgcucagaaacuucccggcaacgacaauuccacagccacgcugugucucgggcaccaugcggucccuaacggaaccauuguuaagacaaucaccaaugaucaaauugaggugacaaacgcuaccgaacuggugcagucuagcuccacaggcgagaucugcgacucuccgcaccagauccuugauggggaaaauuguacccugauugacgcccuccugggagauccccagugcgacggcuuucaaaacaaaaagugggaucuguucgucgagagaagcaaagccuauuccaauuguuacccuuaugacgugcccgauuacgcuucucuccggagccugguugccuccagcgggacgcuugaauuuaacaaugagucuuucaacuggaccggagugacacagaauggcaccuccagcgcuugcauccgcagaucuaacaauuccuuuuucagccggcugaacuggcucacacaucugaaguuuaaguauccugcccuuaaugucaccaugcccaacaacgaggaguucgacaaacuguacauuuggggcgugcaccauccugggacggauaaugaccagaucuuucucuaugcgcaggccucuggacgcauuacaguuuccaccaagagaagccaacagacagugaucccgaacauuggcucccggccccgcgucagaaauaucccuucucggaucagcauuuacuggaccaucgugaaacccggggauauucugcugaucaacuccaccggaaaucucauugcuccucgcggcuacuucaagaucagaagcgggaaaucuuccaucaugcggagcgacgcccccauuggaaaguguaacucugaaugcaucacaccgaauggcagcauuccuaacgacaagcccuuucagaaugugaaccgcaucacguauggcgcuuguccuagauacgucaaacagaauacccugaaacuugccacagggaugcggaacguucccgaaaaacaaacccgcggaauuuucggcgcgaucgccggguuuaucgagaauggaugggagggcaugguggaugggugguauggauucagacaccagaacuccgaaggcauuggccaggcugccgaccugaagucuacacaagcugccaucgaucagauuaaugggaaacucaaccggcugaucggaaagaccaacgagaaauuccaccagauugaaaaggaguuuagcgaaguggagggcagaauccaggaccuugagaaguacgucgaagauacgaaaauugaccugugguccuauaaugccgagcuccugguggcucuggaaaaccaacauacaaucgaucucaccgacagcgagaugaauaagcuguucgaaaagaccaagcgccagcuucgggagaacgcggaggauauggggaauggaugcuuuaaaaucuaccacaagugugacaacgccugcauuggcucuaucagaaaugggacauaugaucaugacguuuaccgcgacgaagcucugaacaaucgguuccagauuaagggcguggagcucaaauccggauacaaggauuggauccuguggauuagcuuugccaucucuugcuuccuucugugugucgcccuccugggcuuuaucaugugggcuugccagaaagggaacauuagauguaauaucugcauuuga

SEQ ID NO: 200953 - RNA, 1701 nt, Artificial Sequence; identical to SEQ ID NO: 193801
  derived and/or modified CDS sequence (opt5) from hemagglutinin__InfluenzaA__AFJ78177

SEQ ID NO: 200954 - RNA, 1701 nt, Artificial Sequence
  derived and/or modified CDS sequence (opt5) from hemagglutinin__InfluenzaA__AFJ78188
augaagaccaucauugcccugagcuacauccucugccugguguucgcucagaaacuucccggcaacgacaauuccacagccacgcugugucucgggcaccaugcggucccuaacggaaccauuguuaagacaaucaccaaugaucaaauugaggugacaaacgcuaccgaacuggugcagucuagcuccacaggcgagaucugcgacucuccgcaccagauccuugauggggaaaauuguacccugauugacgcccuccugggagauccccagugcgacggcuuucaaaacaaaaagugggaucuguucgucgagagaagcaaagccuauuccaauuguuacccuuaugacgugcccgauuacgcuucucuccggagccugguugccuccagcgggacgcuugaauuuaacaaugagucuuucaacuggaccggagugacacagaauggcaccuccagcgcuugcauccgcagaucuaacaauuccuuuuucagccggcugaacuggcucacacaucugaaguuuaaguauccugcccuuaaugucaccaugcccaacaacgagaaauucgacaagcuguacauuuggggcgugcaccauccugggacggauaaugaccagaucuuucucuaugcgcaggccucuggacgcauuacaguuuccaccaaaagaagccaacagacagugaucccgaacauuggcucccggccccgcaucagaaauaucccuucucggauuagcaucuacuggaccauugucaagcccggggauauccugcugauuaacuccaccggaaaucucaucgcuccucgcggcuacuucaaaaucagaagcgggaagucuuccauuaugcggagcgacgcccccaucggaaaguguaacucugaaugcauuacaccgaauggcagcaucccuaacgacaaacccuuucagaaugugaaccgcauuacguauggcgcuuguccuagauacgugaagcagaauacccugaaacuugccacagggaugcggaacguccccgagaagcaaacccgcggaaucuucggcgcgaucgccggguuuauugaaaauggaugggagggcaugguugaugggugguauggauucagacaccagaacuccgagggcacaggccaggcugccgaccugaaaucuacccaagcugccaucgaucagauuaaugggaagcucaaccggcugaucggaaaaacgaacgaaaaguuccaccagauugagaaggaauuuagcgagguggaaggcagaauccaggaccuugagaaauacguggaggauacaaagauugaccugugguccuauaaugccgaacuccuggucgcucuggagaaccaacauaccaucgaucucaccgacagcgaaaugaauaaacuguucgagaagaccaaaaagcagcuucgcgaaaacgcggaggauauggggaauggaugcuuuaagaucuaccacaaaugugacaacgccugcauuggcucuauccggaaugggacauaugaucaugacguguacagagacgaggcucugaacaaucgcuuccagauuaagggcguugaacucaaauccggauacaaggauuggauccuguggauuagcuuugccaucucuugcuuccuucuguguguggcccuccugggcuuuaucaugugggcuugccagaaagggaacauucgguguaauaucugcauuuga

SEQ ID NO: 200955 - RNA, 1701 nt, Artificial Sequence
  derived and/or modified CDS sequence (opt5) from hemagglutinin__InfluenzaA__AFJ78210
augaagaccaucauugcccugagcuacauccucugccugguguucgcucagaaacuucccggcaacgacaauuccacagccacgcugugucucgggcaccaugcggucccuaacggaaccauuguuaagacaaucaccaaugaucaaauugaggugacaaacgcuaccgaacuggugcagucuagcuccacaggcgagaucugcgacucuccgcaccagauccuugauggggaaaauuguacccugauugacgcccuccugggagauccccagugcgacggcuuucaaaacaaaaagugggaucuguucgucgagagaagcaaagccuauuccaauuguuacccuuaugacgugcccgauuacgcuucucuccggagccugguugccuccagcgggacgcuugaauuuaacaaugagucuuucaacuggaccggagugacacagaauggcaccuccagcgcuugcauccgcagaucuaacaauuccuuuuucagccggcugaacuggcucacacaucugaaguuuaaguauccugcccuuaaugucaccaugcccaacaacgagaaauucgacaagcuguacauuuggggcgugcaccauccugggacggauaaugaccagaucuuucucuaugcgcaggccucuggacgcauuacaguuuccaccaaaagaagccaacagacagugaucccgaacauuggcucccggccccgcgucagaaauaucccuucucggaucagcauuuacuggaccaucgugaagcccggggauauucugcugaucaacuccaccggaaaucucauugcuccucgcggcuacuucaaaaucagaagcgggaagucuuccaucaugcggagcgacgcccccauuggaaaguguaacucugaaugcaucacaccgaauggcagcauuccuaacgacaaacccuuucagaaugugaaccgcaucacguauggcgcuuguccuagauacgucaagcagaauacccugaaacuugccacagggaugcggaacguucccgagaagcaaacccgcggaauuuucggcgcgaucgccggguuuaucgaaaauggaugggagggcaugguggaugggugguauggauucagacaccagaacuccgagggcacaggccaggcugccgaccugaaaucuacccaagcugccauugaucagaucaaugggaagcucaaccggcugauuggaaaaacgaacgaaaaguuccaccagaucgagaaggaauuuagcgagguggaaggccgcauucaggaccuugagaaauacgucgaggauacaaagaucgaccugugguccuauaaugccgaacuccugguggcucuggagaaccaacauaccauugaucucaccgacagcgaaaugaauaaacuguucgagaagaccaaaaagcagcuuagagaaaacgcggaggauauggggaauggaugcuuuaagaucuaccacaaaugugacaacgccugcaucggcucuauucggaaugggacauaugaucaugacguuuacagagacgaggcucugaacaaucgcuuccagaucaagggcauugaacucaaauccggauacaaggauuggauccuguggauuagcuuugccaucucuugcuuccuucuguguguggcccuccugggcuuuaucaugugggcuugccagaaagggaacauucgguguaauaucugcauuuga

SEQ ID NO: 200956 - RNA, 1701 nt, Artificial Sequence; identical to SEQ ID NO: 200880
  derived and/or modified CDS sequence (opt5) from hemagglutinin__InfluenzaA__AFJ78221

SEQ ID NO: 200957 - RNA, 1701 nt, Artificial Sequence
  derived and/or modified CDS sequence (opt5) from hemagglutinin__InfluenzaA__AFJ78232
augaagaccaucauugcccugagcuacauccucugccugguguucgcucagaaacuucccggcaacgacaauuccacagccacgcugugucucgggcaccaugcggucccuaacggaaccauuguuaagacaaucaccaaugaucaaauugaggugacaaacgcuaccgaacuggugcagucuagcuccacaggcaaaaucugcgacucuccgcaccagauccuugauggggagaauuguacccugauugacgcccuccugggagauccccagugcgacggcuuucaaaacaagaaaugggaucuguucgucgaaagaagcaaggccuauuccaauuguuacccuuaugacgugcccgauuacgcuucucuccggagccugguugccuccagcgggacgcuugaguuuaacaaugaaucuuucaacuggaccggagugacacagaauggcaccuccagcgcuugcauccgcagaucuaacaauuccuuuuucagccggcugaacuggcucacacaucugaaguuuaaauauccugcccuuaaugucaccaugcccaacaacgaggaguucgacaagcuguacauuuggggcgugcaccauccugggacggauaaugaccagaucuuucucuaugcgcaggccucuggacgcauuacaguuuccaccaaaagaagccaacagacagugaucccgaacauuggcucccggccccgcgucagaaauaucccuucucggaucagcauuuacuggaccaucgugaagcccggggauauucugcugaucaacuccaccggaaaucucauugcuccucgcggcuacuucaaaaucagaagcgggaagucuuccaucaugcggagcgacgcccccauuggaaaguguaacucugaaugcaucacaccgaauggcagcauuccuaacgacaaacccuuucagaaugugaaccgcaucacguauggcgcuuguccuagauacgucaagcagaauacccugaaacuugccacagggaugcggaacguucccgagaagcaaacccgcggaauuuucggcgcgaucgccggguuuaucgaaaauggaugggagggcaugguggaugggugguauggauucagacaccagaacuccgagggcacaggccaggcugccgaccugaaaucuacccaagcugccauugaucagaucaaugggaagcucaaccggcugauuggaaaaacgaacgaaaaguuccaccagaucgagaaugaauuuagcgagguggaaggccgcauucaggaccuugagaaguacgucgaggauacaaaaaucgaccugugguccuauaacgccgaacuccugguggcucuggagaaucaacauaccauugaucucaccgacagcgaaaugaacaagcuguucgagaaaacaaagaaacagcuuagagaaaaugcggaggauauggggaacggaugcuuuaagaucuaccacaagugugacaaugccugcaucggcucuauucggaacgggaccuaugaucaugacguuuacagagacgaggcucugaauaaccgcuuccagaucaaaggcguggaacucaaguccggauacaaagauuggauucuguggaucagcuuugccauuucuugcuuccuucugugugucgcccuccugggcuuuaucaugugggcuugccagaaggggaauauccgguguaacauuugcaucuga

SEQ ID NO: 200958 - RNA, 1701 nt, Artificial Sequence
  derived and/or modified CDS sequence (opt5) from hemagglutinin__InfluenzaA__AFJ78243
augaagaccaucauugcccugagcuacauccucugccugguguucgcucagaaacuucccggcaacgacaauuccacagccacgcugugucucgggcaccaugcggucccuaacggaaccauuguuaagacaaucaccaaugaucaaauugaggugacaaacgcuaccgaacuggugcagucuagcuccacaggcgagaucugcgacucuccgcaccagauccuugauggggaaaauuguacccugauugacgcccuccugggagauccccagugcgacggcuuucaaaacaaaaagugggaucuguucgucgagagaagcaaagccuauuccaauuguuacccuuaugacgugcccgauuacgcuucucuccggagccugguugccuccagcgggacgcuugaauuuaacaaugagucuuucaacuggaccggagugacacagaauggcaccuccagcgcuugcauccgcagaucuaacaauuccuuuuucagccggcugaacuggcucacacaucugaaguuuaaguauccugcccuuaaugucaccaugcccaacaacgaggaguucgacaaacuguacauuuggggcgugcaccauccugggacggauaaugaccagaucuuucucuaugcgaaggccucuggacgcauuacaguuuccaccaaaagaagccagcaaacagugaucccgaacauuggcucccggccccgcgucagaaauaucccuucucggaucagcauuuacuggaccaucgugaagcccggggauauucugcugaucaacuccaccggaaaucucauugcuccucgcggcuacuucaaaaucagaagcgggaagucuuccaucaugcggagcgacgcccccgugggaaaguguaacucugaaugcauuacaccgaauggcagcaucccuaacgacaaacccuuucagaaugucaaccgcauuacguauggcgcuuguccuagauacguuaagcagaauacccugaaacuugccacagggaugcggaacgugcccgaaaagcagacccgcggaaucuucggcgcgauugccggguuuaucgagaauggaugggagggcaugguggaugggugguauggauucagacacaaaaacuccgaaggcacaggccaagcugccgaccugaagucuacccaggcugccaucgaucagauuaaugggaaacucaaccggcugaucggaaagacgaacgagaaguuccaccaaauugaaaaagaguuuagcgaagucgagggcagaauccaggaccuugagaaguacguggaagauacaaaaauugaccugugguccuauaaugccgagcuccugguugcucuggaaaaccagcauaccaucgaucucaccgacagcgagaugaauaagcuguucgagaaaacaaagaagcagcuucgcgaaaacgcggaggauauggggaauggaugcuuuaaaauuuaccacaagugugacaacgccugcaucggcucuauccggaaugggaccuaugaucaugacguguacagagacgaagcucugaacaaucgcuuccaaauuaaaggcgucgagcucaaguccggauacaaagauuggauccuguggauuagcuuugccaucucuugcuuccuucuguguguggcccuccugggcuuuauuaugugggcuugccagaaggggaacauccgguguaauaucugcauuuga

SEQ ID NO: 200959 - RNA, 1701 nt, Artificial Sequence
  derived and/or modified CDS sequence (opt5) from hemagglutinin__InfluenzaA__AFJ78254
augaagaccaucauugcccugagcuacauccucugccugguguucgcucagaaacuucccggcaacgacaauuccacagccacgcugugucucgggcaccaugcggucccuaacggaaccauuguuaagacaaucaccaaugaucaaauugaggugacaaacgcuaccgaacuggugcagucuagcuccacaggcgagaucugcgacucuccgcaccagauccuugauggggaaaauuguacccugauugacgcccuccugggagauccccagugcgacggcuuucaaaacaaaaagugggaucuguucgucgagagaagcaaagccuauuccaauuguuacccuuaugacgugcccgauuacgcuucucuccggagccugguugccuccagcgggacgcuugaauuuaacaaugagucuuucaacuggaccggagugacacagaauggcaccuccagcgcuugcauccgcagaucuaacaauuccuuuuucagccggcugaacuggcucacacaucugaaguuuaaguauccugcccuuaaugucaccaugcccaacaacgaggaguucgacaaacuguacauuuggggcgugcaccauccugggacggauaaugaccagaucuuucucuaugcgcaggccucuggacgcauuacaguuuccaccaagagaagccaacagacagugaucccgaacauuggcucccggccccgcgucagaaauaucccuucucggaucagcauuuacuggaccaucgugaaacccggggauauucugcugaucaacuccaccggaaaucucauugcuccucgcggcuacuucaagaucagaagcgggaaaucuuccaucaugcggagcgacgcccccauuggaaaguguaacucugaaugcaucacaccgaauggcagcauuccuaacgacaagcccuuucagaaugugaaccgcaucacguauggcgcuuguccuagauacgucaaacagaauacccugaaacuugccacagggaugcggaacguucccgaaaaacaaacccgcggaauuuucggcgcgaucgccggguuuaucgagaauggaugggagggcaugguggaugggugguauggauucagacaccagaacuccgaaggcauuggccaggcugccgaccugaagucuacacaagcugccaucgaucagauuaaugggaaacucaaccggcugaucggaaagaccaacgagaaauuccaccagauugaaaaggaguuuagcgaaguggagggcagaauccaggaccuugagaaguacgucgaagauacgaaaguggaccugugguccuauaaugccgagcuccugguugcucuggaaaaccaacauacaauugaucucaccgacagcgagaugaauaagcuguucgaaaagaccaagaaacagcuucgcgagaacgcggaggauauggggaauggaugcuuuaagaucuaccacaagugugacaacgccugcaucggcucuauucggaaugggacauaugaucaugacguguacagagacgaagcucugaacaaucgcuuccagaucaaaggcgucgagcucaaguccggauacaaagauuggauucuguggaucagcuuugccauuucuugcuuccuucuguguguggcccuccugggcuuuaucaugugggcuugccagaaggggaacauccgguguaauauuugcaucuga

SEQ ID NO: 200960 - RNA, 1701 nt, Artificial Sequence; identical to SEQ ID NO: 200959
  derived and/or modified CDS sequence (opt5) from hemagglutinin__InfluenzaA__AFJ78265

SEQ ID NO: 200961 - RNA, 1701 nt, Artificial Sequence
  derived and/or modified CDS sequence (opt5) from hemagglutinin__InfluenzaA__AFJ78276
augaagaccaucauugcccugagcuacauccucugccugguguucgcucagaaacuucccggcaacgacaauuccacagccacgcugugucucgggcaccaugcggucccuaacggaaccauuguuaagacaaucaccaaugaucaaauugaggugacaaacgcuaccgaacuggugcagucuagcuccacaggcgagaucugcgacucuccgcaccagauccuugauggggaaaauuguacccugauugacgcccuccugggagauccccagugcgacggcuuucaaaacaaaaagugggaucuguucgucgagagaagcaaagccuauuccaauuguuacccuuaugacgugcccgauuacgcuucucuccggagccugguugccuccagcgggacgcuugaauuuaacaaugagucuuucaacuggaccggagugacacagaauggcaccuccagcgcuugcauccgcagaucuaacaauuccuuuuucagccggcugaacuggcucacacaucugaaguuuaaguauccugcccuuaaugucaccaugcccaacaacgagaaauucgacaagcuguacauuuggggcgugcaccauccugggacggauaaugaccagaucuuucucuaugcgcaggccucuggacgcauuacaguuuccaccaaaagaagccaacagacagugaucccgaacauuggcucccggccccgcgucagaaauaucccuucucggaucagcauuuacuggaccaucgugaagcccggggauauucugcugaucaacuccaccggaaaucucauugcuccucgcggcuacuucaaaaucagaagcgggaagucuuccaucaugcggagcgacgcccccauuggaaaguguaacucugaaugcaucacaccgaauggcagcauuccuaacgacaaacccuuucagaaugugaaccgcaucacguauggcgcuuguccuagauacgucaagcagaauacccugaaacuugccacagggaugcggaacguucccgagaagcaaacccgcggaauuuucggcgcgaucgccggguuuaucgaaaauggaugggagggcaugguggaugggugguauggauucagacaccagaacuccgagggcauuggccaggcugccgaccugaaaucuacacaagcugccaucgaucagauuaaugggaagcucaaccggcugaucggaaaaaccaacgaaaaguuccaccagauugagaaggaauuuagcgagguggaaggcagaauccaggaccuugagaaauacgucgaggauacgaagguggaccugugguccuauaaugccgaacuccugguugcucuggagaaccaacauacaauugaucucaccgacagcgaaaugaauaaacuguucgagaagaccaaaaagcagcuucgcgaaaacgcggaggauauggggaauggaugcuuuaagaucuaccacaaaugugacaacgccugcaucggcucuauucggaaugggacauaugaucaugacguguacagagacgaggcucugaacaaucgcuuccagaucaagggcgucgaacucaaauccggauacaaggauuggauucuguggaucagcuuugccauuucuugcuuccuucuguguguggcccuccugggcuuuaucaugugggcuugccagaaagggaacauccgguguaauauuugcaucuga

SEQ ID NO: 200962 - RNA, 1701 nt, Artificial Sequence
  derived and/or modified CDS sequence (opt5) from hemagglutinin__InfluenzaA__AFJ78287
augaagaccaucauugcccugagcuacauccucugccugguguucgcucagaaacuucccggcaacgacaauuccacagccacgcugugucucgggcaccaugcggucccuaacggaaccauuguuaagacaaucaccaaugaucaaauugaggugacaaacgcuaccgaacuggugcagucuagcuccacaggcgagaucugcgacucuccgcaccagauccuugaugggaaaaauuguacccugauggacgcccuccugggagauccccagugcgacggcuuucaaaacaagaaaugggaucuguucgucgaaagaagcaaggccuauuccaauuguuacccuuaugacgugcccgauuacgcuucucuccggagccugguugccuccagcgggacgcuugaguuuaacaaugaaucuuucaacuggaccggagugacacagaauggcaccuccagcgcuugcauucgcagaucuaagaacuccuuuuucagccggcugaauuggcucacacaucugaacuuuaaauauccugcccuuaaugucaccaugcccaacaacgagcaguucgacaagcuguacaucuggggcgugcaccauccugggacggauaaagaccagauuuuuccguaugcgcaagccucuggacgcaucacaguuuccaccaagagaagccagcagacagugauucccaauaucggcucccggccucgcgucagaaacauucccucucggaucagcaucuacuggaccauugugaaaccuggggauauccuccugauuaauuccaccggaaaccugaucgcuccccgcggcuacuucaagauuagaagcgggaagucuuccaucaugcggagcgacgccccgaucggaaaauguaauucugagugcauuacaccuaacggcagcauccccaaugacaagccuuuucagaacgugaaucgcauuacguauggcgcuugucccagauacgucaaacaaaacacccucaagcuggccacagggaugcggaauguucccgaaaaacagacccgcggaaucuucggcgcgauugccggguuuaucgagaacggaugggaaggcaugguggaugggugguauggauucagacaccaaaauuccgagggccggggccaggcugccgaccuuaagucuacacaggcugccaucgaucagauuaacgggaaacugaauagacucaucggaaagaccaacgagaaguuccaccagauugaaaaagaguuuagcgaaguggagggccgcauccaagaccuggaaaaguacgucgaggauacgaaaauugaccuuugguccuauaacgccgagcugcucguggcucuggaaaaucagcauacaaucgaucugaccgacagcgagaugaacaaacucuucgaaaagaccaagaagcagcugcgggagaaugcggaagauauggggaacggaugcuuuaaaauuuaccacaagugugacaaugccugcaucggcucuaucagaaacgggacauaugaucaugacguuuaccgcgacgaggcucuuaauaaccgguuccagauuaaaggcguggagcugaaguccggauacaaagauuggauccucuggauuagcuuugccaucucuugcuuccugcuuugugucgcccugcucggcuuuauuaugugggcuugccaaaaggggaauaucagauguaacaucugcauuuga

SEQ ID NO: 200963 - RNA, 1698 nt, Artificial Sequence
  derived and/or modified CDS sequence (opt5) from hemagglutinin__InfluenzaA__AFJ78309
augaaggccaaacugcucgugcugcuuugcaccuucacagcuacguacgccgacaccaucuguauuggcuaucacgcgaacaauagcacagauaccgucgacacaguucuggagaagaacgugaccgugacacauuccgucaaucuccuggaagauucucacaacgggaaacuuugccugcucaagggaaucgcuccccugcagcugggcaauuguagcguggccggguggauucucggaaacccugagugcgaaucccugaucucuaaagagagcugguccuacauuguugaaaccccgaaucccgagaacggcacguguuauccuggguacuuugccgacuaugaggaacuuagagagcaacugucuagcguguccagcuucgaacgguuugagaucuuccccaaggagucuuccuggccuaaucauaccgucacaggagugagcgcuucuugcucccacaacggcaagagcucuuuuuaccgcaaucuccuguggcuuaccgagaaaaacggccuguaucccaaucucuccaagagcuacguuaacaauaaagaaaaggaagugcugguccuguggggagugcaucacccuuccaacaucggggaucagagagccauuuaccacacagagaacgcuuaugugucugucguuagcucccauuacagccggcgcuucaccccggaaaucgccaaaagacccaaggugcgggaccaggagggccgcauuaauuauuacuggacgcuccuggagccuggggauacaaucauuuuugaagcgaacggaaaucuuaucgcccccugguaugcuuucgcccugucuagaggcuuuggguccggaauuaucaccagcaacgcuccuauggacgagugugaugccaagugccagacaccccaaggcgcgaucaauucuagccucccguuccagaacgugcacccuauuaccaucggcgaaugucccaaauacguccgguccgccaagcugcgcauggugaccgggcuuagaaauauuccuucuauccagagccggggacuguuuggcgcuauugccggguucaucgagggaggcuggacagggaugaucgacggaugguauggcuaccaucaccagaacgaacaaggcuccggguacgcugccgaucagaaaagcacgcagaaugccauuaacggaaucaccaauaagguuaacucugugauugagaaaaugaauacacaguuuaccgcugucggcaaggaguucaacaaacucgaacgcagaauggagaaucugaacaagaagguggacgauggguuccuggacaucuggacauauaacgcggaacuccugguucuucuggagaaugaacggacccucgacuuucacgauuccaacgugaaaaaucuguacgagaaggucaaaagccaacuuaagaacaaugccaaagagauuggaaacggcugcuucgaauuuuaucauaaguguaauaacgagugcauggaaucugugaagaaugggacguacgacuaucccaaauacuccgaggagagcaagcugaaccgcgagaaaaucgauggcgucaagcucgaauccaugggaguguaucagauccuggcuauuuacucuacaguugccagcucccuggugcuccuggucucucuuggcgccaucagcuucuggaugugcuccaaugggagccugcaguguagaauuugcaucuga

SEQ ID NO: 200964 - RNA, 1701 nt, Artificial Sequence
  derived and/or modified CDS sequence (opt5) from hemagglutinin__InfluenzaA__AFJ78320
augaagaccaucauugcccugagcuacauccucugccugguguucgcucagaaacuucccggcaacgacaauuccacagccacgcugugucucgggcaccaugcggucccuaacggaacccugguuaagacaauuaccaaugaucaaaucgaggugacaaacgcuaccgaacuugugcagucuagcuccacaggcagaauuugcgacucuccgcaccagauccuggauggggagaauuguacccucaucgacgcccugcugggagauccccauugcgacggcuuucagaacaaagaaugggaucucuucgucgagcggagcaaggccuauuccaauuguuacccuuaugacgugcccgauuacgcuucucugcgcagccuuguugccuccagcgggacgcuggaauuuaacaaugagucuuucaacuggaccggaguggcucaaaauggcacauccagcgccugcaaaagacggucuaacaaguccuuuuucagccgccucaauuggcugcaccagcuuaaguauaaauacccugcgcugaacgucaccaugcccaauaacgagaaguuugacaaacucuauauuuggggcgugcaucacccuucuacagauuccgaccagaucagccuguacgcccaggcuuccgggagaguuaccgugucuacgaagcggagccaacagacagucauuccgaacaucggaucccgccccugggugagaggcgugagcucucggauuuccaucuacuggaccauugucaaaccuggggauauccugcucaucaauagcacaggaaaccugauugcccccagaggcuauuucaagaucagaucuggaaagagcuccauuaugcggucugacgcuccuaucgggaaauguaauagcgaaugcauuacccccaacggcuccaucccgaaugacaagccuuuucagaacguuaaucgcaucaccuacggcgccugucccagauaugugaaacagaacacacuuaagcuggcgacggggaugcggaaugugccugagaaacaaacccgcggaauuuucggcgccaucgcuggguuuauugaaaacggaugggagggcauggucgaugggugguacggauucagacaccagaauagcgagggcacaggccaggccgcugaccucaagucuacccaagccgccaucaaccagauuaaugggaaacugaaccggcuuaucggaaagacaaaugaaaaguuucaucagaucgagaaagaguucuccgaaguggaaggccgcauucaggaucuggagaaguauguugaggacaccaaaaucgaucucuggagcuacaacgcugaacugcugguggcgcucgagaaccaacacacgauugaccugacagauucugaaaugaauaaacuuuucgagcgcaccaagaagcagcugcgggaaaacgccgaggacauggggaauggaugcuuuaagaucuaucauaaaugugauaacgcuugcauuggcuccaucagaaaugggaccuacgaccacgaugucuaccgcgacgaggcccucaacaaucgguuccagauuaagggcguggaacugaaaagcggauauaaggacuggauccuuuggaucuccuuugccauuucuugcuuccugcucuguguugugcugcugggcuuuaucaugugggcuugccagaaagggaacauuagauguaauaucugcauuuga

SEQ ID NO: 200965 - RNA, 1698 nt, Artificial Sequence
  derived and/or modified CDS sequence (opt5) from hemagglutinin__InfluenzaA__AFJ78331
augaaggccaaacugcucgugcugcuuugcaccuucacagcuacguacgccgacaccaucuguauuggcuaucacgcgaacaauagcacagauaccgucgacacaguucuggagaagaacgugaccgugacacauuccgucaaucuccuggaagauucucacaacgggaaacuuugccugcucaagggaaucgcuccccugcagcugggcaauuguagcguggccggguggauucucggaaacccugagugcgaacugcuuaucuccaaagagucuuggagcuacauuguugaaaccccgaaucccgagaacggcacguguuauccuggguacuuugccgacuaugaggaacugagagagcaacucuccucugugagcuccuucgaacgguuugagaucuuccccaaggagagcucuuggccuaaucauaccgucacaggaguguccgcuagcugcucucacaacggcaaguccagcuuuuaccgcaaucugcuuuggcugaccggcaaaaacgggcucuaucccaaucugucuaaguccuacguuaacaauaaagaaaaggaggugcugguccucuggggagugcaucacccuccgaacaucggcgaucagagagcccuguaccacacagaaaacgcuuaugugagcgucguuuccucucauuacagccggcgcuucacccccgagauugccaaaagaccuaaggugcgggaccaggaagggcgcaucaauuauuacuggacgcuucuggagcccggagauacaauuaucuuugaggcgaacggcaaucucauugccccuugguaugcuuucgcccuguccagaggguuuggaagcggcaucauuaccucuaacgcucccauggacgaaugugaugccaagugccagacaccgcaaggcgcgaucaauuccagccuuccuuuccagaacgugcaccccgucaccaucggggaguguccuaaauacgugcggucugccaagcugcgcaugguuaccggacucagaaauauucccagcauccagucccggggccuguuuggggcuauugccggauucaucgaaggcggguggacaggaaugguggacggcugguauggcuaccaucaccagaacgagcaagggucuggauacgcugccgaucagaaaagcacgcagaaugccauuaacggcaucaccaauaaggucaacuccgugaucgaaaagaugaauacacaguuuaccgcuguugggaaagaguucaacaaacuggagcgcagaauggaaaaucucaacaagaagguggacgauggauuccuggacauuuggacauauaacgcggagcuucugguccuccuggaaaaugagcggacccuugacuuucacgauagcaacgugaaaaaucuguacgaaaaggucaaaucucaacucaagaacaaugccaaagagaucggcaacgggugcuucgaguuuuaucauaaguguaauaacgaaugcauggaguccgugaagaauggcacguacgacuaucccaaauacagcgaagagucuaagcugaaccgcgagaaaauugauggaguuaagcuggaauccaugggcguguaucagauccucgcuauuuacagcacagucgccuccucucuggugcuucugguuagccucggggccaucuccuucuggaugugcucuaauggaagccugcaguguagaaucugcauuuga

SEQ ID NO: 200966 - RNA, 1698 nt, Artificial Sequence; identical to SEQ ID NO: 200965
  derived and/or modified CDS sequence (opt5) from hemagglutinin__InfluenzaA__AFJ78342

SEQ ID NO: 200967 - RNA, 1698 nt, Artificial Sequence; identical to SEQ ID NO: 200965
  derived and/or modified CDS sequence (opt5) from hemagglutinin__InfluenzaA__AFJ78353

SEQ ID NO: 200968 - RNA, 1698 nt, Artificial Sequence
  derived and/or modified CDS sequence (opt5) from hemagglutinin__InfluenzaA__AFJ78364
augaaggccaaacugcucgugcugcuuugcaccuucacagcuacguacgccgacaccaucuguauuggcuaucacgcgaacaauagcacagauaccgucgacacaguucuggagaagaacgugaccgugacacauuccgucaaucuccuggaagauucucacaacgggaaacuuugccugcucaagggaaucgcuccccugcagcugggcaauuguagcguggccggguggauucucggaaacccugagugcgaaucccugaucucuaaagagagcugguccuacauuguugaaaccccgaaucccgagaacggcacguguuauccuggguacuuugccgacuaugaggaacuuagagagcaacugucuagcguguccagcuucgaacgguuugagaucuuccccaaggagucuuccuggccuaaucauaccgucacaggagugagcgcuucuugcucccacaacggcaagagcucuuuuuaccgcaaucuccuguggcuuaccgagaaaaacggccuguaucccaaucucuccaagagcuacguuaacaauaaagaaaaggaagugcugguccuguggggagugcaucacccuuccaacaucggggaucagagagccauuuaccacacagagaacgcuuaugugucugucguuagcucccauuacaaucggcgcuucaccccggaaaucgccaaaagacccaaggugcggaaccaggagggccgcauuaauuauuacuggacgcuccuggagccuggggacacaaucauuuuugaagcgaacggaaaucuuaucgcccccugguaugcuuucgcccugagcagaggcuuugggucuggaauuaucaccuccaacgcuccuauggaugagugugacgccaagugccagacaccccaaggcgcgaucaauagcucucucccguuccagaacgugcacccuauuaccaucggcgaaugucccaaauacguccggagcgccaagcugcgcauggugaccgggcuuagaaauauuccuuccauccagucucggggacuguuuggcgcuauugccggguucaucgagggaggcuggacagggaugaucgauggaugguauggcuaccaucaccagaacgaacaaggcagcggguacgcugccgaccagaaauccacgcagaaugccauuaacggaaucaccaauaagguuaacagcgugauugagaaaaugaauacacaguuuaccgcugucggcaaggaguucaacaaacucgaacgcagaauggagaaccugaauaagaagguggaugacggguuccuggauaucuggacauauaacgcggaacuccugguucuucuggagaaugaacggacccucgacuuucacgacucuaacgugaaaaaucuguacgagaaggucaaaucccaacuuaagaacaaugccaaagagauuggaaacggcugcuucgaauuuuaucauaaguguaauaacgagugcauggaaagcgugaagaaugggacguacgauuaucccaaauacucugaggaguccaagcugaaccgcgagaaaaucgacggcgucaagcucgaaagcaugggaguguaucagauccuggcuauuuacuccacaguugccucuagccuggugcuccuggucucccuuggcgccaucucuuucuggaugugcagcaaugggucccugcaguguagaauuugcaucuga

SEQ ID NO: 200969 - RNA, 1698 nt, Artificial Sequence
  derived and/or modified CDS sequence (opt5) from hemagglutinin__InfluenzaA__AFJ78375
augaaggccaaacugcucgugcugcuuugcaccuucacagcuacguacgccgacaccaucuguauuggcuaucacgcgaacaauagcacagauaccgucgacacaguucuggagaagaacgugaccgugacacauuccaucaaucuccuggaaaacucucacaaugggaaacuuugccugcucaagggaauugcuccccugcagcugggcaacuguagcgucgccggguggauccucggaaauccugagugcgaacugcuuauuuccaaagagucuuggagcuacaucguggaaaccccgaaccccgagaauggcacguguuauccugggcauuuugccgauuacgaggaacugagagagcaacucuccucuguuagcuccuucgaacgguuugagaucuuccccaaggagagcucuuggccuaaccacaccgugacaggagucuccgcuagcugcucucauaauggcaaguccagcuuuuaucgcaaccugcuuuggcugaccgaaaagaauggccucuaccccaaccugucuaaguccuaugugaauaacaaagagaaggaaguucuggugcucuggggaguccaccacccuagcaacauuggggaccagagagccaucuaccauacagagaaugcuuacguguccguggucucuagccacuauucccggcgcuucaccccggaaauuguuaaaagacccaaggugcgggaucaggagggccgcaucaacuacuauuggacgcugcuugagccuggggacacaauuaucuuugaagccaauggaaaccugauugcgcccugguacgccuucgcucucagcagaggcuuugggucuggaaucaucaccuccaaugccccuauggaugagugugacgcuaagugccagacaccccaaggcgccauuaacagcucucugccguuccagaaugugcauccugucaccaucggcgaaugucccaaauaugugcggagcgcgaaacuucgcaugguuaccgggcugagaaacauuccuuccauccagucucggggacucuuuggcgccauugcuggguucaucgagggaggcuggacagggaugaucgauggaugguacggcuaucaccaccagaaugaacaaggcagcggguacgccgcugaccagaaauccacgcagaacgccauuaauggaaucaccaacaaggugaauagcauuaucgagaaaaugaacacacaguuuaccgccgucggcaaggaguucaauaaacuggaacgcagaauggagaaccugaacaagaagguggaugacggguuccucgauauuuggacauacaaugcugaacugcuuguucugcucgagaacgaacggacccuggacuuucaugacucuaaugugaaaaaccuuuaugagaaggucaaaucccaacugaagaauaacgcgaaagagaucggaaauggcugcuucgaauuuuaccacaaguguaacaaugagugcauggaaagcgugaagaacgggacguaugauuaccccaaauauucugaggaguccaagcucaaucgcgagaaaaucgacggcgucaagcuggaaagcaugggaguguaccagauucuggccaucuauuccacaguugcuucuagccucgugcugcuugucucccugggcgccauuucuuucuggaugugcagcaacgggucccuccaguguagaaucugcauuuga

SEQ ID NO: 200970 - RNA, 1698 nt, Artificial Sequence; identical to SEQ ID NO: 193457
  derived and/or modified CDS sequence (opt5) from hemagglutinin__InfluenzaA__AFJ78386

SEQ ID NO: 200971 - RNA, 1698 nt, Artificial Sequence; identical to SEQ ID NO: 193457
  derived and/or modified CDS sequence (opt5) from hemagglutinin__InfluenzaA__AFJ78397

SEQ ID NO: 200972 - RNA, 1698 nt, Artificial Sequence; identical to SEQ ID NO: 200149
  derived and/or modified CDS sequence (opt5) from hemagglutinin__InfluenzaA__AFJ78408

SEQ ID NO: 200973 - RNA, 1698 nt, Artificial Sequence
  derived and/or modified CDS sequence (opt5) from hemagglutinin__InfluenzaA__AFJ78419
augaaggugaaacugcucguccugcuuugcaccuucacagccacguacgcugacaccaucuguauuggcuaucacgccaacaauagcacagauaccguugacacagugcuggagaagaacgugaccgucacacauuccgugaaucuccuggaagauucucacaacgggaaacuuugccugcucaagggaaucgcgccccugcagcugggcaauuguagcguugcuggguggauucucggaaacccugagugcgaacugcuuaucuccaaagagucuuggagcuacauuguggaaaagccgaaucccgagaacggcaccuguuauccuggguacuuugccgacuaugaggaacugagagagcaacucuccucugucagcuccuucgaacgguuugagaucuuccccaaggagagcucuuggccuaaucauacggugaccggaguuuccgccagcugcucucacaacggcaaauccagcuuuuacaagaaucugcuuuggcugacaggcaaaaacgggcucuaucccaaucugucuaaguccuacgcuaacaauaaagaaaaggaggugcugguccucuggggagugcaucacccuccgaacaucggcgaucagcgcgcccuguaccacaccgaaaacgcuuaugugagcgucguuuccucucauuacagcagaaaguucacacccgagauugccaaacggccuaaggugcgcgaccaggaagggagaaucaauuauuacuggacccuucuggagcccggagauacggugauuuuugaggcgaacggcaaucucaucgccccucgguaugcuuucgcccugucccgcggguuuggaagcggcauuaucaacucuaaugcucccauggacgaaugugaugccaaaugccagacaccgcaaggcgcgauuaacuccagccuuccuuuccagaauguccaccccgugaccaucggggaguguccuaaguacguuagaucugccaaacugcggauggugacaggacuccgcaacauccccagcauucaguccagaggccuguuuggggcuaucgccggauucauugaaggcggguggaccggaauggucgacggcugguauggcuaccaucaccagaaugagcaagggucuggauacgcugccgaucagaaguccacccagaacgccaucaauggcauuacaaacaaagugaauagcguuaucgaaaagaugaacacgcaguuuaccgcuguggggaaggaguucaauaaacuggagcggcgcauggaaaaccucaacaagaaagucgacgauggauucaucgacauuuggacauauaaugcggagcugcuugugcugcucgaaaacgagagaacccuggacuuucacgauagcaaugucaagaaccuuuacgaaaaagugaagucucaacugaagaauaacgccaaagagaucggcaaugggugcuucgaguuuuaucauaaguguaacgacgaaugcauggaguccguuaaaaauggcacauacgauuaucccaaguacagcgaagagucuaaacucaaccgggagaagauugacggagugaagcuggaauccaugggcgucuaucagauccuggcuauuuacagcaccguggccuccucucucguucugcuugugagccugggggccaucuccuucuggaugugcucuaauggaagccuccagugucgcaucugcauuuga

SEQ ID NO: 200974 - RNA, 1698 nt, Artificial Sequence
  derived and/or modified CDS sequence (opt5) from hemagglutinin__InfluenzaA__AFJ78430
augaaggugaaacugcucguccugcuuugcaccuucacagccacguacgcugacaccaucuguauuggcuaucacgccaacaauagcacagauaccguugacacagugcuggagaagaacgugaccgucacacauuccgugaaucuccuggaagauucucacaacgggaaacuuugccugcucaagggaaucgcgccccugcagcugggcaauuguagcguugcuggguggauucucggaaacccugagugcgaacugcuuaucuccagagagucuuggagcuacauuguggaaaauccgaaccccgagaauggcaccuguuauccugggcauuuugccgacuacgaggaacugcgggagcaacucuccucugucagcuccuucgaacgcuuugagaucuuccccaaagagagcucuuggccuaaccacacggugaccggaguuuccgccagcugcucucauaauggcaaguccagcuuuuauaagaaccugcuuuggcugacaggcaaaaaugggcucuaccccaaccugucuaaguccuaugcuaauaacaaagaaaaggaggugcugguccucuggggagugcaccacccuccgaacaucggcgaucagagagcccuguaccauaccgaaaaugcuuacgugagcgucguuuccucucacuauagccggaaauucacacccgagauugccaagcgcccuaaggugagagaccaggaagggcggaucaacuacuauuggacccuucugggacccggcgauacgauuaucuuugaggcgaaugggaaccucauugccccucgcuacgcuuucgcccuguccagaggauuuggcagcggcaucauuaauucuaacgcucccauggacgagugugaugccaaaugccagacaccgcaaggggcgaucaauuccagccuuccuuuccagaacgugcaucccgucaccaucggagaauguccuaaguaugugcggucugccaaacugcgcaugguuacaggccucagaaauauucccagcauccagucccgggggcuguuuggagcuauugccggcuucaucgaagggggauggaccggcaugguggacggcugguacggguaucaccaccagaacgaacaaggaucuggcuacgcugccgaucaaaagagcacccagaaugccauuaacgggaucacaaauaaagucaacuccgugaucgagaagaugaauacgcaguuuaccgcuguuggaaaagaguucaacaagcuggagcgcagaauggagaaccucaauaagaaaguggacgauggcuucauugacaucuggacauacaacgcggaacugcuuguccugcucgagaaugaacggacccuggacuuucaugauagcaacgugaagaaucuuuaugagaaagucaagucucagcugaaaaacaaugccaaggaaauugggaacggcugcuucgaguuuuaccacaaguguaaugacgagugcauggaauccgugaaaaacggaacauaugauuaccccaaguauagcgaggaaucuaaacucaaucgcgagaagaucgacggcguuaaacuggaguccauggggguguaccagauucuggcuaucuauagcaccgucgccuccucucucgugcugcuuguuagccugggagccaucuccuucuggaugugcucuaacggcagccuccaguguagaauuugcaucuga

SEQ ID NO: 200975 - RNA, 1698 nt, Artificial Sequence
  derived and/or modified CDS sequence (opt5) from hemagglutinin__InfluenzaA__AFJ78441
augaaggugaaacugaugguccuccugugcaccuucacagccacguacgcugacaccaucuguauuggcuaucacgccaacaauagcacagauaccguugacacagugcuugagaagaacgugaccgucacacauuccgugaaucugcucgaagauucucacaacgggaaacugugccuucugaagggaaucgcgccccuccagcugggcaauuguagcguugcuggguggauucugggaaacccugagugcgaacuccugaucuccagagagucuuggagcuacauuguggaaaaaccgaaucccgagaacggcaccuguuauccugggcauuuugccgacuacgaggaacuucgggagcaacuguccucugucagcuccuucgaacgcuuugagaucuuccccaaggagagcucuuggccuaaucacacggugaccggaguuuccgccagcugcucucauaacggcaaguccagcuuuuauaaaaaucuccuguggcuuacaggcaagaacgggcuguaccccaaucucucuaaauccuaugcuaacaauaaggaaaaagaggugcugguccuguggggagugcaccacccuccgaacaucggcgaucagaaggcccucuaccauaccgaaaacgcuuacgugagcgucguuuccucucacuauagcagaaaguucacacccgagauugccaaacggccuaaggugcgcgaccaggaagggagaaucaauuacuauuggacccugcuugagcccggagauacgauuaucuuugaggcgaacggcaaucugauugccccucgguacgcuuucgcccucucccgcggguuuggaagcggcaucauuaacucuaaugcucccauggacgaaugugaugccaaaugccagacaccgcaaggcgcgaucaacuccagccugccuuuccagaaugugcaucccgucaccaucggggaguguccuaaguaugugagaucugccaaacuucggaugguuacaggacugcgcaacauucccagcauccaguccagaggccucuuuggggcuauugccggauucaucgaaggcggguggaccggaaugguggacggcugguacggcuaucaccaccagaaugagcaagggucuggauacgcugccgaucaaaagagcacccagaacgccauuaauggcaucacaaacaaagucaauuccgugaucgaaaagaugaacacgcaguuuaccgcuguugacaaggaguucaauaaacuggagcggcgcauggaaaaccugaacaagaaaguggaugacggguucauugacaucuggacauacaaugcggagcuccugguccuucuggaaaacgagagaacccucgauuuucaugacagcaaugugaagaaccuguaugaaaaagucaagucucagcuuaagaauaacgccaaagagauuggaaauggcugcuucgaguuuuaccacaaguguaacgaugaaugcauggaguccgugaaaaaugggacauaugacuaccccaaguauagcgaagagucuaaacugaaccgggagaagaucgauggcguuaagcucgaauccaugggaguguaccagauucuggcuaucuauagcaccgucgccuccucucuggugcuccugguuagccuuggcgccaucuccuucuggaugugcucuaaugggagccugcagugucgcauuugcaucuga

SEQ ID NO: 200976 - RNA, 1698 nt, Artificial Sequence
  derived and/or modified CDS sequence (opt5) from hemagglutinin__InfluenzaA__AFJ78452
augaaggugaaacugcucguccugcuuugcaccuucacagccacguacgcugacaccaucuguauuggcuaucacgccaacaauagcacagauaccguugacacagugcuggagaagaacgugaccgucacacauuccgugaaucuccuggaagauucucacaacgggaaacuuugccugcucaagggaaucgcgccccugcagcugggcaauuguagcguugcuggguggauucucggaaacccugagugcgaacugcuuaucuccaaagagucuuggagcuacauuguggaaaagccgaaucccgagaacggcaccuguuauccugggcauuuugccgacuacgaggaacugagagagcaacucuccucugucagcuccuucgaacgguuugagaucuuccccaaggagagcucuuggccuaaucacacggugaccggaguuuccgccagcugcucucauaacggcaaauccagcuuuuauaagaaucugcuuuggcugacaggcaaaaacgggcucuaccccaaucugucuaaguccuaugcuaacaauaaagaaaaggaggugcugguccucuggggagugcaccacccuccgaacaucggcgaucagaaggcccuguaccauaccgaaaacgcuuacgugagcgucguuuccucucacuauagccgcaaauucauucccgagaucgccaagagaccuaaagugcgggaccaggaagggcgcauuaauuacuauuggacacuucuggagcccggagauaccaucauuuuugaggcgaacggcaaucucaucgccccuagauacgcuuucgcccugucccggggguuuggaagcggcauuaucaacucuaaugcucccauggacgaaugugaugccaagugccagacgccgcaaggcgcgaucaacuccagccuuccuuuccagaaugugcaucccgucacaauuggggaguguccuaaauaugugcgcucugccaagcugagaaugguuaccggacuccggaacauccccagcauucagucccgcggccuguuuggggcuaucgccggauucauugaaggcggguggacaggaaugguggacggcugguacggcuaucaccaccagaaugagcaagggucuggauacgcugccgaucagaaaagcacccagaacgccaucaauggcaucaccaacaaggucaauuccgugauugaaaagaugaacacacaguuuacggcuguugggaaagaguucaauaagcuggagagacggauggaaaaccucaacaaaaagguggacgauggauucaucgacauuuggaccuacaaugcggagcugcuuguccugcucgaaaacgagcgcacacuggacuuucaugauagcaaugugaaaaaccuuuaugaaaaggucaagucucaacugaaaaauaacgccaaggagaucggcaaugggugcuucgaguuuuaccacaaauguaacgacgaaugcauggaguccgugaagaauggcaccuaugauuaccccaaauauagcgaagagucuaagcucaacagagagaagauugacggaguuaaacuggaauccaugggcguguaccagauccuggcuaucuauagcacagucgccuccucucucgugcugcuuguuagccugggggccauuuccuucuggaugugcucuaauggaagccuccagugucggaucugcauuuga

SEQ ID NO: 200977 - RNA, 1698 nt, Artificial Sequence
  derived and/or modified CDS sequence (opt5) from hemagglutinin__InfluenzaA__AFJ78463
augaaggugaaacugcucguccugcuuugcaccuucacagccacguacgcugacaccaucuguauuggcuaucacgccaacaauagcacagauaccguugacacagugcuggagaagaacgugaccgucacacauuccgugaaucuccuggaagauucucacaacgggaaacuuugccugcucaagggaaucgcgccccugcagcugggcaauuguagcguugcuggguggauucucggaaacccugagugcgaacugcuuaucuccaaagagucuuggagcuacauuguggaaaagccgaaucccgagaacggcaccuguuauccugggcauuuugccgacuacgaggaacugagagagcaacucuccucugucagcuccuucgaacgguuugagaucuuccccaaggagagcucuuggccuaaucacacggugaccggaguuuccgccagcugcucucauaacggcaaauccagcuuuuauaagaaucugcuuuggcugacaggcaaaaacgggcucuaccccaaucugggaaagucuuaugcuaacaauaaagaaaaggaggugcugguccucuggggcgugcaccacccuccgaacaucggggaucagaaggcccuguaccauaccgaaaacgcuuacguguccgucguuagcucccacuauucucgcaaauucauucccgagaucgccaagagaccuaaagugcgggaccaggaaggacgcauuaauuacuauuggacacuucuggagcccggcgauaccaucauuuuugaggcgaacgggaaucucaucgccccuagauacgcuuucgcccugagccggggauuuggcuccggcauuaucaacagcaaugcucccauggacgaaugugaugccaagugccagacgccgcaaggggcgaucaacucuucccuuccuuuccagaaugugcaucccgucacaauuggagaguguccuaaauaugugcgcagcgccaagcugagaaugguuaccggccuccggaacauccccucuauucagagccgcgggcuguuuggagcuaucgccggcuucauugaagggggauggacaggcaugguggacggcugguacggguaucaccaccagaaugagcaaggauccggcuacgcugccgaucagaaaucuacccagaacgccaucaaugggaucaccaacaaggucaauagcgugauugaaaagaugaacacacaguuuacggcuguuggaaaagaguucaauaagcuggagagacggauggaaaaccucaacaaaaagguggacgauggcuucaucgacauuuggaccuacaaugcggagcugcuuguccugcucgaaaacgagcgcacacuggacuuucaugauuccaaugugaaaaaccuuuaugaaaaggucaagagccaacugaaaaauaacgccaaggagaucgggaauggcugcuucgaguuuuaccacaaauguaacgacgaaugcauggagucugugaagaauggaaccuaugauuaccccaaauauuccgaagagagcaagcucaacagagagaagauugacggcguuaaacuggaaucuauggggguguaccagauccuggcuaucuauuccacagucgccagcucccucgugcugcuuguuucucugggagccauuagcuucuggaugugcuccaauggcucucuccagugucggaucugcauuuga

SEQ ID NO: 200978 - RNA, 1698 nt, Artificial Sequence
  derived and/or modified CDS sequence (opt5) from hemagglutinin__InfluenzaA__AFJ78474
augaaggugaaacugcucguccugcuuugcaccuucacagccacguacgcugacaccaucuguauuggcuaucacgccaacaauagcacagauaccguugacacagugcuggagaagaacgugaccgucacacauuccgugaaucuccuggaagauucucacaacgggaaacuuugccugcucaagggaaucgcgccccugcagcugggcaauuguagcguugcuggguggauucucggaaacccugagugcgaacugcuuaucuccagagagucuuggagcuacauuguggaaaaaccgaaucccgagaacggcaccuguuauccugggcauuuugccgacuacgaggaacugcgggagcaacucuccucugucagcuccuucgaacgcuuugagaucuuccccaaggagagcucuuggccuaaucacacggugaccggaguuuccgccagcugcucuuauaacggcaaguccagcuuuuacaaaaaucugcuuuggcugacaggcaagaacgggcucuaucccaaucugucuaaauccuacgcuaacaauaaggaaaaagaggugcugguccucuggggagugcaucacccuccgaacaucggcgaucagagagcccuguaccacaccgaaaacgcuuaugugagcgucguuuccucucauuacagccggaaguucacacccgagauugccaagcgcccuaaagugagagaccaggaagggcggaucaauuauuacuggacccuucuggagcccggagauacgauuaucuuugaggcgaacggcaaucucauugccccucgcuaugcuuucgcccuguccagaggguuuggaagcggcaucauuaacucuaaugcucccauggacgaaugugaugccaagugccagacaccgcaaggcgcgaucaacuccagccuuccuuuccagaaugugcaccccgucaccaucggggaguguccuaaauacgugcggucugccaagcugcgcaugguuacaggacucagaaacauucccagcauccagucccggggccuguuuggggcuauugccggauucaucgaaggcggguggaccggaaugguggacggcugguauggcuaccaucaccagaaugagcaagggucuggauacgcugccgaucagaaaagcacccagaacgccauuaauggcaucacaaacaaggucaauuccgugaucgaaaagaugaacacgcaguuuaccgcuguugggaaagaguucaauaagcuggagcgcagaauggaaaaccucaacaaaaagguggacgauggauucauugacaucuggacauauaaugcggagcugcuuguccugcucgaaaacgagcggacccuggacuuucacgauagcaaugugaaaaaccuuuacgaaaaggucaaaucucaacugaagaauaacgccaaggagauuggcaaugggugcuucgaguuuuaucauaaauguaacgacgaaugcauggaguccgugaagaauggcacauacgauuaucccaaauacagcgaagagucuaagcucaaccgcgagaaaaucgacggaguuaagcuggaauccaugggcguguaucagauucuggcuaucuacagcaccgucgccuccucucucgugcugcuuguuagccugggggccaucuccuucuggaugugcucuaauggaagccuccaguguagaauuugcaucuga

SEQ ID NO: 200979 - RNA, 1698 nt, Artificial Sequence
  derived and/or modified CDS sequence (opt5) from hemagglutinin__InfluenzaA__AFJ78485
augaaggugaaacugcucguccugcuuugcaccuucacagccacguacgcugacaccaucuguauuggcuaucacgccaacaauagcacagauaccguugacacagugcuggagaagaacgugaccgucacacauuccgugaaucuccuggaagauucucacaacgggaaacuuugccugcucaagggaaucgcgccccugcagcugggcaauuguagcguugcuggguggauucucggaaacccugagugcgaacugcuuaucuccagagagucuuggagcuacauuguggaaaaaccgaaucccgagaacggcaccuguuauccugggcauuuugccgacuacgaggaacugcgggagcaacucuccucugucagcuccuucgaacgcuuugagaucuuccccaaggagagcucuuggccuaaucacacgaccacaggaguguccgccagcugcucucauaacggcgaauccagcuuuuauaagaaucugcuuuggcugaccggcaaaaacgggcucuaccccaaucugucuaaguccuaugcuaacaauaaagagaaggaaguucuggugcucuggggaguccaccacccuccgaacaucggcgaucagagagcccuguaccauacagagaacgcuuacgugagcguggucuccucucacuauagccggaaauucacccccgaaauugccaagcgcccuaagguuagagaccaggaggggcggaucaauuacuauuggacgcuucuggagcccggagauacaauuaucuuugaagcgaacggcaaucucauugccccucgcuacgcuuucgcccuguccagaggguuuggaagcggcaucauuaacucuaaugcucccauggacgagugugaugccaaaugccagaccccgcaaggcgcgaucaacuccagccuuccuuuccagaaugugcaucccgugacaaucggggaauguccuaaguauguccggucugccaaacugcgcauggugaccggacucagaaacauucccagcauccagucccggggccuguuuggggcuauugccggauucaucgagggcggguggaccggaaugguugacggcugguacggcuaucaccaccagaaugaacaagggucuggauacgcugccgaucagaaguccacacagaacgccauuaauggcaucacgaacaaagugaauagcgucaucgagaagaugaacacccaguuuacagcuguggggaaagaguucaauaagcuggaacgcagaauggagaaccucaacaagaaaguugaagacggauucauugauaucuggaccuacaaugcggagcugcuugugcugcucgaaaacgagcggacacuggacuuucaugacagcaaugucaagaaccuuuaugagaaagugaagucucaacugaaaaauaacgccaaggaaauuggcaaugggugcuucgaguuuuaccacaaguguaacgaugaaugcauggaguccgucaaaaauggcaccuaugacuaccccaaguauagcgaggaaucuaaacucaaccgcgagaagaucgauggagugaaacuggaauccaugggcguuuaccagauucuggcuaucuauagcacgguggccuccucucucguccugcuugugagccugggggccaucuccuucuggaugugcucuaauggaagccuccaguguagaauuugcaucuga

SEQ ID NO: 200980 - RNA, 1698 nt, Artificial Sequence
  derived and/or modified CDS sequence (opt5) from hemagglutinin__InfluenzaA__AFJ78496
augaaggugaaacugcucguccugcuuugcaccuucacagccacguacgcugacaccaucuguauuggcuaucacgccaacaauagcacagauaccguugacacagugcuggagaagaacgugaccgucacacauuccgugaaucuccuggaagauucucacaacgggaaacuuugccugcucaagggaaucgcgccccugcagcugggcaauuguagcguugcuggguggauucucggaaacccugagugcgaacugcuuaucuccagagagucuuggagcuacauuguggaaaaaccgaaucccgagaacggcaccuguuauccugggcauuuugccgacuacgaggaacugcgggagcaacucuccucugucagcuccuucgaacgcuuugagaucuuccccaaggagagcucuuggccuaaucacacgaccacaggaguguccgccagcugcucucauaacggcgaauccagcuuuuauaagaaucugcuuuggcugaccggcaaaaacgggcucuaccccaaucugucuaaguccuaugcuaacaauaaagagaaggaaguucuggugcucuggggaguccaccacccuccgaacaucggcgggcagagagcccuguaccauacagagaacgcuuacgugagcguggucuccucucacuauagccggaaauucacccccgaaauugccaagcgcccuaagguuagagaucaggagggacggaucaauuacuauuggacgcuucuggagcccggcgacacaauuaucuuugaagcgaacgggaaucucauugccccucgcuacgcuuucgcccuguccagaggauuuggcagcggcaucauuaacucuaaugcucccauggaugagugugacgccaaaugccagaccccgcaaggggcgaucaacuccagccuuccuuuccagaaugugcaucccgugacaaucggagaauguccuaaguauguccggucugccaaacugcgcauggugaccggccucagaaacauucccagcauccagucccgggggcuguuuggagcuauugccggcuucaucgaagggggauggaccggcaugguugauggcugguacggguaucaccaccagaaugagcaaggaucuggcuacgcugccgaccagaaguccacacagaacgccauuaaugggaucacgaacaaagugaauagcgucaucgagaagaugaacacccaguuuacagcugugggaaaagaguucaauaagcuggaacgcagaauggagaaccucaacaagaaaguugaugacggcuucauugauaucuggaccuacaaugcggaacugcuugugcugcucgagaacgaacggacacuggacuuucaugacagcaaugucaagaaccuuuaugagaaagugaagucucaacugaaaaauaacgccaaggagauugggaauggcugcuucgaauuuuaccacaaguguaacgaugagugcauggaauccgucaaaaauggaaccuaugacuaccccaaguauagcgaggagucuaaacucaaccgcgaaaagaucgauggcgugaaacuggaguccauggggguuuaccagauucuggcuaucuauagcacgguggccuccucucucguccugcuugugagccugggagccaucuccuucuggaugugcucuaauggcagccuccaguguagaauuugcaucuga

SEQ ID NO: 200981 - RNA, 1698 nt, Artificial Sequence
  derived and/or modified CDS sequence (opt5) from hemagglutinin__InfluenzaA__AFJ78518
augaaggugaaacugcucguccugcuuugcaccuucacagccacguacgcugacaccaucuguauuggcuaucacgccaacaauagcacagauaccguugacacagugcuggagaagaacgugaccgucacacauuccgugaaucuccuggaagauucucacaacgggaaacuuugccugcucaagggaaucgcgccccugcagcugggcaauuguagcguugcuggguggauucucggaaacccugagugcgaacugcuuaucuccagagagucuuggagcuacauuguggaaaaaccgaaucccgagaacggcaccuguuauccugggcauuuugccgacuacgaggaacugcgggagcaacucuccucugucagcuccuucgaacgcuuugagaucuuccccaaggagagcucuuggccuaaucacacgaccacaggaguguccgccagcugcucucauaacggcgaauccagcuuuuauaagaaucugcuuuggcugaccggcaaaaacgggcucuaccccaaucugucuaaguccuaugcuaacaauaaagagaaggaaguucuggugcucuggggaguccaccacccuccgaacaucggcgaucagagagcccuguaccauacagagaacgcuuacgugagcguggucuccucucacuauagccggaaauucacccccgaaauugccaagcgcccuaagguuagagaccaggaggggcggaucaauuacuauuggacgcuucuggagcccggagauacaauuaucuuugaagcgaacggcaaucucauugccccucgcuacgcuuucgcccuguccagaggguuuggaagcggcaucauuaacucuaaugcucccauggacgagugugaugccaaaugccagaccccgcaaggcgcgaucaacuccagccuuccuuuccagaaugugcaucccgugacaaucggggaauguccuaaguauguccggucugccaaacugcgcauggugaccggacucagaaacauucccagcauccagucccggggccuguuuggggcuauugccggauucaucgagggcggguggaccggaaugguugacggcugguacggcuaucaccaccagaaugaacaagggucuggauacgcugccgaucagaaguccacacagaacgccauuaauggcaucacgaacaaagugaauagcgucaucgagaagaugaacacccaguuuacagcuguggggaaagaguucaauaagcuggaacgcagaauggagaaccucaacaagaaaguugacgauggauucauugacaucuggaccuacaaugcggaacugcuugugcugcucgagaacgaacggacacuggacuuucaugauagcaaugucaagaaccuuuaugagaaagugaagucucaacugaaaaauaacgccaaggagauuggcaaugggugcuucgaauuuuaccacaaguguaacgacgagugcauggaauccgucaaaaauggcaccuaugauuaccccaaguauagcgaggagucuaaacucaaccgcgaaaagaucgacggagugaaacuggaguccaugggcguuuaccagauucuggcuaucuauagcacgguggccuccucucucguccugcuugugagccugggggccaucuccuucuggaugugcucuaauggaagccuccaguguagaauuugcaucuga

SEQ ID NO: 200982 - RNA, 1698 nt, Artificial Sequence
  derived and/or modified CDS sequence (opt5) from hemagglutinin__InfluenzaA__AFJ78529
augaaggugaaacugcucguccugcuuugcaccuucacagccacguacgcugacaccaucuguauuggcuaucacgccaacaauagcacagauaccguugacacagugcuggagaagaacgugaccgucacacauuccgugaaucuccuggaagauaaccacaaugggaaacuuugccugcucaagggaaucgcgccccugcagcugggcaacuguucuguugcuggguggauucucggaaauccugagugcgaacugcuuaucagcaaagaguccuggucuuacauuguggaaagaccgaaccccgagaauggcaccuguuauccugggcauuuugccgacuacgaggaacugcgggagcaacucagcuccgucucuagcuucgaacgcuuugagaucuuccccaaggaguccagcuggccuaaccacacggugaccggaguuucugccuccugcagccauaauggcgaaucuuccuuuuauaagaaccugcuuuggcugacaggcaaaaaugggcucuaccccaaccugagcaagucuuaugcuaauaacaaagagaaggaagugcugguccucuggggagugcaccacccuccgaacaucggcgaucagaugacccuguaccauaaagagaaugccuacguguccgucguuagcucccacuauucuagaaaguucacacccgaaauugcuaagcggccuaaagugcgcgaccaggaggggagaaucaacuacuauuggacccuucuggagcccggagauacgauuaucuuugaagccaauggcaaccucauugcgccucgguacgccuucgcucugagccgcggguuuggauccggcaucauuaauagcaacgcccccauggacgagugugaugcuaagugccagacaccgcaaggcgccaucaauucuucccuuccuuuccagaacgugcaucccgucaccaucggggaauguccuaaauaugugagaagcgcgaagcugcggaugguuacaggacuccgcaauauucccucuauccagagcagaggccuguuuggggccauugcuggauucaucgagggcggguggaccggaaugguggacggcugguacggcuaucaccaccagaacgaacaaggguccggauacgccgcugaucagaaaucuacccagaaugccauuaacggcaucacaaauaaggucaacagcgugaucgagaaaaugaauacgcaguuuaccgccguugggaaggaguucaacaagcuggaacggcgcauggagaaccucaauaaaaagguggacgauggauucauugacgucuggacauacaacgcugaacugcuugugcugcucgagaaugaaagaacccuggacuuucaugauuccaacgucaaaaaucuuuaugagaaggugaaaaaccaacugaagaauaacgcgaaggagaucggcaaugggugcuucgaauuuuaccacaaauguaacgacgagugcauggaaagcguuaagaauggcacauaugauuaccccaaauauucugaggaguccaagcucagccgggagaaaauugacggagugaagcuggaaucuaugggcgucuaccagauccuggccauuuauuccaccguggcuagcucccucguucugcuugugucucugggggccaucagcuucuggaugugcuccaacggaucucuccagugucgcaucugcauuuga

SEQ ID NO: 200983 - RNA, 1698 nt, Artificial Sequence; identical to SEQ ID NO: 200982
  derived and/or modified CDS sequence (opt5) from hemagglutinin__InfluenzaA__AFJ78540

SEQ ID NO: 200984 - RNA, 1698 nt, Artificial Sequence; identical to SEQ ID NO: 200982
  derived and/or modified CDS sequence (opt5) from hemagglutinin__InfluenzaA__AFJ78551

SEQ ID NO: 200985 - RNA, 1698 nt, Artificial Sequence
  derived and/or modified CDS sequence (opt5) from hemagglutinin__InfluenzaA__AFJ78562
augaaggugaaacugcucguccugcuuugcaccuucacagccacguacgcugacaccaucuguauuggcuaucacgccaacaauagcacagauaccguugacacagugcuggagaagaacgugaccgucacacauuccgugaaucuccuggaagauaaccacaaugggaaacuuugccugcucaagggaaucgcgccccugcagcugggcaacuguucuguugcuggguggauucucggaaauccugagugcgaacugcuuaucagcaaagaguccuggucuuacauuguggaaagaccgaaccccgagaauggcaccuguuauccugggcauuuugccgacuacgaggaacugcgggagcaacucagcuccgucucuagcuucgaacgcuuugagaucuuccccaaggaguccagcuggccuaaccacacggugaccggaguuucugccuccugcagccauaauggcgaaucuuccuuuuauaagaaccugcuuuggcugacaggcaaaaaugggcucuaccccacccugagcaagucuuaugcuaacaauaaagagaaggaagugcugguccucuggggagugcaccacccuccgaacaucggcgaucagaugacacuguaccauaaagagaacgccuacguguccgucguuagcucccacuauucuagaaaguucacccccgaaauugcuaagcggcuuaaagugcgcgaccaggaggggagaaucaauuacuauuggacgcugcucgagccuggagauacaauuaucuuugaagccaacggcaaucugauugcgccccgguacgccuucgcucuuagccgcgggcugggauccggcaucauuaacagcaaugccccuauggacgagugugaugcuaagugccagacaccccaaggcgccaucaacucuucccucccguuucagaaugugcauccugucaccaucggggaaugucccaaauaugugagaagcgcgaagcugcggaugguuaccggacugcgcaacauuccuucuauccagagcagaggccucuucggggccauugcuggauuuaucgagggcggguggaccggaaugguggacggcugguacggcuaucaccaccagaaugaacaaggguccggauacgccgcugaucagaaaucuacacagaacgccauuaauggcaucacgaacaaggucaauagcgugaucgagaaaaugaacacccaguucacagccguugggaaggaguuuaauaagcuggaacggcgcauggagaaccuuaacaaaaagguggacgauggauucauugacgucuggaccuacaaugcugaacugcucgugcugcuugagaacgaaagaacacuggacuuccaugauuccaaugucaaaaaccucuaugagaaggugaaaaaucaacugaagaacaaugcgaaggagaucggcaacgggugcuuugaguucuaccacaaauguaaugacgaaugcauggaaagcguuaagaacggcaccuaugauuaccccaaauauucugaggaguccaagcugagccgggagaaaauugacggagugaagcucgaaucuaugggcgucuaccagauccuggccauuuauuccacgguggcuagcucccuuguucugcucgugucucugggggccaucagcuuuuggaugugcuccaauggaucucugcagugucgcaucugcauuuga

SEQ ID NO: 200986 - RNA, 1698 nt, Artificial Sequence
  derived and/or modified CDS sequence (opt5) from hemagglutinin__InfluenzaA__AFJ78573
augaaggugaaacugcucguccugcuuugcaccuucacagccacguacgcugacaccaucuguauuggcuaucacgccaacaauagcacagauaccguugacacagugcuggagaagaacgugaccgucacacauuccgugaaucuccuggaagauaaccacaaugggaaacuuugccugcucaagggaaucgcgccccugcagcugggcaacuguucuguugcuggguggauucucggaaauccugagugcgaacugcuuaucagcaaagaguccuggucuuacauuguggaaagaccgaaccccgagaauggcaccuguuauccugggcauuuugccgacuacgaggaacugcgggagcaacucagcuccgucucuagcuucgaacgcuuugagaucuuccccaaggaguccagcuggccuaaccacacggugaccggaguuucugccuccugcagccauaauggcgaaucuuccuuuuauaagaaccugcuuuggcugacaggcaaaaaugggcucuaccccaaccugagcaagucuuaugcuaauaacaaagagaaggaagugcugguccucuggggagugcaccacccuccgaacaucggcgaucagaugacccuguaccauaaagagaaugccuacguguccgucguuagcucccacuauucuagaaaguucacacccgaaauugcuaagcggccuaaagugcgcgaccaggaggggagaaucaacuacuauuggacccuucuggagcccggagauacgauuaucuuugaagccaauggcaaccucauugcgccucgguacgccuucgcucugagccgcggguuuggauccggcaucauuaauagcaacgccucuauggacgagugugaugcuaagugccagacaccccaaggcgccaucaauuccagccuuccguuccagaacgugcauccugucaccaucggggaaugucccaaauaugugagaucugcgaagcugcggaugguuacaggacuccgcaauauuccuagcauccaguccagaggccuguuuggggccauugcuggauucaucgagggcggguggaccggaaugguggacggcugguacggcuaucaccaccagaacgaacaagggucuggauacgccgcugaucagaaaagcacccagaaugccauuaacggcaucacaaauaaggucaacuccgugaucgagaaaaugaauacgcaguuuaccgccguugggaaggaguucaacaagcuggaacggcgcauggagaaccucaauaaaaagguggacgauggauucauugacgucuggacauacaacgcugaacugcuugugcugcucgagaaugaaagaacccuggacuuucaugauagcaacgucaaaaaucuuuaugagaaggugaaaaaccaacugaagaauaacgcgaaggagaucggcaaugggugcuucgaauuuuaccacaaauguaacgacgagugcauggaaucuguuaagaauggcacauaugauuaccccaaauauuccgaggaggccaagcucagccgggagaaaauugacggagugaagcuggaaucuaugggcgucuaccagauccuggcuauuuauuccaccguggccagcucccucguucugcuugugucucugggggccaucagcuucuggaugugcuccaacggaucucuccagugucgcaucugcauuuga

SEQ ID NO: 200987 - RNA, 1698 nt, Artificial Sequence
  derived and/or modified CDS sequence (opt5) from hemagglutinin__InfluenzaA__AFJ78584
augaaggugaaacugcucguccugcuuugcaccuucacagccacguacgcugacaccaucuguauuggcuaucacgccaacaauagcacagauaccguugacacagugcuggagaagaacgugaccgucacacauuccgugaaucuccuggaaaacucucacaaugggaaacuuugccugcucaagggaaucgcgccccugcagcugggcaacuguagcguugcuggguggauucucggaaauccugagugcgaacugcuuaucuccaaagagucuuggagcuacauuguggaaaagccgaaccccgagaauggcaccuguuauccugggcauuuugccgauuacgaggaacugagagagcaacucuccucugucagcuccuucgaacgguuugagaucuuccccaaggagagcucuuggccuaaccacacggugaccggaguuuccgccagcugcucucauaauggcgaaaacuccuuuuaucgcaaucugcuuuggcugacacggaaaaacggccucuaccccaaucugagcaagucuuaugcuaacaacaaagagaaggaagugcugguccucuggggagugcaccacccuccgaauaucggggaccagaaagcccuguaccauaccgagaacgcuuacguguccgucguuagcucccacuauucuagaaaguucacacccgaaauugccaagcgcccuaaagugagagaucaggagggccggaucaauuacuauuggacccuucuggagcccggggacacgauuaucuuugaagcgaacggaaaucucauugccccucgcuacgcuuucgcccugagcagaggcuuuggguccggaaucauuaacagcaaugcucccauggauaagugugacgccaaaugccagacaccgcaaggcgcgaucaacucuucccuuccuuuccagaaugugcaucccgucgccaucggcgaguguccuaaguaugugcggagcgcuaaacugcgcaugguuaccgggcucagaaacauucccucuauccagagccggggacuguuuggcgccauugcuggguucaucgaaggaggcuggacagggaugguggauggaugguacggcuaucaccaccagaaugagcaaggcuccggguacgccgccgaccagaagucuacccagaacgcuauuaauggaaucaccaacaaagucaauagcgugaucgaaaagaugaacacacaguuuacggcgguuggcaaggaguucaacaaacuggagcgcagaauggaaaaucucaacaagaaaguggaugacggguucauugauaucuggaccuacaaugccgagcugcuuguccugcucgaaaacgagcggacacuggacuuucaugacuccaaugugaagaaccuuuaugaaaaagucaagagccaacugaagaauaacgcuaaagagauuggaaauggcugcuucgaguuuuaccacaaguguaacgaugaaugcauggagucugugaaaaaugggaccuaugacuaccccaaguauuccgaagagagcaaacucaaccgcgagaagaucgauggcguuaagcuggaaucuaugggaguguaccagauucuggccaucuauuccacagucgccagcucccucgugcugcuuguuucucugggcgcuaucagcuucuggaugugcuccaaugggucucuccaguguagaauuugcaucuga

SEQ ID NO: 200988 - RNA, 1698 nt, Artificial Sequence
  derived and/or modified CDS sequence (opt5) from hemagglutinin__InfluenzaA__AFJ78595
augaaggugaaacugcucguccugcuuugcaccuucacagccacguacgcugacaccaucuguauuggcuaucacgccaacaauagcacagauaccguugacacagugcuggagaagaacgugaccgucacacauuccgugaaucuccuggaaaacucucacaaugggaaacuuugccugcucaagggaaucgcgccccugcagcugggcaacuguagcguugcuggguggauucucggaaauccugagugcgaacugcuuaucuccaaagagucuuggagcuacauuguggaaaagccgaaccccgagaauggcaccuguuauccugggcauuuugccgauuacgaggaacugagagagcaacucuccucugucagcuccuucgaacgguuugagaucuuccccaaggagagcucuuggccuaaccacacggugaccggaguuuccgccagcugcucucauaauggcgaauccagcuuuuaucgcaaccugcuuuggcugacaggcaaaaaugggcucuaccccaaccugucuaaguccuaugcuaauaacagagagaaagaagugcugguccucuggggagugcaccacccuccgaacaucggcgaccagaaggcccuguaccauaccgagaaugcuuacgugagcgucguuuccucucacuauagccggaaauucacacccgaaauugccaagcgcccuaaggugagagaucaggaggggcggaucaacuacuauuggacccuucuggagcccggagacacgauuaucuuugaagcgaauggcaaccucauugccccucgcuacgcuuucgcccuguccagaggguuuggaagcggcaucauuaauucuaacgcucccauggauaaaugugacgccaagugccagacaccgcaaggcgcgaucaauuccagccuuccuuuccagaacgugcaucccgucaccaucggggaguguccuaaauaugugcggucugccaagcugcgcaugguuacaggacucagaaauauucccagcauccagucccggggccuguuuggggcuauugccggauucaucgaaggcggguggaccggaaugguggauggcugguacggcuaucaccaccagaacgagcaagggucuggauacgcugccgaccagaaaagcacccagaaugccauuaacggcaucacaaauaaggucaacuccgugaucgaaaagaugaauacgcaguuuaccgcuguugggaaagaguucaacaagcuggagcgcagaauggaaaaccucaauaaaaagguggaugacggauucauugauaucuggacauacaacgcggagcugcuuguccugcucgaaaaugagcggacccuggacuuucaugacagcaacgugaaaaaucuuuaugaaaaggucaaaucucaacugaagaacaaugccaaggagauuggcaacgggugcuucgaguuuuaccacaaauguaaugaugaaugcauggaguccgugaagaacggcacauaugacuaccccaaauauagcgaagagucuaagcucaaucgcgagaaaaucgauggaguuaagcuggaauccaugggcguguaccagauucuggcuaucuauagcaccgucgccuccucucucgugcugcuuguuagccugggggccaucuccuucuggaugugcucuaacggaagccuccaguguagaauuugcaucuga

SEQ ID NO: 200989 - RNA, 1698 nt, Artificial Sequence
  derived and/or modified CDS sequence (opt5) from hemagglutinin__InfluenzaA__AFJ78617
augaaggugaaacugcucguccugcuuugcaccuucacagccacguacgcugacaccaucuguauuggcuaucacgccaacaauagcacagauaccguugacacagugcuggagaagaacgugaccgucacacauuccgugaaucuccuggaaaacucucacaaugggaaacuuugccugcucaagggaaucgcgccccugcagcugggcaacuguagcguugcuggguggauucucggaaauccugagugcgaacugcuuaucuccaaagagucuuggagcuacauuguggaaaagccgaaccccgagaauggcaccuguuauccugggcauuuugccgauuacgaggaacugagagagcaacucuccucugucagcuccuucgaacgguuugagaucuuccccaaggagagcucuuggccuaaccacacggugaccggaguuuccgccagcugcucucaugacggcgaauccagcuuuuaucgcaaucugcuuuggcugacaggcaaaaacgggcucuaccccaaucugucuaaguccuaugcuaacaauaaagagaaggaagugcugguccucuggggagugcaccacccuccgagcaucuccgaucagaaaacccuguaccauacagagaacgcccacgugucugucguuagcucccauuacagcagaaaguucacccccgaaauugcuaagcggccuaaagugcgcgaccaggagggcagaaucaacuauuacuggacgcuucuggagcccggggauacaauuaucuuugaagccaauggaaaccucauugcgccucgguaugccuucgcucugucucgcggcuuuggguccggaaucauuaauagcaacgcccccauggacaagugugaugcuaaaugccagaccccgcaaggcgccaucaauucuagccuuccuuuccagaacgugcaccccgucacaaucggcgaguguccuaaguacgugagauccgcgaaacugcggaugguuaccgggcuccgcaauauucccucuauccagagcagaggacuguuuggcgccauugcuggguucaucgaaggaggcuggaccgggaugguggacggaugguauggcuaccaccaucagaacgagcaaggcuccggguaugccgcugaucaaaagagcacacagaaugccauuaacggaaucacgaauaaagucaacucugugaucgaaaagaugaauacccaguuuacagccguuuccaaggaguucaacaaacuggagcggcgcauggaaaaucucaacaagaaaguggacgauggcuucauugacaucuggaccuacaacgcugagcugcuuguccugcucgaaaaugagagaacacuggacuuucacgauagcaacgugaagaaucuuuacgaaaaagucaagucucagcugaagaacaaugcgaaagagauugggaacggaugcuucgaguuuuaucauaaguguaaugacgaaugcauggaguccgugaaaaacggcaccuacgauuaucccaaguacagcgaagaguccaaacucaaucgggagaagaucgacgggguuaagcuggaaucuaugggcguguaucagauucuggccaucuacagcacggucgcuuccucucucgugcugcuuguuagccugggagccaucuccuucuggaugugcagcaacggcucucuccagugucgcauuugcaucuga

SEQ ID NO: 200990 - RNA, 1698 nt, Artificial Sequence
  derived and/or modified CDS sequence (opt5) from hemagglutinin__InfluenzaA__AFJ78628
augaaggugaaacugcucguccugcuuugcaccuucacagccacguacgcugacaccaucuguauuggcuaucacgccaacaauagcacagauaccguugacacagugcuggagaagaacgugaccgucacacauuccgugaaucuccuggaagauaaccacaaugggaaacuuugccugcucaagggaaucgcgccccugcagcugggcaacuguucuguugcuggguggauucucggaaauccugagugcgaacugcuuaucagcaaagaguccuggucuuacauuguggaaagaccgaaccccgagaauggcaccuguuauccugggcauuuugccgacuacgaggaacugcgggagcaacucagcuccgucucuagcuucgaacgcuuugagaucuuccccaaggaguccagcuggccuaaccacacggugaccggaguuucugccuccugcagccauaauggcgaaucuuccuuuuauaagaaccugcuuuggcugacaggcaaaaaugggcucuaccccaaccugagcaagucuuaugcuaauaacaaagagaaggaagugcugguccucuggggagugcaccacccuccgaacaucggcaaucagaugacccuguaccauaaagagaacgccuacguguccgucguuagcucccacuauucuagaaaguucacacccgaaauugcuaagcggccuaaagugcgcgaucaggaggggagaaucaauuacuauuggacccuucuggagcccggagacacgauuaucuuugaagccaacggcaaucucauugcgccucgguacgccuucgcucugagccgcggguuuggauccggcaucauuaacagcaaugcccccauggaugagugugacgcuaagugccagacaccgcaaggcgccaucaacucuucccuuccuuuccagaaugugcaucccgucaccaucggggaauguccuaaauaugugagaagcgcgaagcugcggaugguuacaggacuccgcaacauucccucuauccagagcagaggccuguuuggggccauugcuggauucaucgagggcggguggaccggaaugguggauggcugguacggcuaucaccaccagaaugaacaaggguccggauacgccgcugaccagaaaucuacccagaacgccauuaauggcaucacaaacaaggucaauagcgugaucgagaaaaugaacacgcaguuuaccgccguugggaaggaguucaacaagcuggaacggcgcauggagaaucucaacaaaaagguggaugacggauucauugaugucuggacauacaaugcugaacugcuugugcugcucgagaacgaaagaacccuggacuuucaugacuccaaugucaaaaaccuuuaugagaaggugaaaaaucaacugaagaacaaugcgaaggagaucggcaacgggugcuucgaauuuuaccacaaauguaaugaugagugcauggaaagcguuaagaacggcacauaugacuaccccaaauauucugaggaguccaagcucagccgggagaaaauugauggagugaagcuggaaucuaugggcgucuaccagauccuggccauuuauuccaccguggcuagcucccucguucugcuugugucucugggggccaucagcuucuggaugugcuccaauggaucucuccagugucgcaucugcauuuga

SEQ ID NO: 200991 - RNA, 1698 nt, Artificial Sequence
  derived and/or modified CDS sequence (opt5) from hemagglutinin__InfluenzaA__AFJ78639
augaaggugaaacugcucguccugcuuugcaccuucacagccacguacgcugacaccaucuguauuggcuaucacgccaacaauagcacagauaccguugacacagugcuggagaagaacgugaccgucacacauuccgugaaucuccuggaaaacucucacaaugggaaacuuugccugcucaagggaaucgcgccccugcagcugggcaacuguagcguugcuggguggauucucggaaauccugagugcgaacugcuuaucuccaaagagucuuggagcuacauuguggaaaagccgaaccccgagaauggcaccuguuauccugggcauuuugccgauuacgaggaacugagagagcaacucuccucugucagcuccuucgaacgguuugagaucuuccccaaggagagcucuuggccuaaccacacggugaccggaguuuccgccagcugcucucauaauggcgaauccagcuuuuaucgcaaccugcuuuggcugacaggcaaaaaugggcucuaccccaaccugucuaaguccuaugcuaauaacaaagagaaggaagugcugguccucuggggagugcaccacccuccgagcaucuccaaccagaaaacccuguaccauacagagaaugccuacgugucugucguuagcucccacuauagcagaaaguucacccccgaaauugcuaagcggccuaaagugcgcgaccaggagggcagaaucaacuacuauuggacgcuucuggagcccggggauacaauuaucuuugaagccaauggaaaccucauugcgccucgguacgccuucgcucugucucgcggcuuuggguccggaaucauuaauagcaacgcccccauggacaagugugaugcuaaaugccagaccccgcaaggcgccaucaauucuagccuuccuuuccagaacgugcaucccgucacaaucggcgaguguccuaaguaugugagauccgcgaaacugcggaugguuaccgggcuccgcaauauucccucuauccagagcagaggacuguuuggcgccauugcuggguucaucgaaggaggcuggaccgggaugguggacggaugguacggcuaucaccaccagaacgagcaaggcuccggguacgccgcugaucaaaagagcacacagaaugccauuaacggaaucacgaauaaagucaacucugugaucgaaaagaugaauacccaguuuacagccguuggcaaggaguucaacaaacuggagcggcgcauggaaaaccucaauaagaaaguggacgauggguucauugacaucuggaccuacaacgcugagcugcuuguccugcucgaaaaugagagaacacuggauuuucaugacuccaacgugaagaaucuuuaugaaaaagucaagagccagcugaagaacaaugcgaaagagauuggaaacggcugcuucgaguuuuaccacaaguguaaugacgaaugcauggagucugugaaaaacgggaccuaugauuaccccaaguauuccgaagagagcaaacucaaucgggagaagaucgacggcguuaagcuggaauccaugggaguguaccagauucuggccaucuauucuacggucgcuagcucccucgugcugcuuguuucucugggcgccaucagcuucuggaugugcuccaacgggagccuccagugucgcauuugcaucuga

SEQ ID NO: 200992 - RNA, 1698 nt, Artificial Sequence; identical to SEQ ID NO: 200991
  derived and/or modified CDS sequence (opt5) from hemagglutinin__InfluenzaA__AFJ78650

SEQ ID NO: 200993 - RNA, 1701 nt, Artificial Sequence; identical to SEQ ID NO: 194741
  derived and/or modified CDS sequence (opt5) from hemagglutinin__InfluenzaA__AFJ78661

SEQ ID NO: 200994 - RNA, 1701 nt, Artificial Sequence
  derived and/or modified CDS sequence (opt5) from hemagglutinin__InfluenzaA__AFJ78681
augaaggccauccuggugguccuccuguacaccuucgcuacaguuaacgccgacacgcuuugcauuggcuaucacgcgaauaacagcaccgauacaguggacaccgugcuggagaaaaaugucacagugacccauuccguuaaccuccuggaagauaagcacaaugggaaacuuuguaagcugagaggaguggcuccccuccaucugggcaaaugcaacaucgccggguggauucugggaaauccugagugugaaucucucagcacagccuccucuuggagcuacaucgucgagaccuccucuagcgacaacggcacgugcuauccgggggauuuuauugacuacgaagaacugcgggagcagcuuuccagcgugucuuccuucgaacgcuuugagaucuuccccaagaccagcucuuggccuaaucacgauuccaacaagggaguuacagcugccuguccccaugcuggcgccaagagcuuuuauaagaaucugaucuggcucgugaaaaagggcaacucuuacccuaaacuguccaagagcuauauuaaugacaaggggaaagaaguccuugugcuguggggaauccaccaccccuccaccucugcggaucaacagagccucuaccagaacgccgacgcuuacguguucgucggcacauccagauauagcaagaaauuuaagccugagauugccauccggccgaaaguucgcgaucaggaggggagaaugaauuacuauuggacccugguggaacccggagacaagauuacguucgaggcuacaggcaaccugguggucccucgguacgccuuugcgauggaacgcaacgccgggucuggaaucauuaucuccgauacccccgugcaugacugcaauacaaccugucaaaccccuaaaggcgcuaucaacacaagccuccccuuccagaauauucacccgaucacgauuggcaagugcccuaaguauguuaaaucuaccaagcugagacuugccacagggcugcggaacgugcccagcauccagucccgcggacucuuuggcgcuauugccggguucaucgagggaggcuggaccgggauggucgacggaugguacggcuaucaucaccagaaugaacaaggcucuggguacgccgcugaucugaaaagcacacagaacgcgaucgacgagauuaccaauaaggugaacuccguuaucgagaaaaugaauacgcaguuuacagccgugggaaaggaguucaaccaccuugagaagagaauugaaaaucugaacaaaaaggucgaugacggcuuccucgauaucuggaccuacaaugcugagcugcuggugcuccuggaaaacgagcggacccuugacuaucaugauagcaaugucaaaaaccuguacgagaaggugcgcucucagcucaaaaacaaugccaaggaaauugggaacggauguuuugaguucuaucacaagugcgacaauacauguauggaauccguuaaaaacggcaccuacgauuauccuaaguacagcgaggaagccaaacugaauagagaggagaucgacggggugaaacuugaaucuacacggaucuaucaaauucuggcuaucuacuccacggucgccagcucccucgugcugguugugucucugggcgcgauuagcuuuuggaugugcuccaacggaucucuccagugccgcaucuguauuuga

SEQ ID NO: 200995 - RNA, 1701 nt, Artificial Sequence; identical to SEQ ID NO: 194741
  derived and/or modified CDS sequence (opt5) from hemagglutinin__InfluenzaA__AFJ78691

SEQ ID NO: 200996 - RNA, 1701 nt, Artificial Sequence; identical to SEQ ID NO: 194741
  derived and/or modified CDS sequence (opt5) from hemagglutinin__InfluenzaA__AFJ78701

SEQ ID NO: 200997 - RNA, 1701 nt, Artificial Sequence; identical to SEQ ID NO: 199269
  derived and/or modified CDS sequence (opt5) from hemagglutinin__InfluenzaA__AFJ78711

SEQ ID NO: 200998 - RNA, 1701 nt, Artificial Sequence; identical to SEQ ID NO: 194741
  derived and/or modified CDS sequence (opt5) from hemagglutinin__InfluenzaA__AFJ78721

SEQ ID NO: 200999 - RNA, 1701 nt, Artificial Sequence
  derived and/or modified CDS sequence (opt5) from hemagglutinin__InfluenzaA__AFJ78731
augaaggccauccuggugguccuccuguacaccuucgcuacagccaacgcggacacgcuuugcauuggcuaucacgcuaauaacagcaccgauacaguugacaccgugcuggagaagaaugugacagucacccauuccgugaaccuccuggaagauaagcacaaugggaaacuuuguaagcugagaggaguugcuccccuccaucugggcaaaugcaacaucgccggguggauucugggaaauccugagugugaaucucucagcacagccuccucuuggagcuacaucguggagaccuccucuagcgacaacggcacgugcuauccgggggauuuuauugacuacgaagaacugcgggagcagcuuuccagcgucucuuccuucgaacgcuuugagaucuuccccaagaccagcucuuggccuaaucacgauuccaacaagggagugacagccgcuuguccccaugccggcgcgaaaucuuuuuauaagaaucugaucuggcucguuaaaaagggcaacagcuacccuaaacuguccaagagcuauauuaaugacaaggggaaagaagugcuuguccuguggggaauccaccaccccuccaccucugccgaucaacagagccucuaccagaacgcugacgccuacguguucgugggcacauccagauauagcaagaaauuuaagccugagauugcuauccggccgaaaguccgcgaucaggaggggagaaugaauuacuauuggacccugguugaacccggagacaagauuacguucgaggccacaggcaaccugguggugccucgguacgcguuugccauggaacgcaacgcugggucuggaaucauuaucuccgauacccccguccaugacugcaauacaaccugucaaaccccuaaaggcagcaucaacacaucucuccccuuccagaauauucacccgaucacgauuggcaagugcccuaaguaugugaaaagcaccaagcugagacuugccacagggcugcggaacguucccuccauccagucucgcggacucuuuggcgcuauugccggguucaucgagggaggcuggaccgggaugguggacggaugguacggcuaucaucaccagaaugaacaaggcagcggguacgccgcugaucugaaauccacacagaacgcgaucgacgagauuaccaauaaggucaacagcgugaucgagaaaaugaauacgcaguuuacagccguuggaaaggaguucaaccaccuugagaagagaauugaaaaucugaacaaaaagguggaugacggcuuccucgauaucuggaccuacaaugcugagcugcugguccuccuggaaaacgagcggacccuugacuaucaugauucuaaugugaaaaaccuguacgagaagguccgcucccagcucaaaaacaaugccaaggaaauugggaacggauguuuugaguucuaucacaagugcgacaauacauguauggaaagcgugaaaaacggcaccuacgauuauccuaaguacucugaggaagccaaacugaauagagaggagaucgacgggguuaaacuugaauccacacggaucuaucaaauucuggcuaucuacagcacgguggccuccucucucguccuggugguuagccugggcgcgauuuccuuuuggaugugcucuaacggaagccuccagugccgcaucuguauuuga

SEQ ID NO: 201000 - RNA, 1701 nt, Artificial Sequence; identical to SEQ ID NO: 195905
  derived and/or modified CDS sequence (opt5) from hemagglutinin__InfluenzaA__AFJ78741

SEQ ID NO: 201001 - RNA, 1701 nt, Artificial Sequence; identical to SEQ ID NO: 194741
  derived and/or modified CDS sequence (opt5) from hemagglutinin__InfluenzaA__AFJ78751

SEQ ID NO: 201002 - RNA, 1701 nt, Artificial Sequence; identical to SEQ ID NO: 194741
  derived and/or modified CDS sequence (opt5) from hemagglutinin__InfluenzaA__AFJ78761

SEQ ID NO: 201003 - RNA, 1701 nt, Artificial Sequence; identical to SEQ ID NO: 194741
  derived and/or modified CDS sequence (opt5) from hemagglutinin__InfluenzaA__AFJ78771

SEQ ID NO: 201004 - RNA, 1701 nt, Artificial Sequence; identical to SEQ ID NO: 194741
  derived and/or modified CDS sequence (opt5) from hemagglutinin__InfluenzaA__AFJ78781

SEQ ID NO: 201005 - RNA, 1701 nt, Artificial Sequence; identical to SEQ ID NO: 194741
  derived and/or modified CDS sequence (opt5) from hemagglutinin__InfluenzaA__AFJ78791

SEQ ID NO: 201006 - RNA, 1701 nt, Artificial Sequence; identical to SEQ ID NO: 194741
  derived and/or modified CDS sequence (opt5) from hemagglutinin__InfluenzaA__AFJ78801

SEQ ID NO: 201007 - RNA, 1701 nt, Artificial Sequence; identical to SEQ ID NO: 195602
  derived and/or modified CDS sequence (opt5) from hemagglutinin__InfluenzaA__AFJ78811

SEQ ID NO: 201008 - RNA, 1701 nt, Artificial Sequence; identical to SEQ ID NO: 194741
  derived and/or modified CDS sequence (opt5) from hemagglutinin__InfluenzaA__AFJ78821

SEQ ID NO: 201009 - RNA, 1701 nt, Artificial Sequence; identical to SEQ ID NO: 194741
  derived and/or modified CDS sequence (opt5) from hemagglutinin__InfluenzaA__AFJ78831

SEQ ID NO: 201010 - RNA, 1701 nt, Artificial Sequence; identical to SEQ ID NO: 195939
  derived and/or modified CDS sequence (opt5) from hemagglutinin__InfluenzaA__AFJ78841

SEQ ID NO: 201011 - RNA, 1701 nt, Artificial Sequence; identical to SEQ ID NO: 194741
  derived and/or modified CDS sequence (opt5) from hemagglutinin__InfluenzaA__AFJ78851

SEQ ID NO: 201012 - RNA, 1701 nt, Artificial Sequence
  derived and/or modified CDS sequence (opt5) from hemagglutinin__InfluenzaA__AFJ78861
augaaggccauccuggugguccuccuguacaccuucgcuacagccaacgcggacacgcuuugcauuggcuaucacgcuaauaacagcaccgauacaguugacaccgugcuggagaaaaaugugacagucacccauuccgugaaccuccuggaagauaagcacaaugggaaacuuuguagacugcggggaguugcgccccuccaucugggcaagugcaacaucgccggguggauucugggaaauccugagugugaaucucucagcacagcuuccucuuggagcuacaucguggagaccuccucuagcgacaacggcacgugcuauccgggggauuuuauugacuacgaagaacugcgcgagcagcuuuccagcgucucuuccuucgaaagauuugagaucuuccccaaaaccagcucuuggccuaaucacgauuccaacaagggagugacagccgcuuguccccaugccggcgccaagagcuuuuauaaaaaucugaucuggcucguuaagaaaggcaacucuuacccuaagcuguccaaaagcuauauuaaugacaaggggaaggaagugcuuguccuguggggaauccaccaccccuccaccucugccgaucaacagagccucuaccagaacgcugacgccuacguguucgugggcacaucccgguauagcaaaaaguuuaaaccugagauugcuauccgcccgaaggucagagaucaggaggggcggaugaauuacuauuggacccugguugaacccggagacaaaauuacguucgaggccacaggcaaccugguggugccucgcuacgcguuugccauggaaagaaacgcugggucuggaaucauuaucuccgauacccccguccaugacugcaauacaaccugucaaaccccuaagggcgccaucaacacaagccuccccuuccagaauauucacccgaucacgauuggcaaaugcccuaaguaugugaagucuaccaaacugcggcuugcuacagggcugcgcaacguucccagcauccaguccagaggacucuuuggcgccauugccggguucaucgagggaggcuggaccgggaugguggacggaugguacggcuaucaucaccagaaugaacaaggcucuggguacgcugcggaucuuaagagcacacagaacgccaucgacgagauuaccaauaaagucaacuccgugaucgagaagaugaauacgcaguuuacagcuguuggaaaagaguucaaccaccuggagaagcggauugaaaaucugaacaagaaaguggaugacggcuuccucgauaucuggaccuacaaugccgagcugcugguccuccuggaaaacgagcgcacccuugacuaucaugauagcaaugugaagaaccuguacgagaaagucagaucucagcucaagaacaaugccaaagaaauugggaacggauguuuugaguucuaucacaagugcgacaauacauguauggaauccgugaagaacggcaccuacgauuauccuaaauacagcgaggaagcuaagcugaaucgggaggagaucgacgggguuaaacuugaaucuacacgcaucuaucaaauucuggccaucuacuccacgguggcgagcucccucguccuggugguuucucugggcgcuauuagcuuuuggaugugcuccaacggaucucuccagugcagaaucuguauuuga

SEQ ID NO: 201013 - RNA, 1701 nt, Artificial Sequence
  derived and/or modified CDS sequence (opt5) from hemagglutinin__InfluenzaA__AFJ78881
augaaggccauccuggugguccuccuguacaccuucgcuacagccaacgcggacacgcuuugcauuggcuaucacgcuaauaacagcaccgauacaguugacaccgugcuggagaagaaugugacagucacccauuccgugaaccuccuggaagauaagcacaaugggaaacuuuguaagcugagaggaguugcuccccuccaucugggcaaaugcaacaucgccggguggauucugggaaauccugagugugaaucucucagcacauccucuagcugguccuacaucguggagaccucuagcuccgacaacggcacgugcuauccgggggauuuuauugacuacgaagaacugcgggagcagcuuagcucugucuccagcuucgaacgcuuugagaucuuccccaagaccucuuccuggccuaaucacgauagcaacaagggagugacagccgccuguccccaugcuggcgccaaaucuuuuuauaagaaucugaucuggcucguuaaaaagggcaacuccuacccuaaacugagcaaguccuauauuaaugacaaggggaaagaagugcuuguccuguggggaauccaccaccccucuaccagcgcggaucaacagucccucuaccagaacgccgacgcuuacguguucgugggcacaagcagauauucuaagaaauuuaagccugagauugccauccggccgaaaguccgcgaucaggaggggagaaugaauuacuauuggacccugguugaacccggagacaagauuacguucgaggcuacaggcaaccugguggugccucgguacgccuuugcgauggaacgcaacgccggguccggaaucauuaucagcgauacccccguccaugacugcaauacaaccugucaaaccccuaaaggcgcuaucaacacaucucuccccuuccagaauauucacccgaucacgauuggcaagugcccuaaguaugugaaaagcaccaagcugagacuugccacagggcugcggaacguucccuccauccagucucgcggacucuuuggcgcuauugccggguucaucgagggaggcuggaccgggaugguggacggaugguacggcuaucaucaccagaaugaacaaggcagcggguacgccgcugaucugaaauccacacagaacgcgaucgacgagauuaccaauaaggucaacagcgugaucgagaaaaugaauacgcaguuuacagccguuggaaaggaguucaaccaccuugagaagagaauugaaaaucugaacaaaaagguggaugacggcuuccucgauaucuggaccuacaaugcugagcugcugguccuccuggaaaacgagcggacccuugacuaucaugauucuaaugugaaaaaccuguacgagaagguccgcucccagcucaaaaacaaugccaaggaaauugggaacggauguuuugaguucuaucacaagugcgacaauacauguauggaaagcgugaaaaacggcaccuacgauuauccuaaguacucugaggaagccaaacugaauagagaggagaucaacgggguuaaacuugaauccacacggaucuaucaaauucuggcuaucuacagcacggccgcguccucucucgugcuggucgugagccugggcgcuauuuccuuuuggaugugcucuaauggaagccuccagugccgcaucuguauuuga

SEQ ID NO: 201014 - RNA, 1701 nt, Artificial Sequence; identical to SEQ ID NO: 194741
  derived and/or modified CDS sequence (opt5) from hemagglutinin__InfluenzaA__AFJ78891

SEQ ID NO: 201015 - RNA, 1701 nt, Artificial Sequence; identical to SEQ ID NO: 194741
  derived and/or modified CDS sequence (opt5) from hemagglutinin__InfluenzaA__AFJ78901

SEQ ID NO: 201016 - RNA, 1701 nt, Artificial Sequence; identical to SEQ ID NO: 194741
  derived and/or modified CDS sequence (opt5) from hemagglutinin__InfluenzaA__AFJ78911

SEQ ID NO: 201017 - RNA, 1701 nt, Artificial Sequence; identical to SEQ ID NO: 194741
  derived and/or modified CDS sequence (opt5) from hemagglutinin__InfluenzaA__AFJ78921

SEQ ID NO: 201018 - RNA, 1701 nt, Artificial Sequence
  derived and/or modified CDS sequence (opt5) from hemagglutinin__InfluenzaA__AFJ97567
augaaggccauccuggugguccuccuguacaccuucgcuacagccaacgcggacacgcuuugcauuggcuaucacgcuaauaacagcaccgauacaguugacaccgugcuggagaaaaaugugacagucacccauuccguggaucuccuggaagacaagcacaacgggaaacuuuguaagcugagaggaguugcuccccuccaucugggcaaaugcaauaucgccggguggauucugggaaacccugagugugaaucucucagcacagccuccucuuggagcuacaucguggagaccuccucuagcgauaauggcacgugcuauccgggggacuuuauugauuacgaagaacugcgggagcagcuuuccagcgucucuuccuucgaacgcuuugagaucuuccccaagaccagcucuuggccuaaccacgacuccaauaagggagugacagccgcuuguccccaugccggcgcgaaaucuuuuuauaagaaccugaucuggcucguuaaaaagggcaauagcuacccuaaacugaacaaguccuauauuaaugauaaggggaaagaagugcuuguccuguggggaauccaccaccccagcaccuccacagaccaacagucucucuaccagaacgccgaugcuuacguguucgugggcaccagcagauauuccaagaaauuuaagccugagauugccauccggccgaaaguccgcgaccaggaggggagaaugaauuacuauuggacgcugguugaacccggagauaagauuacauucgaggcuaccggcaaccugguggugccucgguacgccuuuacaauggaacgcaacgcggggagcggaaucauuaucucugacacccccguccaugacugcaauaccacaugucaaacgccuaaaggcgccaucaacaccuccuuccccuuucagaauauucacccgaucacaauuggcaagugcccuaaguaugugaaaagcaccaagcucagacuggcuacagggcuucggaacguucccucuauccagagccgcggacuguucggcgccauugcuggguuuaucgagggaggcuggaccgggaugguggauggaugguacggcuaucaucaccagaaugaacaaggcuccggguacgccgccgaccucaaaucuacgcagaacgcuaucgaugagauuacaaauaaggucaacagcgugaucgagaaaaugaauacccaguucaccgcgguuggaaaggaguucaaccaccuggagaagagaauugaaaaucuuaacaaaaagguggacgauggcuuucuggacaucuggacauacaaugccgagcuccugguccugcucgaaaacgagcggacccuggauuaucaugacuccaaugugaaaaaccuuuacgagaagguccgcagccagcugaaaaacaaugcuaaggaaauugggaacggauguuucgaguuuuaucacaagugcgauaauacauguauggaaucugugaaaaacggcacguacgacuauccuaaguacuccgaggaagccaaacucaauagagaggagaucgaugggguuaagcuggaaagcacccggaucuaucaaauucuugccaucuacucuacaguggcuuccagccugguccucgugguuucccugggcgccauuucuuucuggaugugcagcaacggaucccugcagugccgcaucuguauuuga

SEQ ID NO: 201019 - RNA, 1701 nt, Artificial Sequence; identical to SEQ ID NO: 194741
  derived and/or modified CDS sequence (opt5) from hemagglutinin__InfluenzaA__AFK14115

SEQ ID NO: 201020 - RNA, 1701 nt, Artificial Sequence; identical to SEQ ID NO: 194741
  derived and/or modified CDS sequence (opt5) from hemagglutinin__InfluenzaA__AFK14131

SEQ ID NO: 201021 - RNA, 1701 nt, Artificial Sequence; identical to SEQ ID NO: 196423
  derived and/or modified CDS sequence (opt5) from hemagglutinin__InfluenzaA__AFK14139

SEQ ID NO: 201022 - RNA, 1701 nt, Artificial Sequence
  derived and/or modified CDS sequence (opt5) from hemagglutinin__InfluenzaA__AFK14148
augaaggccauccuggugguccuccuguacaccuucgcuacagccaacgcggacacgcuuugcauuggcuaucacgcuaauaacagcaccgauacaguugacaccgugcuggagaaaaaugugacagucacccauuccgugaaccuccuggaagauaagcacaaugggaaacuuuguaagcugagaggaguugcuccccuccaucugggcaaaugcaacaucgccggguggauucugggaaauccugagugugaaucucucagcacagccuccucuuggagcuacaucguggagaccuccucuagcgacaacggcacgugcuauccgggggauuuuauugacuacgaagaacugcgggagcagcuuuccagcgucucuuccuucgaacgcuuugagaucuuccccaagaccagcucuuggccuaaucacgauuccaacaagggagugacagccgcuuguccccaugccggcgcgaaaucuuuuuauaagaaucugaucuggcucguuaaaaagggcaacagcuacccuaaacuguccaagagcuauauuaaugacaaggggaaagaagugcuuguccuguggggaauccaccaccccuccaccucugccgaucaacagagccucuaccagaacgcugacgccuacguguucgugggcacauccagauauagcaagaaauuuaagccugagauugcuauccggccgaaaguccgcgaucaggaggggagaaugaauuacuauuggacccugguugaacccggagacaagauuacguucgaggccacaggcaaccugguggugccucgguacgcguuugccauggaacgcaacgcugggucuggaaucauuaucuccgauacccccguccaugacugcaauacaaccugucaaaccccuaaaggcgccaucaacacaagccuccccuuccagaauauucacccgaucacgauuggcaagugcccuaaguaugugaaaucuaccaagcugagacuugcuacagggcugcggaacguucccagcauccagucccgcggacucuuuggcgccauugccggguucaucgagggaggcuggaccgggaugguggacggaugguacggcuaucaucaccagaaugaacaaggcucuggguacgcugcggaucugaaaagcacacagaacgccaucgacaagauuaccaauaaagucaacuccgugaucgagaagaugaauacgcaguuuacagcuguuggaaaggaguucaaccaccuugagaaaagaauugagaaucugaacaagaaaguggaugacggcuuccucgauaucuggaccuacaaugccgaacugcugguccuccuggagaacgaacggacccuugacuaucaugauagcaaugugaagaaccuguacgagaaaguccgcaaccagcucaagaauaacgccaaggagauugggaauggauguuuugaguucuaucacaaaugcgacaacacauguauggaaucugugaagaauggcaccuacgauuauccuaaauacuccgaagaggcuaagcugaacagagaagagaucgacgggguuaaacuugagagcacacggaucuaucaaauucuggccaucuacucuacgguggcguccagccucguccuggugguuucccugggcgcuauuucuuuuuggaugugcagcaauggaucccuccagugccgcaucuguauuuga

SEQ ID NO: 201023 - RNA, 1701 nt, Artificial Sequence; identical to SEQ ID NO: 196368
  derived and/or modified CDS sequence (opt5) from hemagglutinin__InfluenzaA__AFK14157

SEQ ID NO: 201024 - RNA, 1701 nt, Artificial Sequence; identical to SEQ ID NO: 194741
  derived and/or modified CDS sequence (opt5) from hemagglutinin__InfluenzaA__AFK14166

SEQ ID NO: 201025 - RNA, 1701 nt, Artificial Sequence; identical to SEQ ID NO: 196069
  derived and/or modified CDS sequence (opt5) from hemagglutinin__InfluenzaA__AFK14175

SEQ ID NO: 201026 - RNA, 1701 nt, Artificial Sequence; identical to SEQ ID NO: 197646
  derived and/or modified CDS sequence (opt5) from hemagglutinin__InfluenzaA__AFK14184

SEQ ID NO: 201027 - RNA, 1701 nt, Artificial Sequence; identical to SEQ ID NO: 195094
  derived and/or modified CDS sequence (opt5) from hemagglutinin__InfluenzaA__AFK14193

SEQ ID NO: 201028 - RNA, 1701 nt, Artificial Sequence; identical to SEQ ID NO: 196338
  derived and/or modified CDS sequence (opt5) from hemagglutinin__InfluenzaA__AFK14202

SEQ ID NO: 201029 - RNA, 1701 nt, Artificial Sequence; identical to SEQ ID NO: 195094
  derived and/or modified CDS sequence (opt5) from hemagglutinin__InfluenzaA__AFK14211

SEQ ID NO: 201030 - RNA, 1701 nt, Artificial Sequence
  derived and/or modified CDS sequence (opt5) from hemagglutinin__InfluenzaA__AFK14220
augaaggccauccuggugguccuccuguacaccuucgcuacagccaacgcggacacgcuuugcauuggcuaucacgcuaauaacagcaccgauacaguugacaccgugcuggagaaaaaugugacagucacccauuccgugaaccuccuggaagauaagcacaaugggaaacuuuguaagcugagaggaguugcuccccuccaucugggcaaaugcaacaucgccggguggauucugggaaauccugagugugaaucucucagcacagccuccucuuggagcuacaucguggagaccuccucuagcgacaacggcacgugcuauccgggggauuuuauugacuacgaagaacugcgggagcagcuuuccagcgccucuuccuucgaacgcuaugagaucuuucccaagaccagcucuuggccuaaucacgauuccaacaagggagucacagcugccuguccccaugcgggcgccaagagcuucuacaaaaaucugaucuggcucgugaaaaagggcaacucuuauccuaaacuguccaagagcuacauuaaugacaaggggaaagaaguucuugugcuguggggaauccaccaccccuccaccucugcugaucaacagagccucuaccagaacgccgacgcuuaugucuuugugggcacauccagauacagcaagaaauucaagccugagauugccauccggccgaaagugcgcgaucaggaggggagaaugaauuauuacuggacccuggucgaacccggagacaagauuacguuugaggcgacaggcaaccugguugugccucgguaugccuucgcuauggaacgcaacgccgggucuggaaucauuaucuccgauacccccgugcaugacugcaauacaaccugucaaaccccuaaaggcgcuaucaacacaagccuccccuuucagaauauucacccgaucacgauuggcaagugcccuaaguacgucaaaucuaccaagcugagacuugccacagggcugcggaacgugcccagcauccagucccgcggacucuucggcgccauugcuggguuuaucgagggaggcuggaccgggaugguugacggaugguauggcuaccaucaccagaaugaacaaggcucuggguacgcggccgaucugaaaagcacacagaacgcuaucgacaagauuaccaauaaagugaacuccgucaucgagaagaugaauacgcaguucacagccgugggaaaggaguuuaaccaccuugagaaaagaauugagaaucugaacaagaaaguugaugacggcuuccucgauaucuggaccuauaaugccgaacugcuggugcuccuggagaacgaacggacccuugacuaccaugauagcaaugucaagaaccuguaugagaaagugcgcaaccagcucaagaauaacgcuaaggagauugggaauggauguuucgaauuuuaccacaaaugcgacaacacauguauggagucugucaagaauggcaccuaugauuacccuaaauauuccgaagaggccaagcugaacagagaagagaucgacggggugaaacuugagagcacacggaucuaccaaauucuggcgaucuacucuacgguugcuuccagccucgugcuggucgugucccugggcgccauuucuuucuggaugugcagcaauggaucccuccagugccgcaucuguauuuga

SEQ ID NO: 201031 - RNA, 1701 nt, Artificial Sequence; identical to SEQ ID NO: 196368
  derived and/or modified CDS sequence (opt5) from hemagglutinin__InfluenzaA__AFK14229

SEQ ID NO: 201032 - RNA, 1701 nt, Artificial Sequence; identical to SEQ ID NO: 199506
  derived and/or modified CDS sequence (opt5) from hemagglutinin__InfluenzaA__AFK14238

SEQ ID NO: 201033 - RNA, 1701 nt, Artificial Sequence
  derived and/or modified CDS sequence (opt5) from hemagglutinin__InfluenzaA__AFK14247
augaaggccauccuggugguccuccuguacaccuucgcuacagccaacgcggacacgcuuugcauuggcuaucacgcuaauaacagcaccgauacaguugacaccgugcuggagaaaaaugugacagucacccauuccgugaaccuccuggaagauaagcacaaugggaaacuuuguaagcugagaggaguugcuccccuccaucugggcaaaugcaacaucgccggguggauucugggaaauccugagugugaaucucucagcacagccuccucuuggagcuacaucguggagaccuccucuagcgacaacggcacgugcuauccgggggauuuuauugacuacgaagaacugcgggagcagcuuuccagcgucucuuccuucgaacgcuuugagaucuuccccaagaccagcucuuggccuaaucacgauuccaacaagggagugacagccgcuuguccccaugccggcgcgaaaucuuuuuauaagaaucugaucuggcucguuaaaaagggcaacagcuacccuaaacuguccaagagcuauauuaaugacaaggggaaagaagugcuuguccuguggggaauccaccaccccuccaccucugccgaucaacagagccucuaccagaacgcugacgccuacguguucgugggcacauccagauauagcaagaaauuuaagccugagauugcuauccggccgaaaguccgcgaucaggaggggagaaugaauuacuauuggacccugguugaacccggagacaagauuacguucgaggccacaggcaaccugguggugccucgguacgcguuugccauggaacgcaacgcugggucuggaaucauuaucuccgauacccccguccaugacugcaauacaaccugucaaaccccuaaaggcgccaugaacacaagccuccccuuccagaauauccacccgauuacgaucggcaagugcccuaaguaugugaaaucuaccaagcugagaauggcuacagggcuucggaacguucccagcauucagucccgcggacuguuuggcgccaucgccggguucauugagggaggcuggaccgggaugguggacggaugguacggcuaucaucaccagaaugaacaaggcucuggguacgcugcggaucucaaaagcacacagaacgccaucgacgagaucaccaauaaggucaacuccgugauugagaaaaugaauacgcaguuuacagcuguuggaaaggaguucaaccaccuggagaagagaaucgaaaaucuuaacaaaaagguggaugacggcuuccuggauauuuggaccuacaaugccgagcuccugguccugcucgaaaacgagcggacccuggacuaucaugauagcaaugugaaaaaccuuuacgagaagguccgcucucagcugaaaaacaaugccaaggaaaucgggaacggauguuuugaguucuaucacaagugcgacaauacauguauggaauccgugaaaaacggcaccuacgauuauccuaaguacagcgaggaagcuaaacucaauagagaggagauugacgggguuaagcuggaaucuacacggaucuaucaaauccuugccauuuacuccacgguggcgagcucccugguccucgugguuucucugggcgcuaucagcuuuuggaugugcuccaacggaucucugcagugccgcauuuguaucuga

SEQ ID NO: 201034 - RNA, 1701 nt, Artificial Sequence
  derived and/or modified CDS sequence (opt5) from hemagglutinin__InfluenzaA__AFK14272
augaaggccauccugauugugcuccuguacaccuucgcuacagccaacgcggacacgcuuugcaucggcuaucacgcuaauaacagcaccgauacagucgacaccguucuggagaagaaugugacagugacccauuccgucaaccuccuggaagauaagcacaaugggaaacuuuguaagcugacaggaguggcuccccuccaucugggcaaaugcgacauugccggguggauccugggaaacccugagugugaaucucucagcaccgccuccucuuggagcuacauuguugagacguccucuagcgauaauggaaccugcuauccgggggacuuuaucgauuacgaagaacugagagagcagcuuuccagcgugucuuccuucgaacgguuugagaucuuccccaagacaagcucuuggccuaaccacgacuccaauaagggagucaccgccgcuuguccccaugccggcgcgaaaucuuuuuauaagaaccugauuuggcucgugaaaaagggcaauagcuacccuaaacuguccaagagcuauaucaacgauaaggggaaagaaguucuugugcuguggggcauucaccaccccuccacaucugccgaccaacagagccucuaccagaaugcugaugccuacgucuucgugggcaccucccgcuauagcaagaaauuuaagccugagaucgcuauuagaccgaaagugcgggaccaggaggggcgcaugaacuacuauuggacgcuggucgaacccggagauaagaucacauucgaggccaccggcaaucugguugugccuagauacgcguuugccauggaacggaacgcugggucuggaauuaucaucuccgacacacccgugcaugacugcaacaccaccugucaaacaccuaaaggcgccauuaauacgagccuccccuuccagaacauccacccgauuaccaucggcaagugcccuaaguaugucaaaucuacaaagcugcgccuugcuaccgggcugagaaaugugcccagcauucagucccggggacucuuuggcgccaucgccggguucaucgagggaggcuggacagggaugguugauggaugguacggcuaucaucaccagaacgaacaaggcucuggguacgcugcggaccugaaaagcacccagcacgccauugaugagaucacgaauaaggugaacuccgucauugagaaaaugaauacacaguuuaccgcugugggaaaggaguucaaccaucuugagaagcgcaucgaaaaucugaacaaaaagguugacgauggcuuccucgacauuuggaccuacaaugccgagcugcuggugcuccuggaaaacgagagaacacuugauuaucacgacagcaaugucaaaaaccuguacgagaaggugcggucucagcucaaaaauaacgccaaggaaaucgggaacggauguuuugaguucuaucauaagugcgauaauaccuguauggaauccgucaaaaacggcacauacgacuauccuaaguacagcgaggaagcuaaacugaaucgcgaggagaucgauggggugaaacuugaaucuacgagaauuuaucaaauccuggccauuuacuccaccguugcgagcucccucgugcuggucgugucucugggcgcuaucagcuuuuggaugugcuccaacggaucucuccagugccggauuuguaucuga

SEQ ID NO: 201035 - RNA, 1701 nt, Artificial Sequence; identical to SEQ ID NO: 195094
  derived and/or modified CDS sequence (opt5) from hemagglutinin__InfluenzaA__AFK14314

SEQ ID NO: 201036 - RNA, 1701 nt, Artificial Sequence
  derived and/or modified CDS sequence (opt5) from hemagglutinin__InfluenzaA__AFK14323
augaaggccauccuggugguccuccuguacaccuucgcuacagccaacgcggacacgcuuugcauuggcuaucacgcuaauaacagcaccgauacaguugacaccgugcuggagaaaaaugugacagucacccauuccgugaaccuccuggaagauaagcacaaugggaaacuuuguaagcugagaggaguugcuccccuccaucugggcaaaugcaacaucgccggguggauucugggaaauccugagugugaaucucucagcacagccuccucuuggagcuacaucguggagaccuccaacucugacaauggcacgugcuauccgggggauuuuauuaacuacgaagaacugcgggagcagcuuagcuccgucagcucuuucgaacgcuuugagaucuuccccaagaccuccagcuggccuaaucacgacucuaacaagggagugacagccgcuuguccccaugccggcgcgaaauccuuuuauaagaaucugaucuggcucguuaaaaagggcaacagcuacccuaaacugucuaaguccuauauuaaugauaaggggaaagaagugcuuguccuguggggaauccaccaccccagcaccuccgccgaccaacagucucucuaccagaacgcugaugccuacguguucgugggcacaagcagauauuccaagaaauuuaagccugagauugcuauccggccgaaaguccgcgaccaggaggggagaaugaacuacuauuggacccugguugaacccggagauaagauuacguucgaggccacaggcaaucugguggugccucgguacgcguuugccauggaacgcaacgcugggagcggaaucauuaucucugacacccccguccaugauugcaauacaaccugucaaaccccuaaaggcgccaucaacacaucccuccccuuccagaauauucacccgaucacgauuggcaagugcccuaaguaugugaaaagcaccaagcugagacuugcuacagggcugcggaacguucccucuauccagagccgcggacucuuuggcgccauugccggguucaucgagggaggcuggaccgggaugguggacggaugguacggcuaucaucaccagaaugaacaaggcuccggguacgcugcggaccugaaaucuacacagaacgccaucgauaagauuaccaauaaagucaacagcgugaucgagaagaugaauacgcaguuuacagcuguuggaaaggaguucaaccaccuugagaaaagaauugagaaucugaacaagaaaguggacgauggcuuccucgacaucuggaccuacaaugccgaacugcugguccuccuggagaacgaacggacccuugauuaucaugacuccaacgugaagaaucuguacgagaaaguccgcagccagcucaagaacaaugccaaggagauugggaacggauguuuugaguucuaucacaaaugcgauaauacauguauggaaucugugaagaacggcaccuacgacuauccuaaauacuccgaagaggcuaagcugaauagagaagagaucgaugggguuaaacuugagagcacacggaucuaucaaauucuggccaucuacucuacgguggcguccagccucguccuggugguuucccugggcgcuauuucuuuuuggaugugcagcaacggaucccuccagugccgcaucuguauuuga

SEQ ID NO: 201037 - RNA, 1701 nt, Artificial Sequence; identical to SEQ ID NO: 199506
  derived and/or modified CDS sequence (opt5) from hemagglutinin__InfluenzaA__AFK14332

SEQ ID NO: 201038 - RNA, 1701 nt, Artificial Sequence
  derived and/or modified CDS sequence (opt5) from hemagglutinin__InfluenzaA__AFK14341
augaaggccauccuggugguccuccuguacaccuucgcuacagccaacgcggacacgcuuugcauuggcuaucacgcuaauaacagcaccgauacaguugacaccgugcuggagaaaaaugugacagucacccauuccgugaaccuccuggaagauaagcacaaugggaaacuuuguaagcugagaggaguugcuccccuccaucugggcaaaugcaacaucgccggguggauucugggaaauccugagugugaaucucucagcacagccuccucuuggagcuacaucguggagaccuccucuagcgacaacggcacgugcuauccgggggauuuuauugacuacgaagaacugcgggagcagcuuuccagcgucucuuccuucgaacgcuuugagaucuuccccaagaccagcucuuggccuaaucacgauuccaacaagggagugacagccgcuuguccccaugccggcgcgaaaucuuuuuauaagaaucugaucuggcucguuaaaaagggcaacagcuacccuaaacuguccaagagcuauauuaaugacaaggggaaagaagugcuuguccuguggggaauccaccaccccuccaccucugccgaucaacagagccucuaccagaacgcugacgccuacguguucgugggcacauccagauauagcaagaaauuuaagccugagauugcuauccggccgaaaguccgcgagcaggaagggagaaugaauuacuauuggacccugguugagcccggagauaagauuacguucgaagccacaggcaaccugguggugccucgguacgcguuugccauggagcgcaacgcugggucuggaaucauuaucuccgacacccccguccaugauugcaauacaaccugucaaaccccuaaaggcgccaucaacacaagccuccccuuccagaauauucacccgaucacgauuggcaagugcccuaaguaugugaaaucuaccaagcugagacuugcuacagggcugcggaacguucccagcauccagucccgcggacucuuuggcgccauugccggguucaucgaaggaggcuggaccgggaugguggacggaugguacggcuaucaucaccagaaugagcaaggcucuggguacgcugcggaccugaaaagcacacagaacgccaucgaugagauuaccaauaaggucaacuccgugaucgagaaaaugaauacgcaguuuacagcuguuggaaaggaguucaaccaccuugaaaagagaauugagaaucugaacaaaaagguggacgauggcuuccucgacaucuggaccuacaaugccgaacugcugguccuccuggagaacgagaaaacccuugauuaucaugacagcaaugugaagaaccuguacgaaaaaguccggucucagcucaagaacaaugccaaggagauugggaacggauguuuugaguucuaucacaaaugcgauaauacauguauggaauccgugaagaacggcaccuacgacuauccuaaauacagcgaagaggcuaagcugaaucgcgaggaaaucgaugggguuaaacuugagucuacaagaaucuaucaaauucuggccaucuacuccacgguggcgagcucccucguccuggugguuucucugggcgcuauuagcuuuuggaugugcuccaacggaucucuccagugccggaucuguauuuga

SEQ ID NO: 201039 - RNA, 1701 nt, Artificial Sequence; identical to SEQ ID NO: 196161
  derived and/or modified CDS sequence (opt5) from hemagglutinin__InfluenzaA__AFK14350

SEQ ID NO: 201040 - RNA, 1701 nt, Artificial Sequence
  derived and/or modified CDS sequence (opt5) from hemagglutinin__InfluenzaA__AFK14358
augaaggccauccuggugguccuccuguacaccuucgcuacagccaacgcggacacgcuuugcauuggcuaucacgcuaauaacagcaccgauacaguugacaccgugcuggagaaaaaugugacagucacccauuccgugaaccuccuggaagauaagcacaaugggaaacuuuguaagcugagaggaguugcuccccuccaucugggcaaaugcaacaucgccggguggauucugggaaauccugagugugaaucucucagcacagccuccucuuggagcuacaucguggagaccuccucuagcgacaacggcgccugcuauccgggggauuuuauugacuacgaagaacugcgggagcagcuuuccagcgucucuuccuucgaacgcuuugagaucuuccccaagacgagcucuuggccuaaucacgauuccaacaagggagugaccgcugccuguccccaugcgggcgccaagagcuuuuauaaaaaucugaucuggcucguuaaaaagggcaacucuuacccuaaacuguccaagagcuauauuaaugacaaggggaaagaagugcuuguccuguggggaauccaccaccccuccacaucugcugaucaacagagccucuaccagaacgccgacgcuuacguguucgugggcaccuccagauauagcaagaaauuuaagccugagauugccauccggccgaaaguccgcgagcaggaagggagaaugaauuacuauuggacacugguugagcccggagauaagauuaccuucgaagcgacgggcaaccugguggugccucgguacgccuuugcuauggagcgcaacgccgggucuggaaucauuaucuccgacacacccguccaugauugcaauaccacaugucaaaccccuaaaggcgcuaucaacaccagccuccccuuccagaauauucacccgaucacaauuggcaagugcccuaaguaugugaaaucuacgaagcugagacuugccaccgggcugcggaacguucccagcauccagucccgcggacucuuuggcgccauugcuggguucaucgaaggaggcuggacagggaugguggacggaugguacggcuaucaucaccagaaugagcaaggcucuggguacgcggccgaccugaaaagcacccagaacgcuaucgaugagauuacaaauaaggucaacuccgugaucgagaaaaugaauacccaguuuacggccguuggaaaggaguucaaccaccuugaaaagagaauugagaaucugaacaaaaagguggacgauggcuuccucgacaucuggacauacaaugccgaacugcugguccuccuggagaacgagaaaacccuugauuaucaugacagcaaugugaagaaccuguacgaaaaaguccggucucagcucaagaacaaugcuaaggagauugggaacggauguuuugaguucuaucacaaaugcgauaauaccuguauggaauccgugaagaacggcacauacgacuauccuaaauacagcgaagaggccaagcugaaucgcgaggaaaucgaugggguuaaacuugagucuaccagaaucuaucaaauucuggcgaucuacuccacaguggcuagcucccucguccuggugguuucucugggcgccauuagcuuuuggaugugcuccaacggaucucuccagugccggaucuguauuuga

SEQ ID NO: 201041 - RNA, 1701 nt, Artificial Sequence
  derived and/or modified CDS sequence (opt5) from hemagglutinin__InfluenzaA__AFK14395
augaaggccauccuggugguccuccuguacaccuucgcuacagccaacgcggacacgcuuugcauuggcuaucacgcuaauaacagcaccgauacaguugacaccgugcuggagaaaaaugugacagucacccauuccgugaacauccucgaagauaagcacaaugggaaacuguguaaacuuagaggaguugcuccccugcaucucggcaaaugcaacauugccggguggauccugggaaauccugagugugaaucucugagcacagccuccucuuggagcuacauuguggagaccuccucuagcgaaaacggcaugugcuguccgcgggacuuuaucgauuaugaggagcuccgcgaacagcuguccagcgucucuuccuucgagagauuugaaaucuuccccaagacgagcucuuggccuaaucacgacuccaacaagggggugaccgccgcuugcccccaugccggagcgaaaucuuuuuacaagaaucuuauuuggcugguuaaaaagggcaacagcuauccuaaacucuccaagagcuacaucaaugauaagggcaaagaggugcugguccuuugggggauucaccaccccuccacaucugccgaccaacagagccuguaucagaacgcugaugccuacguguucgugggauccagccgguacucuaagaaauuuaagccugagaucgcuauucgcccgaaagucagagaccaggaaggccggaugaauuauuacuggacccucguugagcccggggauaagaucacauucgaagccaccggaaaccugguggugccucgcuaugcguuugccauggagagaaacgcuggcuccgggauuaucaucagcgacacgcccguccaugauuguaauacaaccugccaaacaccuaaaggagccauuaacaccucucugcccuuccagaauauccacccgauuaccaucggcaaguguccuaaguacgugaaaagcacaaagcuccggcuggcuacgggccuucgcaacguucccuccauucagucuagagggcuguuuggagccaucgccggcuucaucgaagggggauggaccggcaugguggacgggugguauggauaccaucaccagaaugagcaaggcagcggcuaugcugcggaccucaaauccacacagaacgccauugaugagaucaccaauaaggucaacagcgugauugaaaagaugaauacacaguuuaccgcuguugggaaggaguucaaccaccuggaaaagcggaucgagaaucuuaacaaaaagguggacgauggauuccuggacauuuggacguacaaugccgaacuccugguccugcucgagaacgagcgcacacuggauuaccaugacucuaaugugaaaaaccuuuaugaaaaggucagaucccagcugaaaaacaaugccaaggaggugggcaacgggugcuuugaguucuaccacaagugugauaauaccugcauggaaagcguuaaaaacggaaccuaugacuacccuaaguauucugaagaggcuaaacucaaucgggaggaaaucgauggcgugaagcuggaguccacacgcaucuaccaaauucuugccaucuauagcaccgcggcuuccucucugguccucgugguuagccugggggccauuuccuuuuggaugugcucuaacggcagccugcaguguagaaucugcauuuga

SEQ ID NO: 201042 - RNA, 1701 nt, Artificial Sequence
  derived and/or modified CDS sequence (opt5) from hemagglutinin__InfluenzaA__AFK14431
augaaggccauccuggugguccuccuguacaccuucgcuacagccaacgcggacacgcuuugcauuggcuaucacgcuaauaacagcaccgauacaguugacaccgugcuggagaaaaaugugacagucacccauuccgugaaccuccuggaagauaagcacaaugggaaacuuuguaagcugagaggaguugcuccccuccaucugggcaaaugcaacaucgccggguggauucugggaaauccugagugugaaucucucagcacagccuccucuuggagcuacaucguggagaccuccaacucugacaauggcacgugcuauccgggggauuuucuggacuacgaggaacuucggaagcagcugagcuccgucagcucuuucgagcgcguggaaauuuuucccaagaccuccagcuggccuaaccacgauucuaauaaaggaguuacagccgcuuguccccaugccggcgcgaaguccuucuauaaaaaccucaucuggcuggugaagaaaggcaauagcuacccuaaacuuucuaaguccuauaucaacgacaaggggaaggagguccuggugcucuggggcauucaccaccccagcaccuccgccgaucaacagucucuguaccagaaugcugacgccuacguguuugucggaacaagcagauauuccaaaaaguucaaaccugaaaucgcuauucggccgaagguucgcgaucaggaggggagaaugaacuacuauuggacccugguggagcccggagacaaaaucacguuugaagccacaggcaaccucguggucccucgguacgcguucgccauggagcgcaaugcugggagcggaauuaucauuucugauacccccgugcaugacugcaacacaaccugucaaaccccuaagggcgccaucaauacaucccugcccuuucagaacauccacccgauuacgaucggcaagugcccuaaauauguuaagagcaccaaacuuagacuggcuacagggcuccggaaugugcccucuauucagagccgcggacuguucggcgccaucgccggguuuauugaaggaggcuggaccgggauggucgacggaugguacggcuaucaucaccagaacgagcaaggcuccggguacgcugcggaucuuaagucuacacagaaugccaucgacaaaaucaccaacaaggugaauagcguuauugaaaagaugaacacgcaguucacagcugugggaaaagaguuuaaucaccuggagaagagaaucgaaaaccucaauaaaaaggucgaugacggcuuccuggauauuuggaccuacaacgccgagcugcucgugcugcuugaaaaugagcggacccuggacuaucaugauuccaacgucaaaaaccucuacgaaaaggugcgcagccagcugaagaauaacgccaaagagaucgggaauggauguuucgaguuuuaucacaagugcgacaacacauguauggaaucuguuaaaaauggcaccuacgauuauccuaaguacuccgaggaagcuaaacuuaacagagaggaaauugacggggugaagcuggagagcacacggaucuaucaaauccucgccauuuacucuacggucgcguccagccuggugcugguugugucccucggcgcuaucucuuucuggaugugcagcaauggaucccugcagugccgcauuuguaucuga

SEQ ID NO: 201043 - RNA, 1701 nt, Artificial Sequence; identical to SEQ ID NO: 194741
  derived and/or modified CDS sequence (opt5) from hemagglutinin__InfluenzaA__AFK14456

SEQ ID NO: 201044 - RNA, 1701 nt, Artificial Sequence; identical to SEQ ID NO: 194741
  derived and/or modified CDS sequence (opt5) from hemagglutinin__InfluenzaA__AFK14465

SEQ ID NO: 201045 - RNA, 1701 nt, Artificial Sequence
  derived and/or modified CDS sequence (opt5) from hemagglutinin__InfluenzaA__AFK14536
augaaggccauccuggugguccuccuguacaccuucgcuacagccaacgcggacacgcuuugcauuggcuaucacgcuaauaacagcaccgauacaguugacaccgugcuggagaagaaugugacagucacccauuccgugaaccuccuggaagauaagcacaaugggaaacuuuguaagcugagaggaguugcuccccuccaucugggcaaaugcaacaucgccggguggauucugggaaauccugagugugaaucucucagcacagccuccucuuggagcuacaucguggagaccuauuccucugacaacggcacgugcuacccgggggauuuuauugacuaugaagaacugcgggagcagcuuagcuccgucagcucuuucgaacgcuuugagaucuuccccaagaccuccagcuggccuaaucacgauucuaacaagggagugacagccgcuuguccccaugccggcgcgaaauccuuuuacaagaaucugaucuggcucguuaaaaagggcaacagcuauccuaaacugucuaaguccuacauuaaugacaaggggaaagaagugcuuguccuguggggaauccaccaccccagcaccuccgccgaucaacagucucucuaccagaacgcugacgccuauguguucgugggcacaagcagauacuccaagaaauuuaagccugagauugcuauccggccgaaaguccgcgaucaggaggggagaaugaauuauuacuggacccugguugaacccggagacaagauuacguucgaggccacaggcaaccugguggugccucgguaugcguuugccauggaacgcaacgcugggagcggaaucauuaucucugauacccccguccaugacugcaauacaaccugucaaaccccuaaaggcgccaucaacacaucccuccccuuccagaauauucacccgaucacgauuggcaagugcccuaaguacgugaaaagcaccaagcugagacuugcuacagggcugcggaacguucccucuauccagagccgcggacucuuuggcgccauugccggguucaucgagggaggcuggaccgggaugguggacggaugguauggcuaccaucaccagaaugaacaaggcuccggguacgcugcggaucugaaaucuacacagcacgccaucgacgagauuaccaacaaggucaauagcgugaucgagaaaaugaacacgcaguuuacagcuguuggaaaggaguucaaucaucuugagaagagaauugaaaaccugaauaaaaagguggaugacggcuuccucgauaucuggaccuauaacgccgagcugcugguccuccuggaaaaugagcggacccuugacuaccacgauuccaacgugaaaaaucuguaugagaagguccgcagccagcucaaaaacaacgccaaggaaauugggaauggauguuuugaguucuaccauaagugcgacaacacauguauggaaucugugaaaaauggcaccuaugauuacccuaaguauuccgaggaagcuaaacugaacagagaggagaucgacgggguuaaacuugaaagcacacggaucuaccaaauucuggccaucuacucuacgguggcguccagccucguccuggugguuucccugggcgcuauuucuuuuuggaugugcagcaauggaucccuccagugccgcaucuguauuuga

SEQ ID NO: 201046 - RNA, 1701 nt, Artificial Sequence; identical to SEQ ID NO: 194741
  derived and/or modified CDS sequence (opt5) from hemagglutinin__InfluenzaA__AFK14571

SEQ ID NO: 201047 - RNA, 1701 nt, Artificial Sequence; identical to SEQ ID NO: 199250
  derived and/or modified CDS sequence (opt5) from hemagglutinin__InfluenzaA__AFK14586

SEQ ID NO: 201048 - RNA, 1701 nt, Artificial Sequence
  derived and/or modified CDS sequence (opt5) from hemagglutinin__InfluenzaA__AFK14595
augaaggccauccuggugguccuccuguacaccuucgcuacagccaacgcggacacgcuuugcauuggcuaucacgcuaauaacagcaccgauacaguugacaccgugcuggagaaaaaugugacagucacccauuccgugaaccuccuggaagauaagcacaaugggaaacuuuguaagcugaaaggaguugcuccccuccaucugggcaagugcaacaucgccggguggauucugggaaauccuaagugugagucucucagcacagccuccucuuggagcuacaucggcgaaaccuccucuagcaacaaugggacgugcuauccgggaaacuuuauugacuucgaggaacugaaaaagcagcuuuccagcgugucuuccuuugagagauucgagaucuuucccaaaaccagcucuuggccuaaucacgauuccaacaagggcgucacagccgcuuguccccaugccggcgcgaaaucuuucuacaagaaucugaucuggcucgugaagaaagggaacagcuauccuaagcuguccaaaagcuacauuaaugacaagggaaaagaaguucuugugcuguggggcauccaccaccccuccaccucugccgaucaacagagccucuaucagaacgcugacgccuacgucuuuguggggacaucccgguacagcaagaaauucaagccugagauugcuauccgcccgaaggugagagaucaggaaggacggaugaacuauuacuggacccuggucgagcccggcgacaaaauuacguuugaggccacagggaaucugguugugccucgcuaugcguucgccauggaaagaaacgcuggaucuggcaucauuaucuccgauacccccgugcaugacugcaauacaaccugucaaaccccuaagggcgccaucaacacaagccuccccuuucagaauauucacccgaucacgauugggaaaugcccuaaguacgucaaaucuaccaagcugcggcuugcuacaggacugcgcaacgugcccagcauccaguccagaggccucuucggggccauugccggauuuaucgagggcggguggaccggaaugguugauggcugguauggcuaccaucaccagaaugaacaagggucuggauaugcugcggaccuuaagagcacacagaacgccaucgacgagauuaccaauaaagugaacuccgucaucgaaaagaugaauacgcaguucacagcugugggcaaagaguucaaccaccuggagaagcggauugaaaaucugaacaaaaagguugaugacggguuucucgauaucuggaccuacaaugccgagcugcuggugcuccuggaaaacgagcgcacccuugacuaccaugauagcaacgucaagaaucuguaugaaaaagugagaucucagcucaagaacaaugccaaagagauuggaaacggcuguuucgaguuuuaccacaagugcgacaauacauguauggaauccgucaaaaacgggaccuaugauuacccuaaguauagcgaggaagcuaagcugaaucgggaggaaaucgacggcgugaaacuugagucuacacgcaucuaccaaauucuggccaucuauuccacgguugcgagcucccucgugcuggucgugucucugggagcuauuagcuucuggaugugcuccaacggcucucuccagugcagaaucuguauuuga

SEQ ID NO: 201049 - RNA, 1701 nt, Artificial Sequence; identical to SEQ ID NO: 199250
  derived and/or modified CDS sequence (opt5) from hemagglutinin__InfluenzaA__AFK14612

SEQ ID NO: 201050 - RNA, 1701 nt, Artificial Sequence; identical to SEQ ID NO: 194741
  derived and/or modified CDS sequence (opt5) from hemagglutinin__InfluenzaA__AFK14621

SEQ ID NO: 201051 - RNA, 1701 nt, Artificial Sequence
  derived and/or modified CDS sequence (opt5) from hemagglutinin__InfluenzaA__AFK14630
augaaggccauccuggugguccuccuguacaccuucgcuacagccaacgcggacacgcuuugcauuggcuaucacgcuaauaacagcaccgauacaguugacaccgugcuggagaagaaugugacagucacccauuccgugaaccuccuggaagauaagcacaaugggaaacuuuguaagcugagaggaguugcuccccuccaucugggcaaaugcaacaucgccggguggauucugggaaauccugagugugaaucucucagcacagccuccucuuggagcuacaucguggagaccuccucuagcgacaacggcacgugcuauccgggggauuuuauugacuacgaagaacugcgggagcagcuuuccagcgucucuuccuucgaacgcuuugagaucuuccccaagaccagcucuuggccuaaucacgauuccaacaagggagugacagccgcuuguccccaugccggcgcgaaaucuuuuuauaagaaucugaucuggcucguuaaaaagggcaacagcuacccuaaacuguccaagagcuauauuaaugacaaggggaaagaagugcuuguccuguggggaauccaccaccccuccaccagagccgaucuccaaucuauuaaccagaaugcugacgccuacguguucgugggcacaagccgguacuccaagaaauuuaagccugagaucgcuauucgcccgaaagucagagaucaggaggggcggaugaacuauuacuggacccugguugaacccggagacaagaucacguucgaggccacaggcaaccugguggugccucgcuaugcguuugccauggaaagaaaugcugggagcggaauuaucaucucugauacccccguccaugacugcaacacaaccugucagaccccuaaaggcgccauuaauacaucccuccccuuccaaaacauccacccgauuacgaucggcaagugcccuaaguacgugaaaagcaccaagcugcggcuugcuacagggcugcgcaauguucccucuauucagagcagaggacucuuuggcgccaucgccggguucaucgagggaggcuggaccgggaugguggacggaugguauggcuaccaucaccagaacgaacagggcuccggguaugcugcggaucugaaaucuacacaaaaugccauugacgagaucaccaacaaggucaauagcgugauugagaaaaugaacacgcaguuuacagcuguuggaaaggaguucaaucaccuugagaagcggaucgaaaaccugaauaaaaagguggaugacggcuuccucgauauuuggaccuacaacgccgagcugcugguccuccuggaaaaugagcgcacccuugacuaccaugauuccaacgugaaaaaccuguaugagaaggucagaagccagcucaaaaauaacgccaaggaaaucgggaauggauguuuugaguucuaccacaagugcgacaacacauguauggaaucugugaaaaauggcaccuaugauuacccuaaguauuccgaggaagcuaaacugaaccgggaggagaucgacgggguuaaacuugaaagcacacgcauuuaccagauccuggccauuuauucuacgguggcguccagccucguccuggugguuucccugggcgcuaucucuuuuuggaugugcagcaauggaucccuccaaugcagaauuuguaucuga

SEQ ID NO: 201052 - RNA, 1701 nt, Artificial Sequence
  derived and/or modified CDS sequence (opt5) from hemagglutinin__InfluenzaA__AFK14639
augaaggccauccuggugguccuccuguacaccuucgcuacagccaacgcggacacgcuuugcauuggcuaucacgcuaauaacagcaccgauacaguugacaccgugcuggagaaaaaugugacagucacccauuccgugaacauccucgaagauaagcacaaugggaaacuguguaaacuuagaggaguugcuccccugcaucucggcaagugcaacauugccggguggauccugggaaauccugagugugaaucucugagcacagccuccucuuggagcuacauuguggagaccuccucuagcgacaacggcacgugcuauccgggggauuuuaucgacuacgaagaacuccgggagcagcuguccagcgucucuuccuucgaacgcuuugagaucuuccccaagaccagcucuuggccuaaucacgauuccaacaagggagugacagccgcuuguccccaugccggcgcgaaaucuuuuuauaagaaucuuauuuggcugguuaaaaagggcaacagcuacccuaaacucuccaagagcuauaucaaugacaaggggaaagaagugcugguccuuuggggcauucaccaccccuccaccucugccgaucaacagagccuguaccagaacgcugacgccuacguguucgugggauccagcagauauucuaagaaauuuaagccugagaucgcuauucggccgaaaguccgcgaucaggaggggagaaugaauuacuauuggacacucguugaacccggagacaagaucaccuucgaggccacgggcaaccugguggugccucgguacgcguuugccauggaacgcaacgcuggguccggaauuaucaucagcgauacacccguccaugacugcaauaccacaugucaaaccccuaaaggcgccauuaacaccucucugcccuuccagaauauccacccgauuacaaucggcaagugcccuaaguaugugaaaagcacgaagcucagacuggcuaccgggcuucggaacguucccuccauucagucucgcggacuguuuggcgccaucgccggguucaucgagggaggcuggacagggaugguggacggaugguacggcuaucaucaccagaaugaacaaggcagcggguacgcugcggaucucaaauccacccagaacgccauugacgagaucacaaauaaggucaacagcgugauugagaaaaugaauacccaguuuacggcuguuggaaaggaguucaaccaccuggagaagagaaucgaaaaucuuaacaaaaagguggaugacggcuuccuggauauuuggacauacaaugccgagcuccugguccugcucgaaaacgagcggacccuggacuaucaugauucuaaugugaaaaaccuuuacgagaagguccgcgggcagcugaaaaacaaugccaaggaaaucggaaacggcuguuuugaguucuaucacaagugcgacaauaccuguauggaauccgugaaaaacgggacauacgauuauccuaaguacagcgaggaagcuaaacucaauagagaggagaucgacggcguuaagcuggaaucuacccggauuuaucaaauccuugccauuuacuccacaguggcgagcucccugguccucgugguuucucugggagcuaucagcuuuuggaugugcuccaacggcucucugcagugccgcauuuguaucuga

SEQ ID NO: 201053 - RNA, 1701 nt, Artificial Sequence; identical to SEQ ID NO: 194741
  derived and/or modified CDS sequence (opt5) from hemagglutinin__InfluenzaA__AFK14661

SEQ ID NO: 201054 - RNA, 1701 nt, Artificial Sequence; identical to SEQ ID NO: 199250
  derived and/or modified CDS sequence (opt5) from hemagglutinin__InfluenzaA__AFK14670

SEQ ID NO: 201055 - RNA, 1701 nt, Artificial Sequence; identical to SEQ ID NO: 199250
  derived and/or modified CDS sequence (opt5) from hemagglutinin__InfluenzaA__AFK14678

SEQ ID NO: 201056 - RNA, 1701 nt, Artificial Sequence
  derived and/or modified CDS sequence (opt5) from hemagglutinin__InfluenzaA__AFK14688
augaaggccauccuggugguccuccuguacaccuucgcuacagccaacgcggacacgcuuugcauuggcuaucacgcuaauaacagcaccgauacaguugacaccgugcuggagaaaaaugugacagucacccauuccgugaaccuccuggaagauaagcacaaugggaaacuuuguaagcugagaggaguugcgccccuccaucugggcaaaugcaacaucgccggguggauucugggaaauccugagugugaaucucucagcacagcuuccucuuggagcuacaucguggagaccuccucuagcgacaacggcacgugcuauccgggggauuuuauucacgacgaagaacugcggaagcagcuuuccagcgucucuuccuucgagcgcuuugaaaucuuccccaagaccagcucuuggccuaaucaugauuccaacaaaggagugacagccgcuuguccccacgccggcgccaagagcuuuuacaaaaaucugaucuggcucguuaagaaaggcaacucuuauccuaagcuguccaagagcuacauuaaugacaaagggaaggaggugcuuguccuguggggaauccaccaucccuccaccucugccgaucaacagagccucuaucagaacgcugacgccuacguguucgugggcacauccagauacagcaaaaaguuuaaaccugaaauugcuauccggccgaagguccgcgaucaggaggggagaaugaauuauuacuggacccugguugagcccggagacaaaauuacguucgaagccacaggcaaccugguggugccucgguaugcguuugccauggagcgcaaggcugggucuggaaucauuauccucgauacccccguccacgacuggaacacaaccugcgaaaccccuaagggcgccgugaauacaucccugcccuuccaaaacauccauccgauuacgaucggcaaauguccuaaguacguuaaaagcaccaaacuuagacuggcuacagggcuccggaaugugcccucuauucagagccgcggacuguuuggcgccaucgccggguucauugagggaggcuggaccgggauggucgacggaugguauggcuaccaccaccagaacgaacagggcuccggguaugcugcggaucuuaagucuacacaaaaugccaucgacgagaucaccaacaaggugaauagcguuauugagaagaugaacacgcaguuuacagcugugggaaaagaguucaaucaucuggagaagagaaucgaaaaccucaauaaaaaggucgaugacggcuuccuggauauuuggaccuacaacgccgagcugcucgugcugcuugaaaaugagcggacccuggacuaccacgauuccaacgucaaaaaucucuaugagaaggugcgcagccagcugaagaacaacgccaaagaaaucgggaauggaugcuuugaguucuaccauaagugugacaacacaugcauggaaucuguuaaaaauggcaccuaugauuacccuaaguauuccgaggaagcuaaacuuaacagagaggagauugacggggugaagcuggaaagcacacggaucuaccagauccucgccauuuauucuacggucgcguccagccuggugcugguugugucccucggcgcuaucucuuuuuggauguguagcaauggaucccugcaaugccgcauuugcaucuga

SEQ ID NO: 201057 - RNA, 1701 nt, Artificial Sequence; identical to SEQ ID NO: 199250
  derived and/or modified CDS sequence (opt5) from hemagglutinin__InfluenzaA__AFK14697

SEQ ID NO: 201058 - RNA, 1701 nt, Artificial Sequence; identical to SEQ ID NO: 199250
  derived and/or modified CDS sequence (opt5) from hemagglutinin__InfluenzaA__AFK14713

SEQ ID NO: 201059 - RNA, 1701 nt, Artificial Sequence; identical to SEQ ID NO: 199250
  derived and/or modified CDS sequence (opt5) from hemagglutinin__InfluenzaA__AFK14722

SEQ ID NO: 201060 - RNA, 1701 nt, Artificial Sequence
  derived and/or modified CDS sequence (opt5) from hemagglutinin__InfluenzaA__AFK14731
augaaggccauccuggugguccuccuguacaccuucgcuacagccaacgcggacacgcuuugcauuggcuaucacgcuaauaacagcaccgauacaguugacaccgugcuggagaaaaaugugacagucacccauuccgugaaccuccuggaagauaagcacaaugggaaacuuuguaagcugagaggaguugcgccccuccaucugggcaaaugcaacaucgccggguggauucugggaaauccugagugugaaucucucagcacagcuuccucuuggagcuacaucguggagaccuccucuagcgacaacggcacgugcuauccgggggauuuuauugacuacgaagaacugcggaagcagcuuuccagcgucucuuccuucgagcgcguggaaaucuuucccaagaccagcucuuggccuaaucacgauuccaacaaaggaguuacagccgcuuguccccaugccggcgccaagagcuucuauaaaaaucugaucuggcucgugaagaaaggcaacucuuacccuaagcuguccaagagcuauauuaaugacaaagggaaggagguccuugugcuguggggaauccaccaccccuccaccucugccgaucaacagagccucuaccagaacgcugacgccuacguguuugucggcacauccagauauagcaaaaaguucaaaccugaaauugcuauccggccgaagguucgcgaucaggaggggagaaugaauuacuauuggacccugguggagcccggagacaaaauuacguuugaagccacaggcaaccugguggucccucgguacgcguucgccauggagcgcaacgcugggucuggaaucauuaucuccgauacccccgugcaugacugcaauacaaccugucaaaccccuaagggcgccguuaacacaagccuccccuuucagaauauccacccgauuacgaucggcaagugcccuaaauaugugaagucuaccaaacugagacuugcuacagggcugcggaacguccccagcauucagucccgcggacucuucggcgccaucgccggguuuauugaaggaggcuggaccgggaugguggacggaugguacggcuaucaucaccagaaugagcaaggcucuggguacgcugcggaucuuaagagcacacagaacgccaucgacgaaaucaccaauaaaguuaacuccgugauugagaagaugaauacgcaguucacagcugucggaaaggaguuuaaccaccuggagaaaagaaucgagaaucugaacaagaaaguggaugacggcuuccucgauauuuggaccuacaaugccgaacugcugguccuccuggagaacgaacggacccuugacuaucaugauagcaaugugaagaaccuguacgagaaaguucgcucucagcucaagaacaaugccaaggagaucgggaacggauguuucgaauuuuaucacaaaugcgacaauacauguauggaguccgugaagaacggcaccuacgauuauccuaaauacagcgaagaggcuaagcugaauagagaagagauugacggggucaaacuugagucuacacggaucuaucaaauccuggccauuuacuccacgguggcgagcucccucguucugguggucucucugggcgcuaucagcuucuggaugugcuccaacggaucucuccagugccgcauuuguaucuga

SEQ ID NO: 201061 - RNA, 1701 nt, Artificial Sequence; identical to SEQ ID NO: 199250
  derived and/or modified CDS sequence (opt5) from hemagglutinin__InfluenzaA__AFK14740

SEQ ID NO: 201062 - RNA, 1701 nt, Artificial Sequence; identical to SEQ ID NO: 199250
  derived and/or modified CDS sequence (opt5) from hemagglutinin__InfluenzaA__AFK14749

SEQ ID NO: 201063 - RNA, 1701 nt, Artificial Sequence; identical to SEQ ID NO: 199250
  derived and/or modified CDS sequence (opt5) from hemagglutinin__InfluenzaA__AFK14756

SEQ ID NO: 201064 - RNA, 1701 nt, Artificial Sequence; identical to SEQ ID NO: 199250
  derived and/or modified CDS sequence (opt5) from hemagglutinin__InfluenzaA__AFK14764

SEQ ID NO: 201065 - RNA, 1701 nt, Artificial Sequence
  derived and/or modified CDS sequence (opt5) from hemagglutinin__InfluenzaA__AFK14779
augaaggccauccuggugguccuccuguacaccuucgcuacagccaacgcggacacgcuuugcauuggcuaucacgcuaauaacagcaccgauacaguugacaccgugcuggagaagaaugugacagucacccauuccgugaaccuccuggaagauaagcacaaugggaaacuuuguaagcugggaggcguugcuccccuccaucuggggaaaugcaacaucgccggauggauucugggcaauccugagugugaaucucucagcacagccuccucuuggagcuacaucguggagaccuccucuagcgacaacgggacgugcuauccgggaaauuuuauugauuacgaagaacugagagagcagcuuuccagcgucucuuccuucgaacgguuugagaucuuccccaagaccagcucuuggccuaaccacgacuccaauaagggcgugacagccgcuuguccccaugccggcgcgaaaucuuuuuauaagaaccugaucuggcucguuaaaaaggggaauagcuacccuaaacuguccaagagcuauauuaacgauaagggaaaagaagugcuuguccuguggggcauccaccaccccuccaccucugccgaccaacagagccucuaccagaaugcugaugccuacguguucguggggacaucccgcuauagcaagaaauuuaagccugagauugcuaucagaccgaaaguccgggaccaggagggacgcaugaacuacuauuggacccugguugaacccggcgauaagauuacguucgaggccacagggaaccugguggugccuagauacgcguuugccauggaacggaaugcuggaucuggcaucauuaucuccgacacccccguccaugauugcaacacaaccugucaaaccccuaaaggcgccaucaauacaagccuccccuuccagaacauucacccgaucacgauugggaagugcccuaaguaugugaaaucuaccaagcugcgccuugcuacaggacugagaaauguucccagcauccagucccggggccucuuuggggccauugccggauucaucgagggcggguggaccggaaugguggacggcugguacggcuaucaucaccagaacgaacaagggucuggauacgcugcggaccugaaaagcacacagaaugccaucgaugagauuaccaacaaggucaauuccgugaucgagaaaaugaacacgcaguuuacagcuguuggcaaggaguucaaucaccuugagaagcgcauugaaaaccugaauaaaaagguggacgauggguuccucgacaucuggaccuacaacgccgagcugcugguccuccuggaaaaugagagaacccuugauuaucaugacagcaacgugaaaaaccuguacgagaagguccggucucagcucaaaaauaacgccaaggaaauuggaaauggcuguuuugaguucuaucacaagugcgauaacacauguauggaauccgugaaaaaugggaccuacgacuauccuaaguacagcgaggaagcuaaacugaaccgcgaggagaucgauggcguuaaacuugaaucuacaagaaucuaucaaauucuggccaucuacuccacgguggcgagcucccucguccuggugguuucucugggagcuauuagcuuuuggaugugcuccaauggcucucuccagugccggaucuguauuuga

SEQ ID NO: 201066 - RNA, 1701 nt, Artificial Sequence
  derived and/or modified CDS sequence (opt5) from hemagglutinin__InfluenzaA__AFK14788
augaaggccauccuggugguccuccuguacaccuucgcuacagccaacgcggacacgcuuugcauuggcuaucacgcuaauaacagcaccgauacaguugacaccgugcuggagaaaaaugugacagucacccauuccgugaacauccucgaagauaagcacaaugggaaacuguguaaacuuagaggaguugcuccccugcaucucggcaagugcaacauugccggguggauccugggaaauccugagugugaaucucugagcacagccuccucuuggagcuacauuguggagaccuccucuagcgacaacggcacgugcuauccgggggauuuuaucgacuacgaagaacuccgggagcagcuguccagcgucucuuccuucgaacgcuuugagaucuuccccaagaccagcucuuggccuaaucacgauuccaacaagggagugacagccgcuuguccccaugccggcgcgaaaucuuuuuauaagaaucuuauuuggcugguuaaaaagggcaacagcuacccuaaacucagaaaguccuauaucaaugacaaggggaaagaagugcugguccuuuggggcauucaccaccccagcaccuccgccgaucaacagucucuguaccagaacgcugacgccuacguguucgugggaagcucccgguauagcaagaaauuuaagccugagaucgcuauucgcccgaaagucagagaucaggaggggcggaugaauuacuauuggacacucguugaacccggagacaagaucaccuucgaggccacgggcaaccugguggugccucgcuacgcguuugccauggaaagaaacgcugggucuggaauuaucaucuccgauacacccguccaugacugcaauaccacaugucaaaccccuaaaggcgccauuaacaccagccugcccuuccagaauauccacccgauuacaaucggcaagugcccuaaguaugugaaaucuacgaagcuccggcuggcuaccgggcuucgcaacguucccagcauucaguccagaggacuguuuggcgccaucgccggguucaucgagggaggcuggacagggaugguggacggaugguacggcuaucaucaccagaaugaacaaggcucuggguacgcugcggaucucaaaagcacccagaacgccauugacgagaucacaaauaaggucaacuccgugauugagaaaaugaauacccaguuuacggcuguuggaaaggaguucaaccaccuggagaagcggaucgaaaaucuuaacaaaaagguggaugacggcuuccuggauauuuggacauacaaugccgagcuccugguccugcucgaaaacgagcgcacccuggacuaucaugauagcaaugugaaaaaccuuuacgagaaggucagaucucagcugaaaaacaaugccaaggaaguggggaacggauguuuugaguucuaucacaagugcgacaauaccuguauggaauccguuaaaaacggcacauacgauuauccuaaguacagcgaggaagcuaaacucaaucgggaggagaucgacggggugaagcuggaaucuacccgcaucuaucaaauucuugccaucuacuccacagcggcuagcucccugguccucgugguuucucugggcgccauuagcuuuuggaugugcuccaacggaucucugcagugcagaaucuguauuuga

SEQ ID NO: 201067 - RNA, 1701 nt, Artificial Sequence
  derived and/or modified CDS sequence (opt5) from hemagglutinin__InfluenzaA__AFK14798
augaaggccauccuggugguccuccuguacaccuucgcuacagccaacgcggacacgcuuugcauuggcuaucacgcuaauaacagcaccgauacaguugacaccgugcuggagaaaaaugugacagucacccauuccgugaaccuccuggaagauaagcacaaugggaaacuuuguaagcugagaggaguugcgccccuccaucugggcaaaugcaacaucgccggguggauucugggaaauccugagugugaaucucucagcacagcuuccucuuggagcuacaucguggagaccuccucuagcgacaacggcacgugcuauccgggggauuuuauuaauuacgaggaacugcggaagcagcuuuccagcgucucuuccuucgagcgcguggaaaucuuucccaagaccagcucuuggccuaaccacgacuccaauaaaggaguuacagccgcuuguccccaugccggcgccaagagcuucuauaaaaaccugaucuggcucgugaagaaaggcaauucuuacccuaagcuguccaagagcuauauuaacgauaaagggaaggagguccuugugcuguggggaauccaccaccccuccaccucugccgaccaacagagccucuaccagaaugcugaugccuacguguuugucggcacauccagauauagcaaaaaguucaaaccugaaauugcuauccggccgaagguucgcgaccaggaggggagaaugaacuacuauuggacccugguggagcccggagauaaaauuacguuugaagccacaggcaaccugguggucccucgguacgcguucgccauggagcgcaaugcugggucuggaaucauuaucuccgacacccccgugcaugauugcaacacaaccugucaaaccccuaauggcgccaucaacacaagccuccccuuucagaauauucacccgaucacgauuggcaagugcccuaaguauguuaaaucuaccaagcugagacuugcuacagggcugcggaacgugcccagcauccagucccgcggacucuucggcgccauugccggguuuaucgaaggaggcuggaccgggauggucgacggaugguacggcuaucaucaccagaaugagcaaggcucuggguacgcugcggaccugaaaagcacacagaacgccaucgauaagauuaccaauaaagugaacuccguuaucgaaaagaugaauacgcaguucacagcugugggaaaggaguuuaaccaccuugagaaaagaauugaaaaucugaacaagaaagucgacgauggcuuccucgacaucuggaccuacaaugccgagcugcuggugcuccuggaaaacgagcggacccuugauuaucaugacagcaacgucaagaaucuguacgaaaaagugcgcucucagcucaagaacaaugccaaggagauugggaacggauguuucgaguuuuaucacaaaugcgauaauacauguauggaauccguuaagaacggcaccuacgacuauccuaaauacagcgaggaagcuaagcugaauagagaggaaaucgauggggugaaacuugagucuacacggaucuaucaaauucuggccaucuacuccacggucgcgagcucccucgugcugguugugucucugggcgcuauuagcuucuggaugugcuccaacggaucucuccagugccgcaucuguauuuga

SEQ ID NO: 201068 - RNA, 1701 nt, Artificial Sequence
  derived and/or modified CDS sequence (opt5) from hemagglutinin__InfluenzaA__AFK14814
augaaggccauccuggugguccuccuguacaccuucgcuacagccaacgcggacacgcuuugcauuggcuaucacgcuaauaacagcaccgauacaguugacaccgugcuggagaaaaaugugacagucacccauuccgugaaccuccuggaagauaagcacaaugggaaacuuuguaagcugagaggaguugcuccccuccaucugggcaaaugcaacaucgccggguggauucugggaaauccugagugugaaucucucagcacagccuccucuuggagcuacaucguggagaccuccucuagcgacaacggcacgugcuauccgggggauuuuauugacuacgaagaacugcgggagcagcuuuccagcgucucuuccuaugaacgcuacgagaucuuccccaagaccagcucuuggccuaaucacgauuccaacaagggagugacagccgcuuguccccaugccggcgcgaaaucuuuuuauaagaaucugaucuggcucguuaaaaagggcaacagcuacccuaaacuguccaagagcuacauuaaugacaaggggaaagaagugcuuguccuguggggaauccaccaccccuccaccucugccgaucaacagagccucuaucagaacgcugacgccuacguguucgugggcacauccagauauagcaagaaauuuaagccugagauugcuauccggccgaaaguccgcgagcaggaagggagaaugaauuacuauuggacccugguugagcccggagauaagauuacguucgaagccacaggcaaccugguggugccucgguacgcguuugccauggagcgcaacgcugggucuggaaucauuaucuccgacacccccguccaugauugcaauacaaccugucaaaccccuaaaggcgccaucaacacaagccuccccuuccagaauauucacccgaucacgauuggcaagugcccuaaguaugugaaaucuaccaagcugagacuugcuacagggcugcggaacguucccagcauccagucccgcggacucuuuggcgccauugccggguucaucgaaggaggcuggaccgggaugguggacggaugguacggcuaccaucaccagaaugagcaaggcucuggguaugcugcggaccugaaaagcacacagaacgccaucgaugagauuaccaauaaggucaacuccgugaucgaaaagaugaauacgcaguuuacagcuguuggaaaggaguucaaccaccuugaaaagagaauugagaaucugaacaaaaagguggacgauggcuuucucgacaucuggaccuacaaugccgaacugcugguccuccuggagaacgagcggacccuugauuaucaugacagcaaugugaaaaaccuguacgaaaagguccgcucucagcucaaaaacaaugccaaggagauugggaacggauguuucgaguucuaucacaagugcgauaauacauguauggaguccgugaaaaacggcaccuacgacuauccuaaguacagcgaagaggcuaaacugaauagagaggaaaucgaugggguuaaacuugagucuacacggaucuaccaaauucuggccaucuauuccacgguggcgagcucccucguccuggugguuucucugggcgcuauuagcuuuuggaugugcuccaacggaucucuccagugccgcaucuguauuuga

SEQ ID NO: 201069 - RNA, 1701 nt, Artificial Sequence
  derived and/or modified CDS sequence (opt5) from hemagglutinin__InfluenzaA__AFK14831
augaaggccauccuggugguccuccuguacaccuucgcuacagccaacgcggacacgcuuugcauuggcuaucacgcuaauaacagcaccgauacaguugacaccgugcuggagaagaaugugacagucacccauuccgugaaccuccuggaagauaagcacaaugggaaacuuuguaagcugagaggaguugcuccccuccaucugggcaaaugcaacaucgccggguggauucugggaaauccugagugugaaucucucagcacagccuccucuuggagcuacaucguggagaccuccucuagcgacaacggcacgugcuauccgggggauuuuuccgacuacgaagaacugcgggagcagcuuagcucugucuccagcuucgaacgcuuugagauuuuccccaagaccucuuccuggccuaaucacgauagcaacaagggagugacagccgcuuguccccaugccggcgcgaaaucuuuuuauaagaaucugaucuggcucguuaaaaagggcaacuccuacccuaaacugagcaaguccuauaucaaugacaaggggaaagaagugcuuguccuguggggcauucaccaccccucuaccagcgccgaucaacagucccucuaccagaacgcugacgccuacguguucgugggaacaagcagauauucuaagaaauuuaagccugagaucgcuauucggccgaaaguccgcgaucaggaggggagaaugaauuacuauuggacccugguugaacccggagacaagaucacguucgaggccacaggcaaccugguggugccucgguacgcguuugccauggaacgcaacgcuggguccggaauuaucauuagcgauacccccguccaugacugcaauacaaccugucaaaccccuaaaggcgccaucaacacaucucuccccuuccagaauauccacccgauuacgaucggcaagugcccuaaguaugugaaaagcaccaagcugagacuugcuacagggcugcggaacguucccuccauucagucucgcggacucuuuggcgccaucgccggguucauugagggaggcuggaccgggaugguggacggaugguacggcuaucaucaccagaaugaacaaggcagcggguacgcugcggaucugaaauccacacagaacgccaucgacgagaucaccaauaaggucaacagcgugauugagaaaaugaauacgcaguuuacagcuguuggaaaggaguucaaccaccuugagaagagaaucgaaaaucugaacaaaaagguggaugacggcuuccucgauauuuggaccuacaaugccgagcugcugguccuccuggaaaacgagcggacccuugacuaucaugauucuaaugugaaaaaccuguacgagaagguccgcucccagcucaaaaacaaugccaaggaaaucgggaacggauguuuugaguucuaucacaagugcgacaauacauguauggaaagcgugaaaaacggcaccuacgauuauccuaaguacucugaggaagcuaaacugaauagagaggagauugacgggguuaaacuugaauccacacggaucuaucaaauccuggccauuuacagcacgguggcguccucucucguccuggugguuagccugggcgcuaucuccuuuuggaugugcucuaacggaagccuccagugccgcauuuguaucuga

SEQ ID NO: 201070 - RNA, 1701 nt, Artificial Sequence; identical to SEQ ID NO: 194741
  derived and/or modified CDS sequence (opt5) from hemagglutinin__InfluenzaA__AFK14839

SEQ ID NO: 201071 - RNA, 1701 nt, Artificial Sequence
  derived and/or modified CDS sequence (opt5) from hemagglutinin__InfluenzaA__AFK14847
augaaggccauccuggugguccuccuguacaccuucgcuacagccaacgcggacacgcuuugcauuggcuaucacgcuaauaacagcaccgauacaguugacaccgugcuggagaaaaaugugacagucacccauuccgugaaccuccuggaagauaagcacaaugggaaacuuuguaagcugagaggaguugcuccccuccaucugggcaaaugcaacaucgccggguggauucugggaaauccugagugugaaucucucagcacagccuccucuuggagcuacaucguggagaccuccucuagcgacaacggcacgugcuauccgggggauuuuauugacuacgaggaacugcgggagcagcuuuccagcgccucuuccuucgaacgcuaugagaucuuucccaagaccagcucuuggccuaaucacgauuccaacaagggagucacagcugccuguccccaugcgggcgccaagagcuucuacaagaaucugaucuggcucgugaaaaagggcaacucuuauccuaaacuguccaagagcuacauuaaugacaaggggaaagaaguucuugugcuguggggaauccaccaccccuccaccucugcugaucaacagagccucuaccagaacgccgacgcuuaugucuuugugggcacauccagauacagcaagaaauucaagccugagauugccauccggccgaaagugcgcgaucaggaggggagaaugaauuauuacuggacccuggucgaacccggagacaagauuacguuugaggcgacaggcaaccugguugugccucgguaugccuucgcuauggaacgcaacgccgggucuggaaucauuaucuccgauacccccgugcaugacugcaauacaaccugucaaaccccuaaaggcgcuaucaacacaagccuccccuuucagaauauucacccgaucacgauuggcaagugcccuaaguacgucaaaucuaccaagcugagacuugccacagggcugcggaacgugcccagcauccagucccgcggacucuucggcgccauugcuggguuuaucgagggaggcuggaccgggaugguugacggaugguauggcuaccaucaccagaaugaacaaggcucuggguacgcggccgaucugaaaagcacacagaacgcuaucgacgagauuaccaauaaggugaacuccgucaucgagaaaaugaauacgcaguucacagccgugggaaaggaauuuaaccaccuugagaagagaauugaaaaucugaacaaaaagguugaugacggcuuccucgauaucuggaccuauaaugccgagcugcuggugcuccuggaaaacgagcggacccuugacuaccaugauagcaaugucaaaaaccuguaugagaaggugcgcucucagcucaaaaacaaugcuaaggaaauugggaacggauguuucgaguuuuaccacaagugcgacaauacauguauggaauccgucaaaaacggcaccuaugauuacccuaaguauagcgaggaagccaaacugaauagagaggagaucgacggggugaaacuugaaucuacacggaucuaccaaauucuggcgaucuacuccacgguugcuagcucccucgugcuggucgugucucugggcgccauuagcuucuggaugugcuccaacggaucucuccagugccgcaucuguauuuga

SEQ ID NO: 201072 - RNA, 1701 nt, Artificial Sequence; identical to SEQ ID NO: 199250
  derived and/or modified CDS sequence (opt5) from hemagglutinin__InfluenzaA__AFK14868

SEQ ID NO: 201073 - RNA, 1701 nt, Artificial Sequence; identical to SEQ ID NO: 195905
  derived and/or modified CDS sequence (opt5) from hemagglutinin__InfluenzaA__AFK14884

SEQ ID NO: 201074 - RNA, 1701 nt, Artificial Sequence; identical to SEQ ID NO: 195905
  derived and/or modified CDS sequence (opt5) from hemagglutinin__InfluenzaA__AFK14892

SEQ ID NO: 201075 - RNA, 1701 nt, Artificial Sequence; identical to SEQ ID NO: 195905
  derived and/or modified CDS sequence (opt5) from hemagglutinin__InfluenzaA__AFK14901

SEQ ID NO: 201076 - RNA, 1701 nt, Artificial Sequence; identical to SEQ ID NO: 195905
  derived and/or modified CDS sequence (opt5) from hemagglutinin__InfluenzaA__AFK14910

SEQ ID NO: 201077 - RNA, 1701 nt, Artificial Sequence; identical to SEQ ID NO: 194741
  derived and/or modified CDS sequence (opt5) from hemagglutinin__InfluenzaA__AFK14919

SEQ ID NO: 201078 - RNA, 1701 nt, Artificial Sequence; identical to SEQ ID NO: 194741
  derived and/or modified CDS sequence (opt5) from hemagglutinin__InfluenzaA__AFK14929

SEQ ID NO: 201079 - RNA, 1701 nt, Artificial Sequence; identical to SEQ ID NO: 200258
  derived and/or modified CDS sequence (opt5) from hemagglutinin__InfluenzaA__AFK25599

SEQ ID NO: 201080 - RNA, 1701 nt, Artificial Sequence
  derived and/or modified CDS sequence (opt5) from hemagglutinin__InfluenzaA__AFK25601
augaaggccauccuggugguccuccuguacaccuucgcuacagccaacgcggacacgcuuugcauuggcuaucacgcuaauaacagcaccgauacaguugacaccgugcuggagaaaaaugugacagucacccauuccgugaaccuccuggaagauaagcacaaugggaaacuuuguaagcugagaggaguugcuccccuccaucugggcaaaugcaacaucgccggguggauucugggaaauccugagugugugacacucucuaccgccagcuccuggucuuacaucgucgaaacgagcuccucugacaacgggaccugcuauccgggcgauuuuauugacuacgaggaacugcgggagcagcuuagcuccgugagcucuuucgagcgcuuugaaaucuuccccaagacauccagcuggccuaaucacgauucuaacaagggaguuaccgccgcuuguccccaugccggcgcgaaaggcuuuuauaagaaucugaucuggcucgugaaaaaggggaacuccuacccuaaacugagcaagucuuauauuaaugacaagggaaaagagguccuugugcuguggggcauccaccaccccuccacaaccgccgaucaacagagccucuaccagaacgcugacacguacguguucgucgggacauccagauauucuaagaaauuuaagccugaaauugccauccggccgaaaguucgcgaucaggagggaagaaugaauuacuauuggacccugguggagcccggcgacaagauuacauucgaagcuaccgggaaccugguggucccucgguacgccuuugcgauggagcgcgaugccggaagcggcaucauuaucuccgacacccccgugcaugacugcaacacaacgugucaaaccccuaaaggcgcuaucaauacaagccuccccuuccagaacauucacccgaucaccauugggaagugcccuaaguauguuaaaucuacaaagcugagacuugccaccggacugcggaaugugcccuccauccagagccgcggccucuuuggggcuauugccggauucaucgaaggcggguggacgggaauggucgauggcugguacggcuaucaucaccagaacgagcaagggucuggauacgccgcugaccugaaaagcacacagaaugcgaucgauaagauuaccaacaaaguuaauuccgugaucgaaaagaugaacacccaguuuacagccgugggcaaggaguucaaucaccuugagaaaagaauugaaaaccugaauaagaaagucgacgauggguuccucgacaucuggaccuacaacgcugagcugcuggugcuccuggaaaaugagcggacacuugauuaucaugacucuaacgucaagaaucuguacgaaaaagugcgcaaccagcucaagaacaaugccaaggagauuggaaacggcuguuuugaguucuaucacaaaugcgauaauacguguauggaaagcguuaagaacgggaccuacgacuauccuaaauacuccgaggaagccaagcugaauagagaggaaaucgauggcgugaaacuugagagcacacggaucuaucaaauucuggcuaucuacucuaccgccgcguccagccucguccuggugguuucucugggagcuauuuccuuuuggaugugcagcaacggcucccuccagugccgcaucuguauuuga

SEQ ID NO: 201081 - RNA, 1701 nt, Artificial Sequence; identical to SEQ ID NO: 200258
  derived and/or modified CDS sequence (opt5) from hemagglutinin__InfluenzaA__AFK25603

SEQ ID NO: 201082 - RNA, 1701 nt, Artificial Sequence
  derived and/or modified CDS sequence (opt5) from hemagglutinin__InfluenzaA__AFK25605
augaaggccauccuggugguccuccuguacaccuucgcuacagccaacgcggacacgcuuugcauuggcuaucacgcuaauaacagcaccgauacaguugacaccgugcuggagaaaaaugugacagucacccauuccgugaaccuccuggaagauaagcacaaugggaaacuuuguaagcugagaggaguugcuccccuccaucugggcaaaugcaacaucgccggguggauucugggaaauccugagugugaaacacucucuaccgccagcuccuggucuuacaucguggagacgagcuccucugacaacgggaccugcuauccgggcgauuuuauugacuacgaagaacugcgggagcagcuuagcuccgucagcucuuucgaacgcuuugagaucuuccccaagacauccagcuggccuaaucacgauucuaacaagggagugaccgccgcuuguccccaugccggcgcgaaaggcuuuuauaagaaucugaucuggcucguuaaaaaggggaacuccuacccuaaacugagcaagucuuauauuaaugacaagggaaaagaagugcuuguccuguggggcauccaccaccccuccacaaccgccgaucaacagagccucuaccagaacgcugacacguacguguucguggggacauccagauauucuaagaaauuuaagccugagauugccauccggccgaaaguccgcgaucaggagggaagaaugaauuacuauuggacccugguugaacccggcgacaagauuacauucgaggcuaccgggaaccugguggugccucgguacgccuuugcgauggaacgcgaugccggaagcggcaucauuaucuccgacacccccguccaugacugcaacacaacgugucaaaccccuaaaggcgcuaucaauacaagccuccccuuccagaacauucacccgaucaccauugggaagugcccuaaguaugugagaucuacaaaacugcggcuugccaccggacugcgcaauguucccuccauccagagcagaggccucuuuggggcuauugccggauucaucgagggcggguggacgggaaugguggauggcugguacggcuaucaucaccagaacgaacaagggucuggauacgccgcugaccuuaagagcacacagaaugcgaucgauaaaauuaccaacaaggucaauuccgugaucgagaaaaugaacacccaguuuacagccguuggcaaggaguucaaucaccuugaaaagcggauugagaaccugaauaaaaagguggacgauggguuccucgacaucuggaccuacaacgcugaacugcugguccuccuggagaaugaacgcacacuugauuaucaugacucuaacgugaaaaaucuguacgagaaggucagaaaccagcucaaaaacaaugccaaggagauuggaaacggcuguuuugaguucuaucacaagugcgauaauacguguauggagagcgugaaaaacgggaccuacgacuauccuaaguacuccgaagaggccaaacugaaucgggaagagaucgauggcguuaagcuggagagcacacgcaucuaucaaauucuggcuaucuacucuaccgccgcguccagccucgugcuggucgugucucugggagcuauuuccuuuuggaugugcagcaacggcucccuccagugcagaaucuguauuuga

SEQ ID NO: 201083 - RNA, 1701 nt, Artificial Sequence; identical to SEQ ID NO: 200486
  derived and/or modified CDS sequence (opt5) from hemagglutinin__InfluenzaA__AFK74526

SEQ ID NO: 201084 - RNA, 1701 nt, Artificial Sequence; identical to SEQ ID NO: 194741
  derived and/or modified CDS sequence (opt5) from hemagglutinin__InfluenzaA__AFK74534

SEQ ID NO: 201085 - RNA, 1701 nt, Artificial Sequence; identical to SEQ ID NO: 194741
  derived and/or modified CDS sequence (opt5) from hemagglutinin__InfluenzaA__AFK74544

SEQ ID NO: 201086 - RNA, 1701 nt, Artificial Sequence; identical to SEQ ID NO: 194741
  derived and/or modified CDS sequence (opt5) from hemagglutinin__InfluenzaA__AFK74554

SEQ ID NO: 201087 - RNA, 1701 nt, Artificial Sequence; identical to SEQ ID NO: 194983
  derived and/or modified CDS sequence (opt5) from hemagglutinin__InfluenzaA__AFK74564

SEQ ID NO: 201088 - RNA, 1701 nt, Artificial Sequence; identical to SEQ ID NO: 197296
  derived and/or modified CDS sequence (opt5) from hemagglutinin__InfluenzaA__AFK74575

SEQ ID NO: 201089 - RNA, 1701 nt, Artificial Sequence; identical to SEQ ID NO: 194728
  derived and/or modified CDS sequence (opt5) from hemagglutinin__InfluenzaA__AFK74585

SEQ ID NO: 201090 - RNA, 1701 nt, Artificial Sequence
  derived and/or modified CDS sequence (opt5) from hemagglutinin__InfluenzaA__AFK74595
augaaggccauccuggugguccuccuguacaccuucgcuacagccaacgcggacacgcuuugcauuggcuaucacgcuaauaacagcaccgauacaguugacaccgugcuggagaaaaaugugacagucacccauuccgugaaccuccuggaagauaagcacaaugggaaacuuuguaagcugagaggaguugcuccccuccaucugggcaaaugcaacaucgccggguggauucugggaaauccugagugugaaucucucagcacagccuccucuuggagcuacaucguggagaccuccucuagcgacaacggcacgugcuauccgggggauuuuauugacuacgaagaacugcgggagcagcuuuccagcgucucuuccuucgaacgcuuugagaucuuccccaagaccagcucuuggccuaaucacgaucugaacaagggagugacagccgcuuguccccaugccggcgcgaaauccuuuuauaagaaucucaucuggcugguuaaaaagggcaacagcuacccuaaacuuucuaaguccuauauuaaugacaaggggaaagaagugcugguccucuggggaauccaccaccccagcaccuccgccgaucaacagucucuguaccagaacgcugacgccuacguguucgugggcacaagcagauauuccaagaaauuuaagccugagauugcuauccggccgaaaguccgcgaucaggaggggagaaugaauuacuauuggacccugguugaacccggagacaagauuacguucgaggccacaggcaaccucguggugccucgguacgcguuugccauggaacgcaacgcugggagcggaaucauuaucucugauacccccguccaugacugcaauacaaccugucaaaccccuaaaggcgccaucaacacaucccugcccuuccagaauauucacccgaucacgauuggcaagugcccuaaguaugugaaaagcaccaaacuuagacuggcuacagggcuccggaacguucccucuauccagagccgcggacuguuuggcgccauugccggguucaucgagggaggcuggaccgggaugguggacggaugguacggcuaucaucaccagaaugaacaaggcuccggguacgcugcggaucuuaagucuacacagaacgccaucgacgagauuaccaauaaggucaacagcgugaucgagaaaaugaauacgcaguuuacagcuguuggaaaggaguucaaccaccuggagaagagaauugaaaaucucaacaaaaagguggaugacggcuuccuggauaucuggaccuacaaugccgagcugcucguccugcuugaaaacgagcggacccuggacuaucaugauuccaaugugaaaaaccucuacgagaagguccgcagccagcugaaaaacaaugccaaggaaauugggaacggauguuuugaguucuaucacaagugcgacaauacauguauggaaucugugaaaaacggcaccuacgauuauccuaaguacuccgaggaagcuaaacuuaauagagaggagaucgacgggguuaagcuggaaagcacacggaucuaucaaauucucgccaucuacucuacgguggcguccagccugguccuggugguuucccucggcgcuauuucuuuuuggaugugcagcaacggaucccugcagugccgcaucuguauuuga

SEQ ID NO: 201091 - RNA, 1701 nt, Artificial Sequence; identical to SEQ ID NO: 194741
  derived and/or modified CDS sequence (opt5) from hemagglutinin__InfluenzaA__AFK74605

SEQ ID NO: 201092 - RNA, 1701 nt, Artificial Sequence; identical to SEQ ID NO: 194983
  derived and/or modified CDS sequence (opt5) from hemagglutinin__InfluenzaA__AFK74615

SEQ ID NO: 201093 - RNA, 1701 nt, Artificial Sequence; identical to SEQ ID NO: 194983
  derived and/or modified CDS sequence (opt5) from hemagglutinin__InfluenzaA__AFK74625

SEQ ID NO: 201094 - RNA, 1701 nt, Artificial Sequence; identical to SEQ ID NO: 195843
  derived and/or modified CDS sequence (opt5) from hemagglutinin__InfluenzaA__AFK74635

SEQ ID NO: 201095 - RNA, 1701 nt, Artificial Sequence; identical to SEQ ID NO: 195843
  derived and/or modified CDS sequence (opt5) from hemagglutinin__InfluenzaA__AFK74645

SEQ ID NO: 201096 - RNA, 1701 nt, Artificial Sequence; identical to SEQ ID NO: 194741
  derived and/or modified CDS sequence (opt5) from hemagglutinin__InfluenzaA__AFK74655

SEQ ID NO: 201097 - RNA, 1701 nt, Artificial Sequence; identical to SEQ ID NO: 194741
  derived and/or modified CDS sequence (opt5) from hemagglutinin__InfluenzaA__AFK74665

SEQ ID NO: 201098 - RNA, 1701 nt, Artificial Sequence; identical to SEQ ID NO: 194741
  derived and/or modified CDS sequence (opt5) from hemagglutinin__InfluenzaA__AFK74675

SEQ ID NO: 201099 - RNA, 1701 nt, Artificial Sequence; identical to SEQ ID NO: 194741
  derived and/or modified CDS sequence (opt5) from hemagglutinin__InfluenzaA__AFK74685

SEQ ID NO: 201100 - RNA, 1701 nt, Artificial Sequence; identical to SEQ ID NO: 197296
  derived and/or modified CDS sequence (opt5) from hemagglutinin__InfluenzaA__AFK74695

SEQ ID NO: 201101 - RNA, 1701 nt, Artificial Sequence; identical to SEQ ID NO: 194741
  derived and/or modified CDS sequence (opt5) from hemagglutinin__InfluenzaA__AFK74705

SEQ ID NO: 201102 - RNA, 1701 nt, Artificial Sequence; identical to SEQ ID NO: 194741
  derived and/or modified CDS sequence (opt5) from hemagglutinin__InfluenzaA__AFK74715

SEQ ID NO: 201103 - RNA, 1701 nt, Artificial Sequence; identical to SEQ ID NO: 194741
  derived and/or modified CDS sequence (opt5) from hemagglutinin__InfluenzaA__AFK74725

SEQ ID NO: 201104 - RNA, 1701 nt, Artificial Sequence; identical to SEQ ID NO: 194741
  derived and/or modified CDS sequence (opt5) from hemagglutinin__InfluenzaA__AFK74735

SEQ ID NO: 201105 - RNA, 1701 nt, Artificial Sequence; identical to SEQ ID NO: 194741
  derived and/or modified CDS sequence (opt5) from hemagglutinin__InfluenzaA__AFK74745

SEQ ID NO: 201106 - RNA, 1701 nt, Artificial Sequence; identical to SEQ ID NO: 194741
  derived and/or modified CDS sequence (opt5) from hemagglutinin__InfluenzaA__AFK74755

SEQ ID NO: 201107 - RNA, 1701 nt, Artificial Sequence; identical to SEQ ID NO: 197296
  derived and/or modified CDS sequence (opt5) from hemagglutinin__InfluenzaA__AFK74765

SEQ ID NO: 201108 - RNA, 1701 nt, Artificial Sequence; identical to SEQ ID NO: 194741
  derived and/or modified CDS sequence (opt5) from hemagglutinin__InfluenzaA__AFK74775

SEQ ID NO: 201109 - RNA, 1701 nt, Artificial Sequence; identical to SEQ ID NO: 194741
  derived and/or modified CDS sequence (opt5) from hemagglutinin__InfluenzaA__AFK74785

SEQ ID NO: 201110 - RNA, 1701 nt, Artificial Sequence; identical to SEQ ID NO: 194741
  derived and/or modified CDS sequence (opt5) from hemagglutinin__InfluenzaA__AFK74795

SEQ ID NO: 201111 - RNA, 1701 nt, Artificial Sequence; identical to SEQ ID NO: 194741
  derived and/or modified CDS sequence (opt5) from hemagglutinin__InfluenzaA__AFK74805

SEQ ID NO: 201112 - RNA, 1701 nt, Artificial Sequence; identical to SEQ ID NO: 194741
  derived and/or modified CDS sequence (opt5) from hemagglutinin__InfluenzaA__AFK74815

SEQ ID NO: 201113 - RNA, 1701 nt, Artificial Sequence; identical to SEQ ID NO: 194741
  derived and/or modified CDS sequence (opt5) from hemagglutinin__InfluenzaA__AFK74825

SEQ ID NO: 201114 - RNA, 1701 nt, Artificial Sequence; identical to SEQ ID NO: 194741
  derived and/or modified CDS sequence (opt5) from hemagglutinin__InfluenzaA__AFK74835

SEQ ID NO: 201115 - RNA, 1701 nt, Artificial Sequence; identical to SEQ ID NO: 194741
  derived and/or modified CDS sequence (opt5) from hemagglutinin__InfluenzaA__AFK74845

SEQ ID NO: 201116 - RNA, 1701 nt, Artificial Sequence; identical to SEQ ID NO: 194741
  derived and/or modified CDS sequence (opt5) from hemagglutinin__InfluenzaA__AFK74895

SEQ ID NO: 201117 - RNA, 1701 nt, Artificial Sequence; identical to SEQ ID NO: 194741
  derived and/or modified CDS sequence (opt5) from hemagglutinin__InfluenzaA__AFK74905

SEQ ID NO: 201118 - RNA, 1701 nt, Artificial Sequence; identical to SEQ ID NO: 194741
  derived and/or modified CDS sequence (opt5) from hemagglutinin__InfluenzaA__AFK74915

SEQ ID NO: 201119 - RNA, 1701 nt, Artificial Sequence
  derived and/or modified CDS sequence (opt5) from hemagglutinin__InfluenzaA__AFK74925
augaaggccauccuggugguccuccuguacaccuucgcuacagccaacgcggacacgcuuugcauuggcuaucacgcuaauaacagcaccgauacaguugacaccgugcuggagaaaaaugugacagucacccauuccgugaaccuccuggaagauaagcacaaugggaaacuuuguaagcugagaggaguugugccccuccaucugggcaaaugcaacaucgccggguggauucugggaaauccugagugugaaucucucagcacagccuccucuuggagcuacaucgucgagaccuccucuagcgacaacggcacgugcuauccgggggauuuuauugacuacgaagaacugcgggagcagcuuuccagcgugucuuccuucgaacgcuuugagaucuuccccaagaccagcucuuggccuaaucacgauuccaacaagggaguuacagcugccuguccccaugcuggcgccaagagcuuuuauaagaaucugaucuggcucgugaaaaagggcaacucuuacccuaaacuguccaagagcuauauuaaugacaaggggaaagaaguccuugugcuguggggaauccaccaccccuccaccucugcggaucaacagagccucuaccagaacgccgacgcuuacguguucgucggcacauccagauauagcaagaaauuuaagccugagauugccauccggccgaaaguucgcgaucaggaggggagaaugaauuacuauuggacccugguggaacccggagacaagauuacguucgaggcuacaggcaaccugguggucccucgguacgccuuuaccauggaacgcaacgcggggucuggaaucauuaucuccgauacacccgugcaugacugcaauaccaccugucaaacaccuaaaggcgccaucaacacgagccuccccuuccagaauauucacccgaucaccauuggcaagugcccuaaguauguuaaaucuacaaagcugagacuugcuaccgggcugcggaacgugcccagcauccagucccgcggacucuuuggcgccauugcuggguucaucgagggaggcuggacagggauggucgacggaugguacggcuaucaucaccagaaugaacaaggcucuggguacgccgccgaucugaaaagcacccagaacgcuaucgacggaauuacgaauaaggugaacuccguuaucgagaaaaugaauacacaguuuaccgcggugggcaaggaguucaaccaccuugaaaagagaauugagaaucugaacaaaaagaucgaugacggguuccucgauauuuggaccuacaaugccgaacugcugguccuccuggagaacgaacggacacuugacuaucaugauagcaaugugaaaaaccuguacgagaagguccgcucucagcucaaaaacaaugcuaaggagaucggaaacggcuguuuugaguucuaucacaagugcgacaauaccuguauggaguccgugaaaaacgggacauacgauuauccuaaguacagcgaagaggccaaacugaauagagaagagaucgacggcguuaaacuugagucuacgcggauuuaucaaauccuggccauuuacuccaccguggcuagcucccucguccuggugguuucucugggagccaucagcuuuuggaugugcuccaacggcucucuccagugccgcauuuguaucuga

SEQ ID NO: 201120 - RNA, 1701 nt, Artificial Sequence; identical to SEQ ID NO: 195843
  derived and/or modified CDS sequence (opt5) from hemagglutinin__InfluenzaA__AFK74935

SEQ ID NO: 201121 - RNA, 1701 nt, Artificial Sequence; identical to SEQ ID NO: 194741
  derived and/or modified CDS sequence (opt5) from hemagglutinin__InfluenzaA__AFK74945

SEQ ID NO: 201122 - RNA, 1701 nt, Artificial Sequence; identical to SEQ ID NO: 194741
  derived and/or modified CDS sequence (opt5) from hemagglutinin__InfluenzaA__AFK74955

SEQ ID NO: 201123 - RNA, 1701 nt, Artificial Sequence; identical to SEQ ID NO: 194741
  derived and/or modified CDS sequence (opt5) from hemagglutinin__InfluenzaA__AFK74965

SEQ ID NO: 201124 - RNA, 1701 nt, Artificial Sequence; identical to SEQ ID NO: 194832
  derived and/or modified CDS sequence (opt5) from hemagglutinin__InfluenzaA__AFK74975

SEQ ID NO: 201125 - RNA, 1701 nt, Artificial Sequence; identical to SEQ ID NO: 194741
  derived and/or modified CDS sequence (opt5) from hemagglutinin__InfluenzaA__AFK74985

SEQ ID NO: 201126 - RNA, 1701 nt, Artificial Sequence; identical to SEQ ID NO: 197296
  derived and/or modified CDS sequence (opt5) from hemagglutinin__InfluenzaA__AFK74995

SEQ ID NO: 201127 - RNA, 1701 nt, Artificial Sequence; identical to SEQ ID NO: 194741
  derived and/or modified CDS sequence (opt5) from hemagglutinin__InfluenzaA__AFK75005

SEQ ID NO: 201128 - RNA, 1701 nt, Artificial Sequence
  derived and/or modified CDS sequence (opt5) from hemagglutinin__InfluenzaA__AFK75015
augaaggccauccuggugguccuccuguacaccuucgcuacagccaacgcggacacgcuuugcauuggcuaucacgcuaauaacagcaccgauacaguugacaccgugcuggagaagaaugugacagucacccauuccgugaaccuccuggaagauaagcacaaugggaaacuuuguaagcugagaggaguugcuccccuccaucugggcaaaugcaacaucgccggguggauucugggaaauccugagugugaaucucucagcacagccuccucuuggagcuacaucguggagaccuccucuagcgacaacggcacgugcuauccgggggauuuuauugacuacgaagaacugcgggagcagcuuuccagcgucucuuccuucgaacgcuuugagaucuuccccaagaccagcucuuggccuaaucacgauuccaacaagggagugacagccgcuuguccccaugccggcgcgaaaucuuuuuauaagaaucugaucuggcucguuaaaaagggcaacagcuacccuaaacuguccaagagcuauauuaaugacaaggggaaagaagugcuuguccuguggggaauccaccaccccuccaccucugccgaucaacagagccucuaccagaacgcugacgccuacguguucgugggcacauccagauauagcaagaaauuuaagccugagauugcuauccggccgaaaguccgcgaucaggaggggagaaugaauuacuauuggacccugguugaacccggagacaagauuacguucgaggccacaggcaaccugguggugccucgguacgcguuugccauggaacgcaacgcugggucuggaaucauuaucuccgauacccccguccaugacugcaauacaaccugucaaaccccuaaaggcgccaucaacacaagccuccccuuccagaauauucacccgaucacgauuggcaagugcccuaaguaugugaaaucuaccaagcugagacuugcuacagggcugcggaacguucccagcauccagucccgcggacucuuuggcgccauugccggguucaucgagggaggcuggaccgggaugguggacggaugguacggcuaucaucaccagaaugaacaaggcucuggguacgcugcggaucugaaaagcacacagaacgccaucgacgagauuaccaauaaggucaacuccgugaucgagaaaaugaauacgcaguuuacagcuguuggaaaggaguucaaccaccuugagaagagaauugaaaaucugaacaaaaagguggaugacggcuuccucgauaucuggaccuacaaugccgagcugcugguccuccuggaaaacgagcggacccuugacuaucaugauagcaaugugaaaaaccuguacgagaagguccgcucucagcucaaaaacaaugccaaggaaauugggaacggauguuuugaguucuaucacaagugcgacaauacauguauggaauccgugaaaaacggcaccuacgauuauccuaaguacagcgaggaagcuaaacugaauagagaggagaucgacgggguuaaacuugaaucuacacggaucuaucaaauucuggccaucuacuccacgguggcgagcucccucguccuggugguuucucugggcgcuauuagcuuuuggaugugcuccaacggaucucuccagugccgcaucuguguguga

SEQ ID NO: 201129 - RNA, 1701 nt, Artificial Sequence; identical to SEQ ID NO: 194983
  derived and/or modified CDS sequence (opt5) from hemagglutinin__InfluenzaA__AFK75025

SEQ ID NO: 201130 - RNA, 1701 nt, Artificial Sequence; identical to SEQ ID NO: 194983
  derived and/or modified CDS sequence (opt5) from hemagglutinin__InfluenzaA__AFK75035

SEQ ID NO: 201131 - RNA, 1701 nt, Artificial Sequence; identical to SEQ ID NO: 194983
  derived and/or modified CDS sequence (opt5) from hemagglutinin__InfluenzaA__AFK75045

SEQ ID NO: 201132 - RNA, 1701 nt, Artificial Sequence; identical to SEQ ID NO: 194983
  derived and/or modified CDS sequence (opt5) from hemagglutinin__InfluenzaA__AFK75055

SEQ ID NO: 201133 - RNA, 1701 nt, Artificial Sequence; identical to SEQ ID NO: 194741
  derived and/or modified CDS sequence (opt5) from hemagglutinin__InfluenzaA__AFK75065

SEQ ID NO: 201134 - RNA, 1701 nt, Artificial Sequence; identical to SEQ ID NO: 194741
  derived and/or modified CDS sequence (opt5) from hemagglutinin__InfluenzaA__AFK75075

SEQ ID NO: 201135 - RNA, 1701 nt, Artificial Sequence; identical to SEQ ID NO: 195905
  derived and/or modified CDS sequence (opt5) from hemagglutinin__InfluenzaA__AFK75085

SEQ ID NO: 201136 - RNA, 1701 nt, Artificial Sequence; identical to SEQ ID NO: 195905
  derived and/or modified CDS sequence (opt5) from hemagglutinin__InfluenzaA__AFK75095

SEQ ID NO: 201137 - RNA, 1701 nt, Artificial Sequence; identical to SEQ ID NO: 194741
  derived and/or modified CDS sequence (opt5) from hemagglutinin__InfluenzaA__AFK75105

SEQ ID NO: 201138 - RNA, 1701 nt, Artificial Sequence; identical to SEQ ID NO: 194983
  derived and/or modified CDS sequence (opt5) from hemagglutinin__InfluenzaA__AFK77857

SEQ ID NO: 201139 - RNA, 1701 nt, Artificial Sequence; identical to SEQ ID NO: 194983
  derived and/or modified CDS sequence (opt5) from hemagglutinin__InfluenzaA__AFK77867

SEQ ID NO: 201140 - RNA, 1701 nt, Artificial Sequence; identical to SEQ ID NO: 200269
  derived and/or modified CDS sequence (opt5) from hemagglutinin__InfluenzaA__AFK77877

SEQ ID NO: 201141 - RNA, 1701 nt, Artificial Sequence; identical to SEQ ID NO: 194741
  derived and/or modified CDS sequence (opt5) from hemagglutinin__InfluenzaA__AFK77887

SEQ ID NO: 201142 - RNA, 1701 nt, Artificial Sequence
  derived and/or modified CDS sequence (opt5) from hemagglutinin__InfluenzaA__AFK77897
augaaggccauccuggugguccuccuguacaccuucgcuacagccaacgcggacacgcuuugcauuggcuaucacgcuaauaacagcaccgauacaguugacaccgugcuggagaaaaaugugacagucacccauuccaucaaccuccuggaagauaagcacaaugggaaacuuuguaagcugagaggaguggcuccccuccaucugggcaaaugcaacauugccggguggauccugggaaauccugagugugaaucucucagcacagccuccucuuggagcuacauuguugagaccuccucuagcgacaacggcacgugcuauccgggggauuuuaucaauuacgaagaacugcgggagcagcuuuccagcgugucuuccuucgaacgcuuugagaucuuccccaagaccagcucuuggccuaaccacgacuccaauaagggagucacagccgcuuguccccaugccggcgcgaaauccuuuuauaagaaccugauuuggcucgugaaaaagggcaauucuuacccuaaacuguccaagagcuauaucaacgauaaggggaaagaaguucuugugcuguggggcauucaccaccccuccaccucugccgaccaacagagccucuaccagaaugcugaugccuacgucuucgugggaacauccaaguauagcaaaaaguuuaaaccugagaucgcugugagaccgaagguccgggaccaggaggggcgcaugaacuacuauuggacccugguugaacccggagauaaaauuacguucgaggccacaggcaaccugcucgugccuagauacgcguuugccauggaacggaaugcugggucuggaaucauuaucuccgacacccccgugcaugauugcaacacaaccugucaaaccccuaagggcgccaucaauacaagccugcccuuccagaacauucacccgaucacgauuggcaagugcccuaaauaugucaagucuaccaaacuucgccuggcuacagggcucagaaaugugcccagcauccagucccggggacuguuuggcgccauugccggguucaucgagggaggcuggaccgggaugguugacggaugguacggcuaucaucaccagaacgaacaaggcucuggguacgcugcggaccuuaagagcacacagaaugccaucgauaaaauuaccaacaaggugaauagcgucaucgagaagaugaacacgcaguuuacagcugugggaaaagaguucaaucaccuggaaaagcgcauugagaaccucaauaaaaagguugacgauggcuuccuggacaucuggaccuacaacgccgaacugcucgugcugcuugagaaugaaagaacccuggauuaucaugacagcaacgucaaaaaccucuacgagaaggugcggucucagcugaagaauaacgccaaagagauugggaauggauguuuugaguucuaucacaagugcgauaacacauguauggaguccgucaaaaauggcaccuacgacuauccuaaguacagcgaagaggcuaaacuuaaccgcgaagagaucgauggggugaagcuggagucuacaagaaucuaucaaauucucgccaucuacuccacgguugcgagcucccuggugcuggucgugucucucggcgcuauuagcuuuuggaugugcuccaauggaucucugcagugccggaucuguauuuga

SEQ ID NO: 201143 - RNA, 1701 nt, Artificial Sequence; identical to SEQ ID NO: 199122
  derived and/or modified CDS sequence (opt5) from hemagglutinin__InfluenzaA__AFK78028

SEQ ID NO: 201144 - RNA, 1701 nt, Artificial Sequence; identical to SEQ ID NO: 194983
  derived and/or modified CDS sequence (opt5) from hemagglutinin__InfluenzaA__AFK78187

SEQ ID NO: 201145 - RNA, 1701 nt, Artificial Sequence; identical to SEQ ID NO: 198927
  derived and/or modified CDS sequence (opt5) from hemagglutinin__InfluenzaA__AFM45476

SEQ ID NO: 201146 - RNA, 1701 nt, Artificial Sequence
  derived and/or modified CDS sequence (opt5) from hemagglutinin__InfluenzaA__AFM45487
augaagaccaucauugcccugagcuacauccucugccugguguucgcucagaaacuucccggcaacgacaauuccacagccacgcugugucucgggcaccaugcggucccuaacggaaccauuguuaagacaaucaccaaugaucaaauugaggugacaaacgcuaccgaacuggugcagucuagcuccacaggcgagaucugcgacucuccgcaccagauccuugauggggaaaauuguacccugauugacgcccuccugggagauccccagugcgacggcuuucaaaacaaaaagugggaucuguucgucgagagaagcaaagccuauuccaauuguuacccuuaugacgugcccgauuacgcuucucuccggagccugguugccuccagcgggacgcuugaauuuaacaaugagucuuucaacuggaccggagugacacagaauggcaccuccagcgcuugcauccgcagaucuaacuccagcuuuuucucucggcugaauuggcucacacaucugaacuuuaaguauccugcccuuaaugucaccaugcccaacaacgagcaguucgacaagcuguacauuuggggcgugcaccauccugggacggauaaagaccagaucuuucucuaugcgcaauccagcggacgcauuacaguuuccaccaagagaucucagcaggccgugaucccgaauauuggcagccggccccgcaucagaaacaucccuucccggauuagcaucuacuggacaauugucaaacccggggauauccugcugauuaauucuaccggaaaccucaucgcuccucgcggcuacuucaagaucagauccgggaaaagcucuauuaugcggagcgacgcccccaucggaaaguguaauuccgaaugcauuaccccgaacggcucuaucccuaaugacaagcccuuucagaacgugaaucgcauuacauauggcgcuuguccuagauacgugaaacaaagcacgcugaagcuggccaccgggaugcggaacguccccgagaaacagacacgcggaaucuucggcgcgaucgccggguuuauugaaaauggaugggagggcaugguugaugggugguauggauucagacaccagaacuccgagggccggggccaagcugccgaccuuaagagcacccaggcugccaucgaucagauuaaugggaaacucaacagacugaucggaaagacaaaugaaaaauuccaccagauugagaaggaauuuucugagguggaaggccgcauccaagaccuugagaaguacguggaggauaccaaaauugaccugugguccuauaacgccgaacuccuggucgcucuggagaaccagcauacgaucgaucucacagacagcgaaaugaauaagcuguucgagaaaaccaagaaacagcuucgggaaaacgcggaggauauggggaauggaugcuuuaagaucuaccacaagugugacaacgccugcauuggcucuaucagaaaugggaccuauaaccaugauguguaccgcgacgaggcucugaauaaccgguuccagauuaaaggcguugaacucaaguccggauacaaagacuggauccuguggauuagcuuugccaucuccugcuuccuucuguguguggcccuccugggcuuuaucaugugggcuugccaaaaggggaauauuagauguaacaucugcauuuga

SEQ ID NO: 201147 - RNA, 1701 nt, Artificial Sequence; identical to SEQ ID NO: 198927
  derived and/or modified CDS sequence (opt5) from hemagglutinin__InfluenzaA__AFM45489

SEQ ID NO: 201148 - RNA, 1701 nt, Artificial Sequence; identical to SEQ ID NO: 201146
  derived and/or modified CDS sequence (opt5) from hemagglutinin__InfluenzaA__AFM45494

SEQ ID NO: 201149 - RNA, 1701 nt, Artificial Sequence
  derived and/or modified CDS sequence (opt5) from hemagglutinin__InfluenzaA__AFM68954
augaaggccagacugcucgugcugcuuugcgcucuggccgcgaccgacgcugauacaaucuguauuggcuaccacgccaacaauagcacggacaccgucgauacacuccuggagaaaaacguuaccgugacacauuccgugaaucuucuggaagacucucacaacgggaagcucugcaaacugaagggaaucgcuccccugcagcucggcaaauguaauauugccggguggcugcuuggaaacccugagugcgauagccugcucccggcccgguccuggucuuauaucgucgaaacccccaauagcgagaacggcgcuuguuacccuggggacuucauugauuaugaggaacugaaggagcaacuuuccucugugagcucccuggaacgcuuugagaucuuccccaaggaaagcucuuggccuaaucauaacacacucaaaggaguuaccgccuccugcagccacggcggcaagucuuccuuuuacagaaaucugcuguggcucacgaaaaccgaggacagcuaucccaagcugucuaacuccuacgugaauaacaaagggaaggagguccuugugcuguggggaguucaucacccuagcuccucugaugaacagcagagccucuaucacaaugugaacgcguacgucuccguggugagcucuaacuacaauggccgguucacaccggagaucgccgcucgccccaaggucagaaaccagccugggcggaugaauuauuacuggacccugcuugaacccggagacacaauuaucuuugaggccaccggcaaccugauugcuccuugguaugccuucgcgcucucccgcggguuuggaagcggcaucauuacgucuaaugccagcaugcaugaauguaacacaaaaugccaaacaccccagggcgcuaucaauuccucucugccguuccagaacauucacccuguuaccaucggggagugucccaaguacgugagaagcaccaaacugcggauggugaccggacuccgcaauaucccuuccauucaguuuagaggccuguucggggccaucgcuggauuuauugagggcggguggacaggaaugaucgauggcugguauggcuaccaucaccaaaacgaacaggggagcggauaugccgccgaccagaagucuacgcagaaugcuauuaacggcaucaccaauaaagucaacuccgugaucgagaagaugaauacacaauucaccgcgguuagcaaagaauuuaacaaccuugagaagcggauggaaaaucugaacaagaaaguggaugacggguuccucgacauuuggacauacaaugccgagcugcuuguccugcucgagaacgaacgcacccuggauuuccacgaccugaaugugaagaaccucuacgagaaaguuaagucucagcugaaaaauaacgcuaaggaaaucggaaauggcugcuuugaguucuaucauaagugugauaacaaaugcauggaauccgugagaaaugggacguacgacuaucccaaguacagcgaggaguccaaacuuaaccgggaaaagauugauggcgucaaacuggagucuaugggaguguaucagauccucgccauuuacagcacagucgccuccucucuggugcugcuuguuagccucggcgcuaucuccuuuuggaugugcagcaaugggucucugcaaugucgcaucugcauuuga

SEQ ID NO: 201150 - RNA, 1701 nt, Artificial Sequence
  derived and/or modified CDS sequence (opt5) from hemagglutinin__InfluenzaA__AFM68965
augaagaccaucauugcccugagcuacaucuucugccaggugcucgcucaaaaccugcccggcaaugacaacuccacagccacgcuuugucuggggcaccaugcggucccuaauggaacccucguuaaaacaauuaccaacgaucagaucgaggugacaaaugcuaccgaacuggugcagucuagcuccacaggcagaauuugcgacucuccgcaccggauccuugaugggaagaacuguacccugaucgacgcccuccugggagauccccauugcgacggcuuucagaaugagaaaugggaucuguucgucgaacgcagcaaggccuuuuccaacuguuauccuuacgacgugcccgauuaugcuucucucagaagccugguugccuccagcgggacgcuugaguucauuaaugaaggauuuaacuggaccggcgugacacaaaauggcgggucuuacgcuugcaaacggggaccugacaacuccuucuuuagccgccugaauuggcucuauaagucugaguccaccuaccccguccugaacgugacaaugccuaauaacgauaacuucgacaagcuguauaucuggggcguucaccauccgagcaccgauaaagagcagacgaaucuguacgugcaggccucugggagagucacaguguccaccaagcggagccagcaaacaauuauccccaacgugggaucccgcccuugggucagaggccucucuagcgggauuuccaucuacuggaccauuguuaaacccggagacauccugcugaucaauagcaacggcaaucucauugcgccucggggcuauuuuaagauccgcaccgggaaaucuuccauuaugagaagcgacgcccccaucggaacauguucuagcgaaugcauuacgccgaacggcuccaucccuaaugauaagcccuuccagaacgugaauaagaucaccuacggggcuuguccuaaauaugugaagcagaacacacugaaacuugccaccggaaugcggaauguccccgagaagcagacacgcggcauuuuuggggcuaaagccggauucaucgaaaacggcugggagggcaugauugacgggugguacggauuuagacaccaaaauucugagggcaccgggcaggcggccgaucugaaaagcacgcaggcugccaucgaccaaauuaacggaaaacucaaucgggugaucgaaaagacaaacgagaaguuccaccagaucgaaaaagaguucuccgaaguugagggccgcauucaggaucuggagaaguauguggaagacaccaaaaucgaucuuuggagcuacaacgcugagcugcucgucgcccuggaaaaucagcauaccauugaccugacagauucugagaugaacaagcucuuugaaaagaccagacggcaacugagagagaaugccgaggacauggggaacggcugcuucaagaucuaucacaagugugauaaugcuugcauuggauccauccgcaacggcacauacgaccaugacguguaccgggaugaagcgcuuaauaacagauuucagauuaaagggguugagcuuaagagcggauauaaagacuggauccucuggaucucuuucgccauuuccugcuuucugcuuugugugguccugcucggcuucaucaugugggcuugccagaaggggaauauucgcuguaacaucugcauuuga

SEQ ID NO: 201151 - RNA, 1701 nt, Artificial Sequence
  derived and/or modified CDS sequence (opt5) from hemagglutinin__InfluenzaA__AFM68987
augaagaccaucauugcccugagcuacaucuucugccucguguuugcucagaaccugcccggcaaugacaacuccacagccacgcuuugucuggggcaccaugcggucccuaauggaacccucguuaaaacaauuaccaacgaucaaaucgaggugacaaaugcuaccgaacuggugcagucuagcuccacaggcagaauuugcgacucuccgcaccggauccuugaugggaagaacuguacccugaucgacgcccuccugggagauccccauugcgacggcuuccagaaugagaaaugggaucuguuugucgaacgcagcaaggccuucuccaacuguuauccuuacgacgugcccgauuaugcuucucucagaagccugguugccuccagcgggacgcuugaguuuauuaaugaaggauucaacuggaccggcgugacacagucuggcggguccuacgcuugcaaacggggaagcgacaagucuuucuucucccgccugaauuggcucuaugagagcgagucuaaguacccuguccugaacgugaccaugcccaauaacggcaauuuugauaaacuuuauaucuggggaguucaccauccuuccacagacaaggaacaaaccaaccuguacgugagagccagcgggcgggucacgguguccacaaaacgcucucagcagaccgugauuccgaacaucggcagcagacccuggguccgggggcucuccagccgcauuucuaucuacuggacaauuguuaagccuggagauauccugcugaucaauuccaacggcaaucucauugcgcccagaggcuauuucaaaauccggaccgggaaguccucuauuaugcgcagcgacgccccuaucggaaccuguuccucugagugcauuacacccaacggcagcaucccgaaugacaagccuuuucagaacgugaauaaaaucacguacggggcuugucccaaguaugugaaacaaaacacccugaagcuggccacaggaaugagaaaugucccugaaaaacagacccggggcauuuucggggcuaucgccggauuuauugagaacggcugggagggcaugguggaugggugguacggauuccgccaccagaauagcgaaggcacagggcaggcggccgaccuuaagagcacccaagcugccaucgaucagauuaacggaaaacucaauagaguuaucgagaagacgaacgaaaaguuccaccagaucgagaaagaauuuucugagguggagggccggauucaagaccuggaaaaguaugucgaggauacaaaaaucgaccuuugguccuacaaugcugaacugcucguggcccuggagaaccagcauaccauugaucugaccgacagcgaaaugaacaagcucuuugagaaaacaagacgccagcugcgggagaaugccgaagauauggggaacggcugcuuuaagaucuaucacaagugugacaaugcuugcauuggaucuaucagaaacggcaccuacgaucaugacguuuaccgcgacgaggcgcuuaauaaccgguuccagauuaaagggguggaacugaaguccggauauaaagauuggauccucuggaucagcuuugccauuuccugcuuccugcuuugugucgugcugcucggcuuuaucaugugggcuugccaaaaggggaauauuagauguaacaucugcauuuga

SEQ ID NO: 201152 - RNA, 1701 nt, Artificial Sequence
  derived and/or modified CDS sequence (opt5) from hemagglutinin__InfluenzaA__AFM71720
augaagaccaucauugcccugagcuacaucuucugccucguguuugcucagaaacugcccggcaacgacaauuccacagccacgcuuugucuggggcaccaugcggucccuaacggaacccucguuaagacaauuaccaaugaucaaaucgaggugacaaacgcuaccgaacuggugcagucuagcuccacaggcagaauuugcgacucuccgcaccggauccuugaugggaaaaauuguacccugaucgacgcccuccugggagauccccauugcgacggcuuccagaacgagaagugggaucuguuugucgaacgcagcaaagccuauuccaauuguuacccuuaugacgugcccgauuacgcuucucucagaagccugguugccuccagcgggacgcuugaguucauuaacgaagacuuuaauuggaccggagugacacagucuggcggcuccuaugcuugcaagcgggggagcgucaacucuuucuuuucccgccugaauuggcuccacgagagcgaguacaaguauccugcccugaacguggcgaugcccaauaacggaaaauucgauaagcuguacaucuggggcguucaucacccuauuaccgacagagaacaaacaaaucuguacgugcgggccucugggcgcgucaccguguccacgaaaagaagccagcagacagugaucccgaacauuggaucccggcccuggguccgcggccucucuagcagaaucuccauuuauuggaccaucguuaagccuggggauauccuguuuauuaacagcacaggaaaucugaucgcuccccggggcuacuucaaaauucgcaccggcaagucuuccaucaugagaagcgacgccccuauugggaccuguucuagcgagugcaucacacccaacggauccaucccgaaugacaagccuuuucagaacgugaauaaaauuacguauggcgcuuguccccgguacgugaagcaaaacacccucaaacuggccacagggaugcgcaaugucccugaaaagcagaccagaggaaucuucggcgcgauugccggguuuaucgagaacggaugggagggcaugguggauggcugguauggguuccggcaccaaaauucugaaggaacaggccaggcugccgaccuuaaaagcacccaggcugccauugaucagaucaacgggaagcugaauagacucaucgagaaaacgaacgaaaaguuccaucagauugagaaggaauuuuccgagguugagggacgcauccaagaccuggaaaaauacguggaggauacaaagauugaccuuuggagcuauaaugccgaacugcucgucgcucuggagaaccagcacaccaucgaucugaccgacucugaaaugaauaaacucuucgagaagacacggaaacagcugagagagaacgcggaagauaugggcaacgggugcuuuaagauuuaccauaagugugacaaugccugcaucggcuccauucgcaacggaaccuacgaucacgacguguaucgggacgaggcucuuaauaacagauuccagaucaaaggcguugaacuuaagagcggguacaaagauuggauccucuggauuucuuuugccaucuccugcuuccugcuuugugugguccugcucggauuuauuaugugggccugccaaaagggcaauauccgcuguaacauuugcaucuga

SEQ ID NO: 201153 - RNA, 1701 nt, Artificial Sequence
  derived and/or modified CDS sequence (opt5) from hemagglutinin__InfluenzaA__AFM71731
augaagaccaucauugcccugagcuacauccucugccugguguucgcucagaaacuucccggcaacgacaauuccacagccacgcugugucucgggcaccaugcggucccuaacggaacccugguuaagacaauuaccaaugaucaaaucgaggugacaaacgcuaccgaacuugugcagucuagcuccacaggcagaauuugcgacucuccgcaccggauccuggaugggaaaaauuguacccucaucgacgcccugcugggagauccccauugcgacggcuuucagaacaaggagugggaucucuucgucgaacgcagcaaagccuauuccaauuguuacccuuaugacgugcccgauuacgcuucucugagaagccuuguugccuccagcgggacgcuggaguuuauuaacgaagacuucaauuggaccggaguggcucagucuggcgaguccuaugccugcaagcggggcagcgucaagucuuucuucucccgccucaacuggcugcacaaaagcgaguacaaguauccugcgcuuaaugugacaaugcccaacaaugggaaauuugauaagcuguacaucuggggaguucaucacccuucuaccgacagagaacaaacaaaccucuacgugcgggccuccggccgcgucaccgugagcacgaaaagaucccagcagacagugauuccgaauaucgggucucggcccuggguccgcggacugagcuccagaauuagcaucuauuggaccauuguuaagccuggcgauauccugcucaucaacucuacagggaaccugauugcuccccggggauacuucaagauccgcaccggcaaauccagcauuaugagaucugacgccccuaucggcaccuguagcuccgagugcauuacacccaaugggucuaucccgaacgacaagccuuuucagaaugugaaccggaucacguauggagcuuguccccgcuacgugaaacaaaauacccuuaagcuggccacaggcaugagaaacgucccugaaaaacagacccgggggauuuucggagcgaucgccggcuuuauugagaaugggugggagggaaugguggauggcugguauggcuucagacaccagaacagcgaagggacaggacaggcugccgaccucaaguccacccaagcugccaucgaucagauuaauggcaaacugaaccgccuuaucgagaagacgaaugaaaaguuucaucagaucgagaaagaauuuagcgagguugaggggcggauucaagaccuggaaaaguacguggaggauacaaaaaucgaccucuggucuuauaacgccgaacugcuggucgcucucgagaaucagcacaccauugaucugaccgacuccgaaaugaacaaacuuuucgagaagacaagaaagcagcugcgcgagaaugcggaagauaugggaaacggcugcuuuaagaucuaccauaaaugugacaacgccugcauugggagcauccggaauggcaccuacgaucacgacguguauagagacgaggcucucaacaaucgcuuccagauuaagggaguugaacugaaaucuggcuacaaggauuggauccuuuggaucuccuuugccauuagcugcuuccugcucugugugguccugcugggguuuaucaugugggccugccaaaaaggaaacauucgguguaauaucugcauuuga

SEQ ID NO: 201154 - RNA, 1701 nt, Artificial Sequence
  derived and/or modified CDS sequence (opt5) from hemagglutinin__InfluenzaA__AFM71754
augaagaccaucauugcccugagcuacauccucugccugguguucgcucagaaacuucccggcaacgacaauuccacagccacgcugugucucgggcaccaugcggucccuaacggaaccauuguuaagacaaucaccaaugaucaaauugaggugacaaacgcuaccgaacuggugcagucuagcuccacaggcgagaucugcgacucuccgcaccagauccuugaugggaaaaauuguacccugauugacgcccuccugggagauccccagugcgacggcuuucaaaacaagaaaugggaucuguucgucgaaagaagcaaggccuauuccaauuguuacccuuaugacgugcccgauuacgcuucucuccggagccugguugccuccagcgggacgcuugaguuuaacaaugaaucuuucaacuggaccggagugacacagaauggcaccuccagcgcuugcauccgcagaucuaagaacuccuuuuucagccggcugaauuggcucacacaucugaacuuuaaauauccugcccuuaaugucaccaugcccaacaacgagcaguucgacaagcuguacauuuggggcgugcaccauccugggacggauaaagaccagaucuuuccguaugcgcaagccucuggacgcauuacaguuuccaccaagagaagccagcagacagcuauccccaauauuggcucccggccucgcgugagaaacauccccucucggaucagcauuuacuggaccaucgucaaaccuggggauauucuccugaucaauuccaccggaaaccugauugcuccccgcggcuacuucaagaucagaagcgggaagucuuccaucaugcggagcgacgccccgauuggaaaauguaauucugagugcaucacaccuaacggcagcauucccaaugacaagccuuuucagaacgugaaucgcaucacguauggcgccugucccagauacgugaaacaaaacacccucaagcuggcgacagggaugcggaauguccccgaaaaacagacccgcggaauuuucggcgccaucgcuggguuuaucgagaacggaugggaaggcaugguugaugggugguauggauucagacaccaaaauuccgagggccggggccaggccgcugaccuuaagucuacacaggccgccauugaucagaucaacgggaaacugaauagacucauuggaaagaccaacgagaaguuccaccagaucgaaaaagaguuuagcgaaguggagggccgcauucaagaccuggaaaaguacguggaggauacgaaaaucgaccuuugguccuauaacgcugagcugcucgucgcgcuggaaaaucagcauacaauugaucugaccgacagcgagaugaacaaacucuucgaaaagaccaagaagcagcugcgggagaaugccgaagauauggggaacggaugcuuuaaaaucuaccacaagugugacaaugcuugcaucggcucuauuagaaacgggacauaugcccaugauguguaccgcgacgaggcccuuaauaaccgguuccagaucaaaggcguugagcugaaguccggauacaaagacuggauucucuggaucagcuuugcuauuucuugcuuccugcuuuguguggcccugcucggcuuuaucaugugggcgugccaaaaggggaauaucagauguaacauuugcaucuga

SEQ ID NO: 201155 - RNA, 1701 nt, Artificial Sequence
  derived and/or modified CDS sequence (opt5) from hemagglutinin__InfluenzaA__AFM71768
augaagaccaucauugcccugagcuacauccucugccugguguucgcucagaaacuucccggcaacgacaauuccacagccacgcugugucucgggcaccaugcggucccuaacggaaccauuguuaagacaaucaccaaugaucaaauugaggugacaaacgcuaccgaacuggugcagucuagcuccacaggcgagaucugcgacucuccgcaccagauccuugaugggaaaaauuguacccugauugacgcccuccugggagauccccagugcgacgauuuucaaaacaagaaaugggaccuguucgucgaaagaagcaaggccuauuccaauuguuacccuuaugaugugcccgacuacgcuucucuccggagccugguugccuccagcggcacgcuugaguuuaacaaugaaucuuucaacuggaccggggugacacagaauggaaccuccagcgcuugcauccgcagaucuaagaacuccuuuuucagccggcugaauuggcucacacaucugaacuuuaaauauccugcccuuaaugucaccaugcccaacaacgagcaguucgauaagcuguacauuuggggcgugcaccauccuggcacggacaaagaucagaucuuuccguaugcgcaagccucugggcgcauuacaguuuccaccaagagaagccagcagacagcuauccccaauauuggaucccggccucgcgugagaaacauccccucucggaucagcauuuacuggaccaucgucaaaccuggcgacauucuccugaucaauuccaccgggaaccugauugcuccccgcggauacuucaagaucagaagcggcaagucuuccaucaugcggagcgacgccccgauugggaaauguaauucugagugcaucacaccuaacggaagcauucccaaugauaagccuuuucagaacgugaaucgcaucacguauggcgccugucccagauacgugaaacaaaacacccucaagcuggcgacaggcaugcggaauguccccgaaaaacagacccgcgggauuuucggagccaucgcuggcuuuaucgagaacgggugggaaggaaugguugacggcugguauggguucagacaccaaaauuccgagggacggggccaggccgcugaucuuaagucuacacaggccgccauugaccagaucaacggcaaacugaauagacucauugggaagaccaacgagaaguuccaccagaucgaaaaagaguuuagcgaaguggagggacgcauucaagaucuggaaaaguacguggaggacacgaaaaucgaucuuugguccuauaacgcugagcugcucgucgcgcuggaaaaucagcauacaauugaccugaccgauagcgagaugaacaaacucuucgaaaagaccaagaagcagcugcgggagaaugccgaagacaugggcaacgggugcuuuaaaaucuaccacaagugugauaaugcuugcaucggaucuauuagaaacggcacauaugcccaugacguguaccgcgacgaggcccuuaauaaccgguuccagaucaaagggguugagcugaaguccggcuacaaagauuggauucucuggaucagcuuugcuauuucuugcuuccugcuuuguguggcccugcucggauuuaucaugugggcgugccaaaagggcaauaucagauguaacauuugcaucuga

SEQ ID NO: 201156 - RNA, 1701 nt, Artificial Sequence
  derived and/or modified CDS sequence (opt5) from hemagglutinin__InfluenzaA__AFM71791
augaagaccaucauugcccugagcuacacacucugccugguguucgcucagaaacuucccggcaacgacaauuccacggccacccugugucucgggcaccaugcggucccuaacggaacaaucguuaagaccauuacaaaugaucaaaucgaggugaccaacgcuacagaacuggugcagucuagcuccaccggcgagauuugcgacucuccgcaccagauccuugaugggaaaaauuguacgcugaucgacgcccuccugggagauccccagugcgacggcuuucaaaacaagaaaugggaucuguucgucgaaagaagcaaggccuauuccaauuguuacccuuaugacgugcccgauuacgcuucucuccggagccugguugccuccagcgggacccuugaguuuaacaaugaaucuuucaacuggacaggagugacccagaauggcacauccagcgcuugcauucgcagaucuaagaacuccuuuuucagccggcugaauuggcucacccaucugaacuuuaaauauccugcccuuaaugucacgaugcccaacaacgagcaguucgacaagcuguacaucuggggcgugcaccauccugggacagauaaagaccagauuuuuccguaugcgcaagccucuggacgcaucaccguuuccacaaagagaagccagcagaccgugauucccaauaucggcucccggccucgcgucagaaacauucccucucggaucagcaucuacuggaccauugugaaaccuggggauauccuccugauuaauuccacaggaaaccugaucgcuccccgcggcuacuucaagauuagaagcgggaagucuuccaucaugcggagcgacgccccgaucggaaaauguaauucugagugcauuacgccuaacggcagcauccccaaugacaagccuuuucagaacgugaaucgcauuaccuauggcgcuugucccagauacgucaaacaaaacacacucaagcuggccaccgggaugcggaauguucccgaaaaacagacacgcggaaucuucggcgcgauugccggguuuaucgagaacggaugggaaggcaugguggaugggugguauggauucagacaccaaaauuccgagggccggggccaggcugccgaccuuaagucuacccaggcugccaucgaucagauuaacgggaaacugaauagacucaucggaaagacgaacgagaaguuccaccagauugaaaaagaguuuagcgaaguggagggccgcauccaagaccuggaaaaguacgucgaggauacaaaaauugaccuuugguccuauaacgccgagcugcucguggcucuggaaaaucagcauaccaucgagcugaccgauagcgaaaugaacaaacucuucgagaagacaaagaagcagcugcgggaaaaugcggaggacauggggaacggaugcuuuaaaauuuaccacaagugugauaaugccugcaucggcucuaucagaaacgggaccuaugaccaugauguuuaccgcgacgaggcucuuaauaaccgguuccagauuaaaggcguggaacugaaguccggauacaaagacuggauccucuggauuagcuuugccaucucuugcuuccugcuuugugucgcccugcucggcuuuauuaugugggcuugccaaaaggggaauaucagauguaacaucugcauuuga

SEQ ID NO: 201157 - RNA, 1701 nt, Artificial Sequence
  derived and/or modified CDS sequence (opt5) from hemagglutinin__InfluenzaA__AFM71824
augaagaccaucauugcccugagcuacauccucugccugguguucgcucagaaacuucccggcaacgacaauuccacagccacgcugugucucgggcaccaugcggucccuaacggaaccauuguuaagacaaucaccaaugaucaaauugaggugacaaacgcuaccgaacuggugcagucuagcuccacaggcgagaucugcgacucuccgcaccagauccuugaugggaaaaauuguacccugauugacgcccuccugggagauccccagugcgacggcuuucaaaacaagaaaugggaucuguucgucgaaagaagcaaggccuauuccaauuguuacccuuaugacgugcccgauuacgcuucucuccggagccugguugccuccagcgggacgcuugaguuuaacaaugaaucuuucaacuggaccggagugacacaggacggcaccuccagcgcuugcauccgcagaucuaaaaauuccuuuuucagccggcugaacuggcucacacaucugaauuuuaaauauccugcccuuaacgucaccaugcccaauaacgagcaguucgauaagcuguacauuuggggcgugcaccauccugggacggacaaagaucagaucuuuccguaugcgcaagccucuggacgcauuacaguuuccaccaagagaagccagcagacagcuauccccaacauuggcucccggccucgcgugagaaauauccccucucggaucagcauuuacuggaccaucgucaaaccuggggacauucuccugaucaacuccaccggaaaucugauugcuccccgcggcuacuucaagaucagaagcgggaagucuuccaucaugcggagcgacgccccgauuggaaaauguaacucugagugcaucacaccuaauggcagcauucccaacgauaagccuuuucagaaugugaaccgcaucacguauggcgccugucccagauacgugaaacaaaauacccucaagcuggcgacagggaugcggaacguccccgaaaaacagacccgcggaauuuucggcgccaucgcuggguuuaucgagaauggaugggaaggcaugguugacgggugguauggauucagacaccagaacuccgagggccggggccaagccgcugaucuuaagucuacacaggccgccauugaccagaucaaugggaaacugaacagacucauuggaaagaccaaugagaaguuccaccagaucgaaaaagaguuuagcgaaguggagggccgcauucaagaucuggaaaaguacguggaggacacgaaaaucgaucuuugguccuauaacgcugagcugcucgucgcgcuggaaaaccagcauacaauugaccugaccgauagcgagaugaauaaacucuucgaaaagaccaagaagcagcugcgggagaacgccgaagacauggggaauggaugcuuuaagaucuaccacaagugugauaacgcuugcaucggcucuauuagaaaugggacauaugaccaugacguguaccgcgaugaggcccuuaacaaucgguuccagaucaaaggcguugagcugaaguccggauacaaagacuggauucucuggaucagcuuugccauuucuugcuuccugcuuuguguggcucugcucggcuuuaucaugugggccugccaaaaggggaacaucagauguaauauuugcaucuga

SEQ ID NO: 201158 - RNA, 1701 nt, Artificial Sequence
  derived and/or modified CDS sequence (opt5) from hemagglutinin__InfluenzaA__AFM71835
augaagaccaucauugcccugagcuacauccucugccugguguucgcucagaaacuucccggcaacgacaauuccacagccacgcugugucucgggcaccaugcggucccuaacggaaccauuguuaagacaaucaccaaugaucaaauugaggugacaaacgcuaccgaacuggugcagucuagcuccacaggcgagaucugcgacucuccgcaccagauccuugauggggaaaauuguacccugauugacgcccuccugggagauccccagugcgacggcuuucaaaacaaaaagugggaucuguucgucgagagaagcaaagccuauuccucuuguuacccuuaugacgugcccgauuacgcuagccuccggucccugguugccagcucugggacgcuugaauuuaauuccgagagcuucaacuggaccggagugacacagaauggcaccucuuccgcuugcauccgcagaagcuauaacucuuucuucucccggcugaauuggcucacacaucugaacuuuaaguacccugcccuuaaugucaccaugcccaacaaugagcaguucgacaagcuguauauuuggggcgugcaccauccugggacggauaaagaccagaucuuuccguacgcgcaagccagcggacgcauuacaguuuccaccaagagaucucagcaggcugugauccccaacauuggcagccggccucgcgucagaaacauccccucccggaucagcauuuacuggacaaucgugaaaccuggggauauucuccugaucaauucuaccggaaaccugauugcuccccgcggcuauuucaagaucagauccgggaaaagcucuaucaugcggagcgacgccccgauuggaaaguguaauuccgaaugcaucaccccuaacggcucuauucccaaugacaagccuuuucagaacgugaaucgcaucacauacggcgccugucccagauauauuaaacaaagcacgcucaagcuggcgaccgggaugcggaacguccccgagaaacagacacgcggaaucuucggcgccaucgcuggguuuauugaaaauggaugggagggcaugguugaugggugguacggauucagacaccagaacuccgagggccggggccaagccgcugaccuuaagagcacccaggccgccaucgaucagauuaaugggaaacugaacagacucaucggaaagacaaaugaaaaauuccaccagauugagaaggaauuuucugagguggaaggccgcauccaagaccuggagaaguauguggaggauaccaaaauugaccuuugguccuacaacgcugaacugcucgucgcgcuggagaaucagcauacgaucgaucugacagacagcgaaaugaacaagcucuuugagaaaaccaagaaacagcugcgggaaaacgccgaggauauggggaauggaugcuuuaagaucuaucacaagugugacaacgcuugcauuggcucuaucagaaaugggaccuacgaucaugacguguaccgcgacgaggcccuuaacaaucgguuccagauuaaaggcguugaacugaaguccggauauaaagauuggauccucuggauuagccuggccaucuccugcuuucuucuguguguggcucuccugggcuucaucaugugggccugccaaaaggggaacauuagauguaauaucugcauuuga

SEQ ID NO: 201159 - RNA, 1698 nt, Artificial Sequence
  derived and/or modified CDS sequence (opt5) from hemagglutinin__InfluenzaA__AFM71846
augaaggccaaccugcucgugcugcuuugcgcucuggccgcggcugacgccgauaccaucuguauuggcuaccacgccaauaacagcacagacacggucgauaccguucucgagaaaaaugugacagugacccauuccgucaaccugcuugaagacucucacaaugggaagcugugcagacucaaaggaaucgcuccccugcagcugggcaaguguaacauugccggguggcuccugggaaauccugagugcgauccgcuucugcccgugcggagcugguccuauaucguugaaacaccuaacucugagaauggcauuuguuaccccggggacuucaucgauuaugaagaacuccgcgagcaacugagcuccgugucuagcuuugaaagauucgagaucuuuccuaaagaauccagcuggcccaaccauaauaccaacggagucacagcugccugcucucacgagggcaaguccagcuucuaccggaaucuucuguggcucaccgagaaggaaggcucuuauccuaaacugaagaacuccuacgugaauaaaaaggggaaagagguucuggugcucuggggcauucaucacccgagcaacucuaaggaacagcagaaccuguaucagaaugagaacgcguacgucuccguggugacgagcaauuacaaccgcagauuuacccccgaaaucgccgagcggccuaagguccgcgaccaagcuggaagaaugaauuauuacuggacacuucugaaacccggggauaccauuaucuucgaggccaacggaaaucucauugcuccuauguaugccuuugcgcugucccggggcuucgggucuggaaucauuacaagcaacgccuccaugcacgaauguaauaccaagugccagacgccccuuggcgcuaucaacagcucucugccguaccagaauauccauccuguuacaauuggcgagugucccaaauaugugcgcuccgccaagcucagaauggugaccgggcugcggaacaucccuagcauucagucucgcggacuguuuggcgcuaucgccggguucauugaaggaggcuggacagggaugaucgacggaugguacggcuaucaccaucaaaaugagcagggcagcggguacgccgcugaucagaaauccacccagaacgcgaucaauggaauuaccaacaaggucaacacagugaucgagaaaaugaauauucaauuuacggccguuggcaaggaguucaacaagcucgagaaaagaauggaaaaucugaacaagaaaguggacgauggguuucuugacaucuggaccuacaaugcugagcugcucguccugcuugaaaacgagcggacacuggacuuccacgauucuaaugugaagaaccucuaugaaaaaguuaagagccagcugaagaauaacgccaaagagauuggaaauggcugcuucgaguuuuaccacaagugugacaacgaaugcauggaguccgugcgcaaugggaccuaugauuaccccaaauauagcgaagagucuaagcugaacagagagaaagucgacggcgugaagcucgaauccaugggaaucuaccagauccuggccauuuauagcacagucgcuucuucccuugugcugcucguuagccugggcgccaucuccuucuggaugugcucuaaugggagccugcaaugucggauuugcaucuga

SEQ ID NO: 201160 - RNA, 1701 nt, Artificial Sequence; identical to SEQ ID NO: 194390
  derived and/or modified CDS sequence (opt5) from hemagglutinin__InfluenzaA__AFM71857

SEQ ID NO: 201161 - RNA, 1701 nt, Artificial Sequence
  derived and/or modified CDS sequence (opt5) from hemagglutinin__InfluenzaA__AFM71868
augaagaccaucauugcccugagcuacauccucugccugguguucgcucagaaacuucccggcaacgacaauuccacagccacgcugugucucgggcaccaugcggucccuaacggaaccauuguuaagacaaucaccaaugaucaaauugaggugacaaacgcuaccgaacuggugcagucuagcuccacaggcgggaucugcgacucuccgcaccagauccuugauggagagaauuguacccugauugacgcccuccugggcgauccccagugcgacggguuucaaaacaaaaagugggaucuguucgucgaaagaagcaaagccuauuccaauuguuacccuuaugacgugcccgauuacgcuucucuccggagccugguugccuccagcggaacgcuugaguuuaacaaugaaucuuucaacuggaccggcgugacacagaauggcaccuccagcucuugcaagcgcagauccaacaauagcuuuuucucucggcugaacuggcucacacaucugaaguuuaaauauccugcucuuaaugucaccaugcccaacaacgagaaguucgacaaacuguacaucuggggagugcaccauccuguuacggauaaugaccagauucgccucuaugcccaggcguccgggagaaucacagugagcaccaagcggucccaacagacagucauuccgaacaucggcucucgccccagagugcgggauauuccuagccgcaucuccaucuacuggaccauugugaaacccggggacauccugcugauuaauagcaccggaaaccucaucgccccuagaggcuacuuuaagauucggucugggaaguccagcaucaugcgcucugacgcucccaucggaaaauguaauagcgagugcauuacaccgaacggcuccaucccuaaugauaagcccuuccagaacgucaauagaauuacguauggcgccuguccucgguacguuaaacagaacacccugaagcuggcuacagggaugcgcaaugugcccgaaaaacaaaccagaggaaucuuuggcgccauugcgggguucaucgagaacggaugggaaggcaugguggacgggugguauggauuucggcaccaaaauucugagggcaucggccaggccgcugaucuuaagagcacacaggccgcuauuaaccagaucaaugggaaacucaacagacugauuggaaagaccaacgagaaguuccaccagaucgaaaaagaguucuccgaagucgagggccgcauucaggaccuugaaaaguacguggaggauacgaaaaucgaccuguggagcuauaaugccgagcuccugguugcccuggaaaaccaacauacaauugaucucaccgacucugagaugaauaagcuguuugaacggaccaaaaagcagcuuagagagaacgcugaagauauggggaauggaugcuucaagaucuaccacaaaugugacaacgcgugcaucggcuccauucgcaaugggacauaugaucaugacguguaccgggacgaggcccugaacaauagauuucagaucaagggcgucgagcucaaaagcggauacaaggauuggauucuguggaucucuuucgcuauuuccugcuuucuucugugugugguucuccugggcuucaucaugugggccugccagaaagggaacauccgcuguaauauuugcaucuga

SEQ ID NO: 201162 - RNA, 1701 nt, Artificial Sequence; identical to SEQ ID NO: 199070
  derived and/or modified CDS sequence (opt5) from hemagglutinin__InfluenzaA__AFM71879

SEQ ID NO: 201163 - RNA, 1701 nt, Artificial Sequence
  derived and/or modified CDS sequence (opt5) from hemagglutinin__InfluenzaA__AFM71890
augaaggccagacugcucgugcugcuuugcgcucuggccgcgaccgacgcugauacaaucuguauuggcuaccacgccaacaauagcacggacaccgucgauacacuccuggagaaaaacguuaccgugacacauuccgugaaucuucuggaagacucucacaacgggaagcucugcaaacugaagggaaucgcuccccugcagcucggcaaauguaauauugccggguggcugcuuggaaacccugagugcgauagccugcucccggcccgguccuggucuuauaucgucgaaacccccaauagcgagaacggcgcuuguuacccuggggacuucauugauuaugaggaacugaaggagcaacuuuccucugugagcucccuggaacgcuuugagaucuuccccaaggaaagcucuuggccuaaucauaacacacucaaaggaguuaccgccuccugcagccacggcggcaagucuuccuuuuacagaaaucugcuguggcucacgaaaaccgaggacagcuaucccaagcugucuaacuccuacgugaauaacaaagggaaggagguccuugugcuguggggaguucaucacccuagcuccucugaugaacagcagagccucuaucacaaugugaacgcguacgucuccguggugagcucuaacuacaaucggcgcuucacaccggagaucgccgcuagacccaagguccggaaccagccuggccgcaugaauuauuacuggacccugcuugaacccggggacacaauuaucuuugaggccaccggaaaccugauugcuccuugguaugccuucgcgcucuccagaggcuuugggagcggaaucauuacgucuaaugccagcaugcaugaauguaacacaaaaugccaaacaccccagggcgcuaucaauuccucucugccguuccagaacauucacccuguuaccaucggcgagugucccaaguacgugcggagcaccaaacugcgcauggugaccgggcucagaaauaucccuuccauucaguuucggggacuguucggcgccaucgcuggguuuauugagggaggcuggacagggaugaucgauggaugguauggcuaccaucaccaaaacgaacagggcagcggguaugccgccgaccagaagucuacgcagaaugcuauuaacggaaucaccaauaaagucaacuccgugaucgagaagaugaauacacaauucaccgcgguuagcaaagaauuuaacaaccuugagaagcgcauggaaaaucugaacaagaaaguggaugacggcuuccucgacauuuggacauacaaugccgagcugcuuguccugcucgagaacgaaagaacccuggauuuccacgaccugaaugugaagaaccucuacgagaaaguuaagucucagcugaaaaauaacgcuaaggaaaucgggaauggaugcuuugaguucuaucauaagugugauaacaaaugcauggaauccgugcggaauggcacguacgacuaucccaaguacagcgaggaguccaaacuuaaccgcgaaaagauugauggggucaaacuggagucuaugggcguguaucagauccucgccauuuacagcacagucgccuccucucuggugcugcuuguuagccucggagcuaucuccuuuuggaugugcagcaauggcucucugcaauguagaaucugcauuuga

SEQ ID NO: 201164 - RNA, 1701 nt, Artificial Sequence; identical to SEQ ID NO: 201149
  derived and/or modified CDS sequence (opt5) from hemagglutinin__InfluenzaA__AFM71901

SEQ ID NO: 201165 - RNA, 1701 nt, Artificial Sequence
  derived and/or modified CDS sequence (opt5) from hemagglutinin__InfluenzaA__AFM71923
augaagaccaucauugcccugagcuacaucuucugccucgugcugggccaggaccuucccgggaacgauaauuccacagcuacgcugugucucggacaccaugccgucccuaacggcacccugguuaaaacaauuaccaaugaccaaaucgaggugacaaacgcgaccgaacuugugcagucuagcuccacagggaagauuugcaauaacccgcacagaauccuggauggaaucgacuguacccucauugaugcucugcugggcgacccccauugcgauucuuuucagaaugagacgugggaccucuucgucgaacggagcaaagccuuuuccaacuguuauccuuacgaugugcccgacuaugccucucugcgcagccuuguugcuuccagcgggacccuggaguucaucaaugaaggauuuacauggaccggcgugacacagaacggcgggucuaaugccugcaagagaggaccugauuccggcuucuuuagccggcucaacuggcuguacaaaucuggguccaccuaucccguccuuaaugugacgaugccuaacaaugacaacuucgauaagcuguacauuuggggaguucaccauccgagcacaaaccaagagcagaccucucucuaugugcaggcuuccggccgcgucacagugagcaccaagagaucccagcaaaccaucauucccaauaucgggucucggccuugggugcgcggacugagcuccagaauuagcaucuacuggacaaucgucaaacccggcgacauucugguuaucaacucuaauggcaaccucauugccccucggggguacuuuaagaugcgcacgggaaaauccagcaucaugagaucugacgcgcccauuggcaccuguaucagcgagugcaucacaccgaauggguccauuccuaacgauaagcccuuccagaaugugaacaaaaucaccuauggagccuguccuaaguacgugaagcagaauacacugaaacuugcuaccggcaugcggaacguccccgaaaagcagacgcgcgggcuguuuggagccauugcuggcuucaucgagaauggcugggaagggaugauugacggaugguauggcuuuagacaccaaaacucugaggggacaggacaggccgcggaucucaaaagcacccaggccgcuaucgaccaaaucaauggcaagcugaaccgggugauugagaaaaccaaugaaaaguuccaccagaucgagaaagaguucuccgaaguugaagggcgcauucaggaucuugagaaguacguggaggacacaaagaucgaucuguggagcuauaacgccgaacuccuggucgcucuggagaaccagcauaccauugaccucacagauucugaaaugaauaaacuguuugagaagacgagacggcaacuuagagaaaacgccgaggacaugggcaauggaugcuuccgcaucuaccacaaaugugauaacgccugcauuggcuccauccggaaugggaccuaugaccaugacguguacagagaugaggcucugaacaaucgcuuucagaucaagggaguugaacucaaaagcggcuacaaggacuggauucuguggaucucuuucgcgauuuccugcuuucuucugugugugguccuccugggguucaucaugugggccugccagaagggaaacauucgguguaauaucugcaucuga

SEQ ID NO: 201166 - RNA, 1701 nt, Artificial Sequence
  derived and/or modified CDS sequence (opt5) from hemagglutinin__InfluenzaA__AFM71934
augaagaccaucauugcccugagcuacaucuucugccucgugcugggccaggaccuucccgggaacgauaauuccacagcuacgcugugucucggacaccaugccgucccuaacggcacccugguuaaaacaauuaccaaugaccaaaucgaggugacaaacgcgaccgaacuugugcagucuagcuccacagggaagauuugcaauaacccgcacagaauccuggauggaaucgacuguacccucauugaugcucugcugggcgacccccauugcgauggguuucagaaugagacgugggaccucuucgucgaacggucuaaagccuuuagcaacuguuauccuuacgaugugcccgacuaugccucccugcgcucucuuguugcuagcuccggaacccuggaguucaucaaugaaggcuuuacauggaccggcgugacacagaacgggggaagcaaugccugcaagagaggcccugauucuggguucuuuucccggcucaacuggcuguacaaaagcggaucuaccuaucccguccuuaaugugacgaugccuaacaaugacaacuucgauaagcuguacauuuggggcguucaccauccguccacaaaccaagagcagaccagccucuaugugcaggcuucugggcgcgucacaguguccaccaagggaagccagcaaaccaucauucccaauaucggcuccagaccuugggugcggggccugucuagccgcauuuccaucuacuggacaaucgucaaacccggggacauucugguuaucaacagcaauggaaaccucauugccccuagaggcuacuuuaagaugcggacggggaaaucuuccaucaugcgcagcgacgcgcccauuggaaccuguaucucugagugcaucacaccgaauggcagcauuccuaacgauaagcccuuccagaaugugaacaaaaucaccuauggggccuguccuaaguacgugaagcagaauacacugaaacuugcuaccggaaugagaaacguccccgaaaagcagacgcggggccuguuuggcgccauugcuggguucaucgagaauggaugggaaggcaugauugacgggugguauggauuucgccaccaaaacuccgagggcacagggcaggccgcggaucucaaaucuacccaggccgcuaucgaccaaaucaauggcaagcugaacagagugauugagaaaaccaaugaaaaguuccaccagaucgagaaagaguucagcgaaguugaaggacggauucaggaucuugagaaguacguggaggacacaaagaucgaucugugguccuauaacgccgaacuccuggucgcucuggagaaccagcauaccauugaccucacagauagcgaaaugaauaaacuguuugagaagacgcgcagacaacuucgggaaaacgccgaggacaugggcaaugggugcuucagaaucuaccacaaaugugauaacgccugcauuggaucuauccgcaauggcaccuaugaccaugacguguaccgggaugaggcucugaacaauagauuucagaucaaggggguugaacucaaauccggauacaaggacuggauucuguggaucagcuucgcgauuucuugcuuucuucugugugugguccuccugggcuucaucaugugggccugccagaaggggaacauucgcuguaauaucugcaucuga

SEQ ID NO: 201167 - RNA, 1701 nt, Artificial Sequence
  derived and/or modified CDS sequence (opt5) from hemagglutinin__InfluenzaA__AFM71945
augaagaccaucauugcccugagcuacaucuucugccucgugcugggccaggacuuucccgggaacgauaauuccacagcuacgcuuugucugggacaccaugccgucccuaacggcacccucguuaaaacaauuaccaaugaccaaaucgaggugacaaacgcgaccgaacuggugcagucuagcuccacagggaagauuugcaauaacccgcacagaauccuugauggaaucaauuguacccugauugacgcucuccugggcgauccccauugcgacggguuccagaacgagacgugggaucuguuugucgaacggucuaaagccuucagcaauuguuauccuuacgacgugcccgauuaugccucccuccgcucucugguugcuagcuccggaacccuugaguuuaucaacgaaggcuucacauggaccggcgugacacagaaugggggaagcaacgccugcaagagaggcccugacucuggguuuuucucccggcugaauuggcucuacaaaagcggaucugcuuaucccguccugaacgugaccaugccuaauaacgauaacuuugacaaacuuuacauuuggggcguucaccauccguccacggaucaagagcagacaaaucuguaugugcaggccagcgggcgcgucaccgugucuacaaagagaucccagcaaaccaucauucccaacaucggaagccggccuugggugcgcggccucuccucuagaauuagcaucuacuggaccaucgucaagcccggcgacauucugguuaucaauuccaacgggaaucugauugcgccucggggauacuucaagaugcgcacaggcaaaagcucuaucaugagauccgacgcccccauugggacguguaucagcgagugcaucaccccgaacggaucuauuccuaaugauaagcccuuucagaacgugaauaaaaucacauauggcgcuuguccuaaguacgugaagcagaacacccucaaacuggccacagggaugcggaauguccccgaaaagcagacccgcggaauuuucggcgcuaucgccggcuuuauugagaacgggugggaaggaaugaucgacggcugguauggguucagacaccaaaauagcgagggaacgggccaggcggccgaucuuaaauccacacaggcugccaucgaccaaauuaacgggaagcugaaucgggugaucgagaaaaccaacgaaaaguuccaccagauugagaaagaauuuucugagguugaaggccgcauccaggaucucgagaaguacguggaggacaccaagauugaucuguggagcuauaacgcugaacuucuggucgcccucgagaaucagcauacaaucgaccugaccgauuccgaaaugaacaaacuguucgagaagacaagacggcaacucagagaaaaugccgaggacaugggaaacggcugcuuuaaaauuuaccacaagugugauaaugcuugcaucgggagcauccgcaacggaacguaugaccaugacguguaccgggaugaggcgcugaauaacagauuccagauuaaaggcguugaacuuaagucuggguacaaggacuggauccuguggauuuccuuugccaucagcugcuuccuccugugugugguccuucugggauuuauuaugugggcuugccagaaaggcaauauccgcuguaacaucugcauuuga

SEQ ID NO: 201168 - RNA, 1701 nt, Artificial Sequence; identical to SEQ ID NO: 201167
  derived and/or modified CDS sequence (opt5) from hemagglutinin__InfluenzaA__AFM71956

SEQ ID NO: 201169 - RNA, 1704 nt, Artificial Sequence
  derived and/or modified CDS sequence (opt5) from hemagglutinin__InfluenzaA__AFM71978
augaagaccaucauugcccugagcuacaucuucugccucguguuugcucaggaccugcccggcaacgauaauaacuccacagccacgcuuugucuggggcaccaugcggucccuaauggaacccucguuaaaacaauuaccaacgaccaaaucgaggugacaaaugcuaccgaacuggugcagucuagcuccacaggcaagauuugcaacaauccgcacagaauccuugaugggaucaacuguacccugauugacgcccuccugggagauccccauugcgacggcuuccagaaugagaaaugggaucuguuugucgaacggucuaaggccuucagcaacuguuauccuuacgacgugcccgauuaugcuucccuccgcucucugguugccagcuccgggacgcuugaguuuaucaaugaaggauucaacuggaccggcgugacacagaauggcgggagcaacgcuugcaaaagaggaccugacucuggcuuuuucucccggcugaauuggcucuacaagagcgggucuaccuaucccguccaaaacgugacaaugccuaacaaugauaacuccgacaagcuguacauuuggggaguucaccauccgagcaccgauaaagagcagacgaaucuuuaugugcaggccucuggcaaggucacaguguccaccaaacgcagccagcaaacaaucauucccaacgugggguccagaccuuggguccggggacugucuagccgcaucuccauuuacuggaccaucguuaagcccggcgacauccucgugauuaauagcaacggcaaucugaucgcgccuagaggguacuuuaaaaugcggaccggaaagucuuccauuaugcgcagcgacgcccccaucggcacauguucuagcgagugcauuacgccgaacggguccaucccuaaugauaagcccuuccagaacgugaauaaaaucaccuauggagcuuguccuaaguacgucaaacagaacacacugaagcucgccaccggcaugagaaaugugcccgaaaaacagacacgggggauuuuuggagcuaucgccggcuucauugagaacggcugggaagggaugaucgacggaugguauggcuuucgccaccaaaauucugaggggaccggacaggcggccgaucuuaagagcacgcaggcugccauugaccaaaucaacggcaaacugaacagaguuaucgagaagacaaaugaaaaguuccaccagauugagaaagaguucuccgaaguggaagggcggauccaggaucuggagaaguacgucgaggacaccaaaauugaucucuggagcuauaacgcugaacugcuuguggcccuggagaaucagcauaccaucgaccucacagauucugaaaugaacaagcuguuugagaaaacccgcagacaacugcgggaaaaugccgaggacaugggcaacggaugcuucaagauuuaccacaagugugauaaugcuugcaucggcuccauuagaaacgggacauaugaccaugacguuuaccgcgaugaggcgcucaauaaccgguuucagaucaaaggaguggaacuuaagagcggcuacaaagacuggauccuguggauuucuuucgccaucuccugcuuucugcucugugucgugcugcuuggguucauuaugugggcuugccagaagggaaauaucagauguaacauuugcaucuga

SEQ ID NO: 201170 - RNA, 1701 nt, Artificial Sequence
  derived and/or modified CDS sequence (opt5) from hemagglutinin__InfluenzaA__AFM71989
augaagaccaucauugcccugagcuacauccucugccugguguucgcucagaaacuucccggcaacgacaauuccacagccacgcugugucucgggcaccaugcggucccuaacggaaccauuguuaagacaaucaccaaugaucaaauugaggugacaaacgcuaccgaacuggugcagucuagcuccacaggcgagaucugcaauucuccgcaccagauccuugacggggaaaacuguacccugauugaugcccuccugggagacccccagugcgauggcuuucaaaauaaaaagugggaccuguucgucgagagaagcaaagcccauuccaacuguuauccuuacgaugugcccgacuaugcuucucuccggagccugguugccuccagcgggacgcuugaauuuaauaacgagucuuucaauuggaccggagugacacagaacggcaccuccagcgcuugcauccgcagaucuaauaacuccuuuuucagccggcugaauuggcucacacaccugaacuuuaaguacccugcccuuaacgucaccaugcccaauaacgagcaguucgauaagcuguauauuuggggcgugcaucacccuucuacggacaaagaucagaucuuucucuacacacaagcggccgggcgcauuaccguuuccacaaagagaagccagcaggcugugaucccgaauauuggaucccggccccgcgucagaaacaucccuucucgggugagcaucuauuggaccauugugaaacccggcgacauccugcugauuaauuccaccgggaaccucaucgccccucgcggauacuucaagauuagaagcggcaaaucuuccaucaugcggagcgaugcucccaucgggaaguguaauucugccugcauuacaccgaacggaagcaucccuaaugacaagcccuuucagaacgucaaucgcauuacguacggcgcguguccuagauauguuaaacaaaacacccugaaacuugccacaggcaugcggaaugugcccgaaaaacagacccgcgggaucuucggagcuauugccggcuuuaucgagaacgggugggaaggaaugguggacggcugguacggguucagacaccaaaauuccgagggacggggccaggcugccgaucugaagucuacacaggccgcuaucgaccagauuaacggcaaacucaacagacugaucgggaagaccaaugagaaauuccaucagauugaaaaggaguuuagcgaagucgagggacgcauccaagaucuugaaaaguauguggaggacacgaaaauugaucugugguccuacaacgcggagcuccugguugcccuggaaaaucagcacacaaucgaccucaccgauagcgagaugaacaagcuguucgaaaagaccaagaaacagcuucgggagaaugcugaagacaugggcaacgggugcuuuaagauuuaucauaagugugauaaugccugcaucggaucuaucagaaacggcacauacgaccacgauguguaucgcgacgaggcccugaauaaccgguuccagauuaaaggggucgagcucaaguccggcuacaaagacuggauccuguggauuagcuuugcuaucucuugcuuccuucuguguguggcccuccugggauuuauuaugugggcgugccaaaagggcaauaucagauguaacaucugcauuuga

SEQ ID NO: 201171 - RNA, 1701 nt, Artificial Sequence
  derived and/or modified CDS sequence (opt5) from hemagglutinin__InfluenzaA__AFM72010
augaagaccaucauugcccugagcuacaucuucugccaggugcucgcucaaaaccugcccggcaaugacaacuccacagccacgcuuugucuggggcaccaugcggucccuaauggaacccucguuaaaacaauuaccaacgaucagaucgaggugacaaaugcuaccgaacuggugcagucuagcuccacaggcagaauuugcgacucuccgcaccggauccuugaugggaagaacuguacccugaucgacgcccuccugggagauccccauugcgacggcuuucagaaugagaaaugggaucuguucgucgaacgcagcaaggccuuuuccaacuguuauccuuacgacgugcccgauuaugcuucucucagaagccugguugccuccagcgggacgcuugaguucauuaaugaaggauuuaacuggaccggcgugacacaaaauggcgggucuuacgcuugcaaacggggaccugacaaguccuucuuuagccgccugaacuggcucuaugagucugaguccaccuaccccguccugaaugugacaaugccuaacaaugauaacuucgacaagcuguauaucuggggcguucaccauccgagcaccgauaaagaacagacgaagcuguacgugcaggccucugggagagucacaguguccaccaaacggagccagcaaacaauuauccccaacgugggaucccgcccuugggucagaggccucucuagccggauuuccaucuacuggaccauuguuaagcccggggacauccugcugaucaauagcaacggaaaucucauugcgccucgcggcuauuuuaaaaucagaaccggcaagucuuccauuaugcggagcgacgcccccaucgggacauguucuagcgagugcauuacgccgaacggauccaucccuaaugauaagcccuuccagaacgugaauaaaaucaccuacggcgcuuguccuaaguaugugaaacagaacacacugaagcuggccaccgggaugcgcaauguccccgaaaaacagacaagaggaauuuuuggcgcuaucgccggguucauugagaacggaugggagggcaugaucgacggcugguacggguuucggcaccaaaauucugaaggaaccggccaggcggccgaucuuaagagcacgcaggcugccauugaccaaaucaacgggaaacucaaucgcgugaucgagaagacaaacgaaaaguuccaccagauugagaaagaguucuccgaaguugagggaagaauccaggaucuggaaaaguauguggaggacaccaaaauugaucuuuggagcuacaaugcugaacugcucgucgcccuggagaaccagcauaccaucgaccugacagauucugaaaugaacaagcucuuugagaaaacccggagacaacugcgcgagaaugccgaagacaugggcaacgggugcuucaagauuuaucacaagugugauaaugcuugcaucggcuccauucggaacggaacauacgaccaugacguguacagagaugaggcgcuuaauaaccgcuuucagaucaaaggcguugaacuuaagagcggguauaaagacuggauccucuggauuucuuucgccaucuccugcuuucugcuuugugugguccugcucggauucauuaugugggcuugccagaagggcaauauccgguguaacauuugcaucuga

SEQ ID NO: 201172 - RNA, 1701 nt, Artificial Sequence; identical to SEQ ID NO: 192987
  derived and/or modified CDS sequence (opt5) from hemagglutinin__InfluenzaA__AFM72021

SEQ ID NO: 201173 - RNA, 1701 nt, Artificial Sequence
  derived and/or modified CDS sequence (opt5) from hemagglutinin__InfluenzaA__AFM72032
augaagaccaucauugcccugagcuacauguucugccucguguuugcucagaaccugcccggcaaugacaacuccacagccacgcuuugucuggggcaccaugcggucccuaauggaacccucguuaaaacaaucaccaacgaucaaauugaggugacaaaugcuaccgaacuggugcagucuagcuccacaggcagaaucugcgacucuccgcaccggauucuugaugggaagaacuguacccugaucgacgcccuccugggagauccccauugcgacggcuuccagaaugagaaaugggaucuguuugucgaacgcagcaaggccuucuccaacuguuauccuuacgacgugcccgauuaugcuucucucagaagccugguugccuccagcgggacgcuugaguuuaucaaugaaggauucaacuggaccggcgugacacagucuggcggguccuauaccugcaaacggggaagcaauaacagcuuuuucucccgccugaauuggcucuacgagagcgagucuaaguacccuguccugaacgugacaaugcccaauaacggcaaguuugacaaacuuuauauuugggggauccaccauccuuccaccgauaaggaacaaacgaaccuguacauuagagcuagcggacggguuacaguguccaccaaacgcucucagcagacagucaucccgaauauuggcagcagacccugggugcgggggcucuccagccgcaucucuauuuacuggaccaucgugaagccuggagacauccugcugauuaacuccaccggcaaucucaucgcccccagaggcuauuucaaaauucggacagggaagucuucuaucaugcgcagcgaugcgccuauuggaacguguuccucugagugcaucacccccaacggcagcaucccgaaugacaagccuuuucagaacgucaauaaaauuacauacggggccugucccagauauguuaagcaaaacacccugaaacuugcuacaggaaugcggaaugugccugaaaagcagacccgcggcaucuucggggccauugcuggauuuaucgagaacggcugggagggcaugguggacgggugguacggauucagacaccaaaauuccgaaggcacggggcaggccgcggaucugaaaagcacacaggccgcuauugaccagaucaacggaaagcucaaucgggucaucgagaaaaccaacgaaaaguuccaccagauugagaaggaauuuucugagguggagggcagaauccaagaucuggaaaaauauguugaggacaccaagauugaucuuugguccuacaaugccgaacugcucguggcucuggagaaccagcauacaaucgaccugaccgauagcgaaaugaacaaacucuucgagaagacacgcaaacagcugcgggagaaugccgaagacauggggaacggcugcuuuaagauuuaucacaagugugauaaugccugcaucggaucuauuagaaacggcacguacgaccaugaugucuaccgcgacgaggcucuuaauaaccgguuccagaucaaagggguggaacugaaguccggauauaaagacuggauccucuggauuagcuuugcgaucuccugcuuccugcuuuguguugugcugcucggcuuuauuaugugggccugccaaaaggggaauaucagauguaacauuugcaucuga

SEQ ID NO: 201174 - RNA, 1701 nt, Artificial Sequence
  derived and/or modified CDS sequence (opt5) from hemagglutinin__InfluenzaA__AFM72043
augaagaccaucauugcccugagcuacauguucugccucguguuugcucagaaccugcccggcaaugacaacuccacagccacgcuuugucuggggcaccaugcggucccuaauggaacccucguuaaaacaaucaccaacgaucaaauugaggugacaaaugcuaccgaacuggugcagucuagcuccacaggcagaaucugcgacucuccgcaccggauucuugaugggaagaacuguacccugaucgacgcccuccugggagauccccauugcgacggcuuccagaaugagaaaugggaucuguuugucgaacgcagcaaggccuucuccaacuguuauccuuacgacgugcccgauuaugcuucucucagaagccugguugccuccagcgggacgcuugaguuuaucaaugaaggauucaacuggaccggcgugacacagucuggcggguccucuaccugcaaacggggaagcaauaacuccuuuuucagccgccugaauuggcucuacgagucugaguccaaguauccuguccugaacgugacaaugcccaauaacggcaaguuugacaaacuuuacauuugggggauccaccauccuagcaccgauaaggaacaaacgaaccuguauauuagagcuuccggacggguuacagugucuaccaaacgcagccagcagacagucaucccgaauauuggcuccagacccugggugcgggggcucagcucucgcaucuccauuuacuggaccaucgugaagccuggagacauccugcugauuaacagcaccggcaaucucaucgcccccagaggcuacuucaaaauucggacagggaagucuagcaucaugcgcuccgaugcgccuauuggaacguguucuagcgagugcaucacccccaacggcuccaucccgaaugacaagccuuuucagaacgucaauaaaauuacauauggggccugucccagauacguuaagcaaaacacccugaaacuugcuacaggaaugcggaaugugccugaaaagcagacccgcggcaucuucggggccauugcuggauuuaucgagaacggcugggagggcaugguggacgggugguauggauucagacaccagaauagcgaaggcacggggcaggccgcggaucugaaaucuacacaagccgcuauugaccagaucaacggaaagcucaaucgggucaucgagaaaaccaacgaaaaguuccaccagauugagaaggaauuuuccgagguggagggcagaauccaagaucuggaaaaauacguugaggacaccaagauugaucuuuggagcuauaaugccgaacugcucguggcucuggagaaccagcauacaaucgaccugaccgauucugaaaugaacaaacucuucgagaagacacgcaaacagcugcgggagaaugccgaagacauggggaacggcugcuuuaagauuuaccacaagugugauaaugccugcaucggauccauuagaaacggcacguaugaccaugaugucuaccgcgacgaggcucuuaauaaccgguuccagaucaaagggguggaacucaagagcggauacaaagacuggauccuguggauuuccuuugcgaucucuugcuuccugcuuuguguugugcugcucggcuuuauuaugugggccugccaaaaggggaauaucagauguaacauuugcaucuga

SEQ ID NO: 201175 - RNA, 1701 nt, Artificial Sequence
  derived and/or modified CDS sequence (opt5) from hemagglutinin__InfluenzaA__AFM72054
augaaggccaaacugcucgugcugcuuugcgcucugagcgccaccgacgcggauacaaucuguauuggcuaccacgcuaacaauuccacggacaccgucgauacaguucucgagaagaacgugaccgugacacauucugucaaucugcuugaagacaaccacaaugggaaacugugcaagcucaaaggaaucgccccgcugcagcugggcaaguguagcauugccggguggauccucggaaacccugagugcgaaucccuguucucuaagaaaagcugguccuauauugcugagacccccaauucugaaaacggcacauguuaccccggguauuuugccgauuacgaggagcuuagagaacaacugagcuccgugagcucuuucgagcgguuugaaaucuucccuaaggaguccagcuggcccaaacauaauguuaccaagggagugacggcugccugcucucacaaaggcaaguccagcuuuuaucgcaaccuccuguggcuuaccgagaagaauggcucuuacccuaaccuguccaaaagcuaugucaauaacaaggaaaaagaggugcucguucuguggggagugcaucaccccuccaauaucgaagaccagaagacaauuuacagaaaagagaacgcguacgucucuguggugagcucccacuauaaccggcgcuucaccccugaaaucgccaagagaccgaaaguccggaaucaggaggggcgcauuaacuacuauuggacacugcucgagcccggcgauaccaucauuuuugaagcuaaugggaaccugaucgccccuugguacgcuuucgcccuuagcagaggauuuggcucugggauuaucacguccaaugcgagcauggacgagugugaugccaagugccagacaccccaaggagcuaucaacucuagccugccuuuccagaauguucaucccgugaccauuggcgaauguccgaaguaugugcgguccacaaaacuccgcauggucaccggccugagaaacaucccuucuauucagagccgggggcuuuuuggagccaucgcuggcuucauugaagggggauggaccggcaugaucgacgggugguacggauaucaccaucagaaugaacaaggcuccggcuacgccgccgaucaaaagagcacacagaacgcuaucaaugggauuacgaacaaaguuaauucuaucauugagaagaugaacacccaguuuacagcggugggaaaagaguucaauaagcuggaaaagcgcauggagaaccucaacaaaaagguggacgauggcuuccuggacaucuggaccuacaaugccgaacugcucguccugcuugagaacgaaagaacacuggacuuucacgauuccaaugugaaaaaccucuaugagaagguuaaaagccagcugaagaauaacgcuaaggagauugggaauggaugcuucgaauuuuaccacaaauguaacaaugagugcauggaaucugugaagaacggcaccuaugacuaccccaaauauuccgaggagagcaaacuuaaucgggagaagaucgauggggucaagcuggaguccaugggcguguaccagauccucgccauuuauucuacggucgccagcucccuggugcugcucguuucucugggagcuaucagcuucuggaugugcuccaacggcagccuucagugucgcauuugcaucuga

SEQ ID NO: 201176 - RNA, 1701 nt, Artificial Sequence; identical to SEQ ID NO: 201175
  derived and/or modified CDS sequence (opt5) from hemagglutinin__InfluenzaA__AFM72065

SEQ ID NO: 201177 - RNA, 1701 nt, Artificial Sequence
  derived and/or modified CDS sequence (opt5) from hemagglutinin__InfluenzaA__AFM72087
augaagaccaucauugcccugagcuacaucuucugccucguguuugcucagaaacugcccggcaacgacaauuccacagccacgcuuugucuggggcaccaugcggucccuaacggaacccucguuaagacaauuaccaaugaucaaaucgaggugacaaacgcuaccgaacuggugcagucuagcuccacaggcagaauuugcgacucuccgcaccggauccuugaugggaaaaauuguacccugaucgacgcccuccugggagauccccauugcgacggcuuccagaacgagaagugggaucuguuuauugaacgcagcaaagccuucuccaauuguuauccuuacgacguccccgauuaugcuucucucagaagccugguggccuccagcgggacgcuugaguuuaucaacgaaggauucaauuggaccggcguuacacagucuggcggguccuauaccugcaagcggggaagcgugaacagcuuuuucucccgccugaauuggcucuacgagagcgaguacaaguauccugcucugaacgucacaaugcccaauaacggcaaauuugacaagcuguacauuuggggagugcaccauccuucuaccgaaaaagagcaaacgaaucuguacguuagagccuccgggcgggugacagucagcaccaagcgcucccagcagacagugaucccgaacauuggcucuagccccugggugagagggcucuccagccggaucucuauuuauuggaccaucgucaaaccuggagauauccugcugauuaacuccaccggcaaucucaucgcgccccgcggcuacuucaagauuagaacagggaagucuucuaucaugcggagcgacgccccuauuggaacguguuccucugaaugcaucacccccaacggcagcaucccgaaugauaaaccuuuucagaacguuaauaagauuacauauggggcuuguccccgcuacgugaaacaaaacacccugaaacuugccacaggaaugagaaaugugccugagaagcagacccggggcaucuucggggcuauugccggauuuaucgagaacggcugggaaggcauggucgacgggugguauggauuccgccaccaaaauuccgagggcacggggcaggcggccgaccuuaagagcacacaggcugccauugaucagaucaacggaaaacucaauagacugaucgaaaagaccaacgagaaguuccaccagauugaaaaagaguuuucugagguggaaggccggauccaagaccuugagaaguacguugaagauaccaaaauugaccugugguccuauaaugcugagcuccugguggcccuggaaaaccaguacacaaucgaucucaccgacagcgagaugaauaagcuguucgagaaaacaagaaagcagcuucgcgaaaacgccgaggauauggggaacggcugcuuuaagauuuaccauaaaugugacaaugcuugcaucggaucuauucggaacggcacguaugaucacgacgucuacagagaugaagcgcugaauaaccgcuuccagaucaaggggguggagcucaaauccggauauaaggacuggauccuguggauuagcuuugccaucuccugcuuccuucuguguguugugcuccugggcuuuauuaugugggcuugccaaaaagggaauauccgguguaacauuugcaucuga

SEQ ID NO: 201178 - RNA, 1701 nt, Artificial Sequence
  derived and/or modified CDS sequence (opt5) from hemagglutinin__InfluenzaA__AFM72098
augaagaccaucauugcccugagcuacaucuucugccucguguuugcucagaaacugcccggcaacgacaauuccacagccacgcuuugucuggggcaccaugcggucccuaacggaacccucguuaagacaauuaccaaugaucaaaucgaggugacaaacgcuaccgaacuggugcagucuagcuccacaggcagaauuugcgacucuccgcaccggauccuugaugggaaaaauuguacccugaucgacgcccuccugggagauccccauugcgacggcuuccagaacgagaagugggaucuguuugucgaacgcagcaaagccuauuccaauuguuacccuuaugacgugcccgauuacgcuucucucagaagccugguugccuccagcgggacgcuugaguucauuaacgaagacuuuaauuggaccggagugacacagucuggcggcuccuaugcuugcaagcgggggagcgucaacucuuucuuuucccgccugaauuggcucuacaagagcgaguauaaauacccugcccugaacgugaccaugcccaauaacggaaaguucgauaaacuuuacaucuggggcguucaccauccugugacagacagagagcaaaccaaucuguauguccgggcgucugggcgcgugacgguguccacaaagagaagccagcagaccgucauuccgaacaucggaucccggcccuggguucgcggccucucuagcagaauuuccaucuacuggacaauugugaaaccuggggauauccugcugaucaacagcaccggaaaucucauugcuccccggggcuauuuuaagauccgcaccggcaagucuuccauuaugagaagcgacgccccuaucgggacauguucuagcgaaugcauuacgcccaacggauccaucccgaaugacaaaccuuuccagaacgugaauaagaucaccuacggcgccuguccccgguaugucaaacaaaacacacugaaacuugcuaccgggaugcgcaaugugccugagaaacagacaagaggaauuuuuggcgccaucgcgggguucauugaaaacggaugggagggcaugguugauggcugguacggguuucggcaccagaauagcgagggaaccggccaggccgcugaccugaagucuacgcaagccgcuaucgaucagauuaacgggaaacucaauagacugaucgaaaagacaaacgagaaguuccaccagaucgaaaaagaguucuccgaaguggagggacgcauucaagaccuugagaaguaugucgaagauaccaaaaucgaccuguggagcuacaaugccgagcuccugguggcccuggaaaaccagcauaccauugaucucacagacucugagaugaauaagcuguuugaaaagacccggaagcagcuuagagagaacgcugaggauaugggcaacgggugcuucaagaucuaccacaaaugugacaaugcgugcauuggcuccauccgcaacggaacauaugaucaugacguuuaccgggacgaagcccugaauaacagauuucagauuaagggcguggagcucaaaagcggguauaaggauuggauccuguggaucucuuucgcuauuuccugcuuucuucugugugucgugcuccugggauucaucaugugggccugccaaaaaggcaauauucgcuguaacaucugcauuuga

SEQ ID NO: 201179 - RNA, 1701 nt, Artificial Sequence
  derived and/or modified CDS sequence (opt5) from hemagglutinin__InfluenzaA__AFM72109
augaagaccaucauugcccugagcuacaucuucugccucguguuugcucagaaacugcccggcaacgacaauuccacagccacgcuuugucuggggcaccaugcggucccuaacggaacccucguuaagacaauuaccaaugaucaaaucgaggugacaaacgcuaccgaacuggugcagucuagcuccacaggcagaauuugcgacucuccgcaccggauccuugaugggaaaaauuguacccugaucgacgcccuccugggagauccccauugcgacggcuuccagaacgagaagugggaucuguuugucgaacgcagcaaagccuauuccaauuguuacccuuaugacgugcccgauuacgcuucucucagaagccugguugccuccagcgggacgcuugaguucauuaacgaagacuuuaauuggaccggagugacacagucuggcggcuccuaugcuugcaagcgggggagcgucaacucuuucuuuucccgccugaauuggcuccacaagagcgaguacaaauauccugcccugaacgugaccaugcccaauaacggaaaguucgauaaacuuuacaucuggggcguucaucacccuauuacagacagagagcaaaccaaucuguacgugcgggcgucugggcgcgucacgguguccacaaagagaagccagcagaccgugaucccgaacauuggaucccggcccuggguccgcggccucucuagcagaaucuccauuuauuggacaaucguuaaaccuggggauauccugcugauuaacagcaccggaaaucucaucgcuccccggggcuacuuuaagauucgcaccggcaagucuuccaucaugagaagcgacgccccuauugggacauguucuagcgaaugcaucacgcccaacggauccaucccgaaugacaaaccuuuccagaacgugaauaagauuaccuauggcgccuguccccgguacgugaaacaaaacacacugaaacuugcuaccgggaugcgcaaugucccugagaaacagacaagaggaaucuuuggcgccauugcgggguucaucgaaaacggaugggagggcaugguggauggcugguauggguuucggcaccagaauagcgagggaaccggccaggccgcugaccugaagucuacgcaagccgcuauugaucagaucaacgggaaacucaauagacugaucgaaaagacaaacgagaaguuccaucagauugaaaaagaguucuccgaaguugagggacgcauccaagaccuugagaaguacguggaagauaccaaaauugaccuguggagcuauaaugccgagcuccuggucgcccuggaaaaccagcacaccaucgaucucacagacucugagaugaauaagcuguuugaaaagacccggagacagcuucgcgagaacgcugaggauaugggcaacgggugcuucaagauuuaccauaagugugacaaugcgugcaucggcuccauucggaacggaacauacgaucacgacguguauagagacgaagcccugaauaaccgcuuucagaucaaaggcguugagcucaagagcggguacaaagauuggauccuguggauuucuuucgcuaucuccugcuuucuucugugugugguccuccugggauucauuaugugggccugccaaaagggcaauauccgguguaacauuugcaucuga

SEQ ID NO: 201180 - RNA, 1701 nt, Artificial Sequence
  derived and/or modified CDS sequence (opt5) from hemagglutinin__InfluenzaA__AFM72120
augaagaccaucauugcccugagcuacaucuucugccucguguuugcucagaaacugcccggcaacgacaauuccacagccacgcuuugucuggggcaccaugcggucccuaacggaacccucguuaagacaauuaccaaugaucaaaucgaggugacaaacgcuaccgaacuggugcagucuagcuccacaggcagaauuugcgacucuccgcaccggauccuugaugggaaaaauuguacccugaucgacgcccuccugggagauccccauugcgacggcuuccagaacgagaagugggaucuguuugucgaacgcagcaaagccuauuccaauuguuacccuuaugacgugcccgauuacgcuucucucagaagccugguugccuccagcgggacgcuugaguucauuaacgaagacuuuaauuggaccggagugacacagucuggcggcuccuaugcuugcaagcgggggagcgucaacucuuucuuuucccgccugaauuggcuccacgagagcgaguacaaguauccugcccugaacgugaccaugcccaauaacggaaaauucgauaaacuuuacaucuggggcguucaucacccuauuacagacagagaacaaaccaaucuguacgugcgggcgucugggcgcgucacgguguccacaaagagaagccagcagaccgugaucccgaacauuggauuucggcccuggguccgcggccucuccucuagaaucagcauuuauuggacaaucguuaagccuggggauauccugcugauuaacuccaccggaaaucucaucgcuccccggggcuacuucaaaauucgcaacggcaagagcucuaucaugagauccgacgccccuauugggaccuguagcucugagugcaucacacccaauggaagcaucccgaacgacaagccuuuucagaaugugaacaaaauuacguauggcgccuguccccgguacgugaagcaaaauacccugaaacuugcuacagggaugcgcaacgucccugaaaagcagaccagaggaaucuucggcgccauugcgggguuuaucgagaauggaugggagggcaugguggauggcugguauggguuccggcaccagaacuccgaaggaacaggccaggccgcugaccugaaaucuacccaagccgcuauugaucagaucaaugggaagcucaacagacugaucgagaaaacgaaugaaaaguuccaucagauugagaaggaauuuagcgagguugagggacgcauccaagaccuugaaaaauacguggaggauacaaagauugaccugugguccuauaacgccgaacuccuggucgcccuggagaaucagcacaccaucgaucucaccgacagcgaaaugaacaaacuguucgagaagacacggaaacagcuuagagagaacgcugaagauaugggcaaugggugcuuuaagauuuaccauaagugugacaacgcgugcaucggcucuauucgcaauggaaccuacgaucacgacguguaucgggacgaggcccugaacaauagauuccagaucaaaggcguugaacucaaguccggguacaaagauuggauccuguggauuagcuuugcuaucucuugcuuccuucugugugugguccuccugggauuuauuaugugggccugccaaaagggcaacauccgcuguaauauuugcaucuga

SEQ ID NO: 201181 - RNA, 1701 nt, Artificial Sequence
  derived and/or modified CDS sequence (opt5) from hemagglutinin__InfluenzaA__AFM72131
augaagaccaucauugcccugagcuacauccucugccugguguucgcucagaaacuucccggcaacgacaauuccacagccacgcugugucucgggcaccaugcggucccuaacggaacccugguuaagacaauuaccaaugaucaaaucgaggugacaaacgcuaccgaacuugugcagucuagcuccacaggcagaauuugcgacucuccgcaccggauccuggaugggaaagacuguacccucaucgaugcccugcugggagacccccauugcgauggcuuucagaauaaggagugggaccucuucgucgaacgcagcaaagccuauuccaacuguuacccuuaugaugugcccgacuacgcuucucugagaagccuuguugccuccagcgggacgcuggaguuuauuaaugaagauuucaacuggaauggaguggcucagucuggcgaguccuaugccugcaagcggggcagcgucaaguccuuuuucucucgccucaacuggcugcacgagagcgaauacaaauauccugcgcuuaaugugaccaugcccaacaaugggaaguuugacaaacuguacaucuggggaguucaucacccuucuacagauagagagcaaaccaagcucuacgugcgggccuccggccgcgucacagugagcaccaaaagaucccagcagacggugauuccgaacaucgggucucggcccuggguccgcggacugagcuccagaauuagcaucuauuggacaauuguuaagccuggcgacauccugcucaucaauucuaccgggaaccugauugcuccccggggauacuucaagauccgcacaggcaaauccagcauuaugagaucugacgccccuaucggcaccuguagcuccgaaugcauuacccccaacgggucuaucccgaaugauaagccuuuucagaacgugaaucggaucacauauggagcuuguccccgcuacgugaaacaaaacacgcuuaagcuggccaccggcaugagaaaugucccugagaaacagacacgggggauuuucggagcgaucgccggcuuuauugagaacgggugggaaggaaugguggacggcugguauggcuucagacaccagaauagcgaggggaccggacaggcugccgaucucaaguccacacaagcugccaucgaccagauuaacggcaaacugaaucgccuuaucgaaaagaccaacgagaaguuucaucagaucgaaaaagaguucagcgagguugaagggcggauucaagaucuggagaaguacguggaagacacgaaaaucgaucucuggucuuauaaugccgagcugcuggucgcucucgaaaaccagcacacaauugaccugaccgauuccgagaugaauaaacuuuucgagaagaccagaaagcagcugcgcgaaaacgcggaggacaugggaaauggcugcuuuaagaucuaccauaaaugugauaacgccugcauugggagcauccggaacggcacauacgaccacgacguguauagagaugaagcucucaauaaccgcuuccagauuaagggaguugagcugaaaucuggcuacaaggacuggauccuuuggaucuccuuugccauuagcugcuuccugcucugugugguccugcugggguuuaucaugugggccugccaaaaaggaaauauucgguguaacaucugcauuuga

SEQ ID NO: 201182 - RNA, 1701 nt, Artificial Sequence
  derived and/or modified CDS sequence (opt5) from hemagglutinin__InfluenzaA__AFM72142
augaagaccaucauugcccugagcuacaucuccugccucguguucgcucagaaacugcccggcaacgacaauucuacagccacgcuuugucuggggcaccaugcggucccuaacggaacccucguuaagacaauuaccaaugaucaaaucgaggugacaaacgcuaccgaacuggugcagagcuccucuacaggcagaauuugcgacagcccgcaccggauccuugaugggaaaaauuguacccugaucgacgcccuccugggagauccccauugcgacggcuuucagaacaaggagugggaucuguucgucgaacgcuccaaagccuauucuaauuguuacccuuaugacgugcccgauuacgcuagccucagaucccugguugccagcucugggacgcuugaguuuauuaacgaagacuucaauuggaccggaguggcucaggauggcggcuccuaugccugcaagcgggggagcgucaacucuuucuucucccgccugaauuggcuccacaagcuggaguacaaauauccugcgcuuaacgugacaaugcccaauaacggaaaguuugacaaacuguacaucuggggcguucaucacccuagcaccgauagagaccaaacaucucucuacgugcgggccuccgggcgcgucaccgugagcacgaagagaucccagcagacagugauuccgaauaucggaucucggcccuggguccgcggccagagcuccagaauuagcaucuauuggaccauuguuaaaccuggggacauccugcugaucaacucuacaggaaaccucauugcuccccggggcuacuucaagauccgcaauggcaaguccagcauuaugagaucugaugccccuaucgggaacuguagcuccgagugcauuacccccaauggaucuaucccgaacgacaaaccuuuucaaaaugugaaccggaucaccuauggcgcuuguccccgcuacgugaagcagaauacacugaaacuugccacggggaugagaaacgucccugaaaagcagacccggggaauuuucggcgcgaucgccggguuuauugagaauggaugggaaggcaugguggauggcugguauggguucagacaccagaacagcgagggaacaggccaagcugccgaccugaaauccacccaggcugccaucgaucagauuaaugggaagcucaaccgccugaucgagaaaacaaaugaaaaguuucaucaaaucgagaaggaauuuagcgagguugaaggacggauucaggaccuugagaaauacguggaggauaccaagaucgaccuguggucuuauaacgccgaacuccuggucgcucuggagaaucagcacacgauugaucucacagacuccgaaaugaacaaacuguucgagagaacccgcaagcagcuucgggaaaacgcggaggauaugggcaaugggugcuuuaaaaucuaccauaagugugacaacgccugcauuggcagcaucagaaauggaaccuacgaccacgauguguaucgcgacgaggcucugaacaaucgguuccaaauuaagggcguugaacucaaaucuggguacaaggauuggauccuguggaucuccuuugccauuagcugcuuccuucugugugugguccuccugggauuuaucaugugggccugccagaaaggcaacauuagauguaauaucugcauuuga

SEQ ID NO: 201183 - RNA, 1701 nt, Artificial Sequence
  derived and/or modified CDS sequence (opt5) from hemagglutinin__InfluenzaA__AFM72153
augaagaccaucauugcccugagcuacauccucugccugguguucgcucagaaacuucccggcaacgacaauuccacagccacgcugugucucgggcaccaugcggucccuaacggaacccugguuaagacaauuaccaaugaucaaaucgaggugacaaacgcuaccgaacuugugcagucuagcuccacaggcagaauuugcgggucuccgcaccggauccuggacgggaaaaauuguacccucaucgaugcccugcugggcgacccccauugcgauggguuucagaacaaggagugggaccucuucgucgaacgcagcaaagccuauuccaauuguuacccuuaugaugugcccgacuacgcuucucugagaagccuuguugccuccagcggaacgcuggaguuuauuaacgaagauuucaauuggaccggcguggcucaggacggcgggucuuaugccugcaagcggggauccgucaacagcuuuuucucucgccucaauuggcugcacaagcuggaguacaaauauccugcgcugaacgugacaaugcccaauaacggcaaguuugauaaacucuacaucuggggaguucaucacccuuccaccgacagcgaucaaacaucucuguacgugagagccuccggacgggucaccgugagcacgaagcgcucccagcagacagugaccccgaauauuggcucuagacccuggguccgggggcagagcucccgcaucggaauuuauuggacaaucguuaaaccuggcgacauucugcucaucaacagcaccggcaaccugaucgcucccagaggguacuucaagauucggaauggaaagucuuccaucaugcgcagcgacgccccuauuggcaacuguucuagcgagugcaucacccccaauggguccauuccgaacgauaaaccuuuucaaaaugugaacagaaucacauauggagcuuguccccgguacgugaagcagaauacgcuuaaacuggccaccggcaugcgcaacgucccugaaaagcagacaagagggaucuucggagcgauugccggcuuuaucgagaauggcugggaagggaugguggacggaugguauggcuuccggcaccagaacucugaggggaccggacaagcugccgaucucaaaagcacacaggcugccauugaccagaucaauggcaagcugaacagacuuauugagaaaaccaaugaaaaguuucaucaaaucgagaaggaguucuccgaaguugaagggcgcauccaggaucuggagaaauacguggaggacacgaagauugaucucuggagcuauaacgccgaacugcuggucgcucucgagaaucagcacacaaucgaccugaccgauucugaaaugaacaaacuuuucgagaagacccggaaacagcugagagaaaacgcggaggacaugggcaauggaugcuuuaagauuuaccauaagugugauaacgccugcaucggcuccauucgcaaugggacauacgaccacgacguguaucgggaugaggcucucaacaauagauuccaaaucaaaggaguugaacuuaagagcggcuacaaagacuggauucuuuggaucucuuuugccaucuccugcuuccugcucugugugguccugcugggguuuauuaugugggccugccagaagggaaacauccgcuguaauauuugcaucuga

SEQ ID NO: 201184 - RNA, 1701 nt, Artificial Sequence
  derived and/or modified CDS sequence (opt5) from hemagglutinin__InfluenzaA__AFM72164
augaagaccaucauugcccugagcuacauccucugccugguguucgcucagaaacuucccggcaacgacaauuccacagccacgcugugucucgggcaccaugcggucccuaacggaacccugguuaagacaauuaccaaugaucaaaucgaggugacaaacgcuaccgaacuugugcagucuagcccgacaggcagaauuugcgacucuccccaccggauccuggaugggaaaaauuguacccucaucgacgcccugcugggagauccucauugcgacggcuuucagaacaaggagugggaucucuucgucgaacgcuccaaagccuauagcaauuguuaccccuaugacgugccugauuacgcuucccugagaucucuuguugccagcuccgggacgcuggaguuuauuaacgaaaauuucaacuggaccggaguggcucaggacggcaagagcuaugccugcaagcggggcucugucaauuccuuuuucagccgccucaacuggcugcacaaacuugaguacaaguaucccgcgcugaaugugacaaugccuaacaaugggaaauuugauaagcucuacaucuggggaguucaucacccgucuaccgacuccgaucaaacaagccuguacgugagagccucuggccgggucaccguguccacgaaacgcagccagcagacagugauucccgacaucggguauagaccuuggguccggggacaguccucucgcauuagcauccacuggaccauuguuaagcccggcgacauccugcucaucaacuccacagggaaccugauugcuccuagaggauacuucaagauccggaauggcaaaagcucuauuaugcgcuccgaugcccccaucggcaacuguagcucugagugcauuaccccgaaugggagcaucccuaacgacaagcccuuucaaaaugugaacagaaucaccuauggagcuuguccucgguacgugaaacagaauacacuuaagcuggccacgggcaugcgcaacguccccgaaaaacagaccagagggauuuucggagcgaucgccggcuuuauugagaaugggugggaaggaaugguggauggcugguauggcuuccggcaucagaacuccgaggggacaggacaagcugccgaccucaagucuacccaggcugccaucgaucagauuaauggcaaacugaacagacuuguugagaagacaaaugaaaaguuucaccaaaucgagaaagaguucagcgaaguggaagggcgcauccaggaccuggagaaguacgucgaggauaccaaaauugaccucugguccuauaacgccgaacugcugguggcucucgagaaucagcauacgaucgaucugacagacagcgaaaugaacaaacuuuucgagcggaccagaaagcagcugcgcgaaaacgcggaggauaugggaaauggcugcuuuaagauuuaccacaagugugacaacgccugcaucgggucuauucggaauggcaccuacgaccacgauguuuauagagacgaggcucucaacaaucgcuuccaaaucaaaggaguggaacugaaguccggcuacaaagauuggauucuuuggaucagcuuugccaucucuugcuuccugcucugugucgugcugcugggguuuauuaugugggccugccagaagggaaacauccgguguaauauuugcaucuga

SEQ ID NO: 201185 - RNA, 1701 nt, Artificial Sequence
  derived and/or modified CDS sequence (opt5) from hemagglutinin__InfluenzaA__AFM72175
augaagaccaucauugcccugagcuacauccucugccugguguucgcucagaaacuucccggcaacgacaauuccacagccacgcugugucucgggcaccaugcggucccuaacggaacccugguuaagacaauuaccaaugaucaaaucgaggugacaaacgcuaccgaacuugugcagucuagcccgacaggcagaauuugcgacucuccccaccggauccuggaugggaaaaauuguacccucaucgacgcccugcugggagauccucauugcgacggcuuucagaacaaggagugggaucucuucgucgaacgcuccaaagccuauagcaauuguuaccccuaugacgugccugauuacgcuucccugagaucucuuguugccagcuccgggacgcuggaguuuauuaacgaaaauuucaacuggaccggaguggcucaggacggcaagagcuaugccugcaagcggggcucugucaauuccuuuuucagccgccucaacuggcugcacaaacuugaguacaaguaucccgcgcugaaugugacaaugccuaacaaugggaaauuugauaagcucuacaucuggggaguucaucacccgucuaccgacuccgaucaaacaaaccuguacgugagagccagcggccgggucaccgugucuacgaaacgcucccagcagacagugauucccgacaucggguauagaccuuggguccggggacagagcucccgcauuucuauccacuggaccauuguuaagcccggcgacauccugcucaucaacagcacagggaaucugauugcuccuagaggauacuucaagauccggaacggcaaauccagcauuaugcgcucugaugcccccaucggcaauuguuccagcgagugcauuaccccgaacgggucuaucccuaaugacaagcccuuucaaaacgugaauagaaucaccuauggagcuuguccucgguacgugaaacagaacacacuuaagcuggccacgggcaugcgcaauguccccgaaaaacagaccagagggauuuucggagcgaucgccggcuuuauugagaacgggugggaaggaaugguggauggcugguauggcuuccggcaucagaauagcgaggggacaggacaagcugccgaccucaaguccacccaggcugccaucgaucagauuaacggcaaacugaauagacuuguugagaagacaaacgaaaaguuucaccaaaucgagaaagaguucucugaaguggaagggcgcauccaggaccuggagaaguacgucgaggauaccaaaauugaccucuggagcuauaaugccgaacugcugguggcucucgagaaccagcauacgaucgaucugacagacuccgaaaugaacaaacuuuucgagcggaccagaaagcagcugcgcgaaaaugcggaggauaugggaaacggcugcuuuaagauuuaccacaagugugacaaugccugcaucgggagcauucggaacggcaccuacgaccacgauguuuauagagacgaggcucucaauaaccgcuuccaaaucaaaggaguggaacugaagucuggcuacaaagauuggauucuuuggaucuccuuugccaucagcugcuuccugcucugugucgugcugcugggguuuauuaugugggccugccagaagggaaauauccgguguaacauuugcaucuga

SEQ ID NO: 201186 - RNA, 1701 nt, Artificial Sequence
  derived and/or modified CDS sequence (opt5) from hemagglutinin__InfluenzaA__AFM72197
augaagaccaucauugcccugagcuacauccucugcaugguguucgcucagaaacugcccggcaacgacaauuccacagccacgcuuugucuggggcaccaugcggucccuaacggaacccucguuaagacaauuaccaaugaucaaaucgaggugacaaacgcuaccgaacuggugcagucuagcuccacaggcagaauuugcgacucuccgcaccggauccuugaugggaaaaauuguacccugaucgacgcccuccugggagauccccauugcgacggcuuucagaacaaggagugggaucuguucgucgaacgcagcaaagccuauuccaauuguuacccuuaugacgugcccgauuacgcuucucucagaagccugguugccuccagcgggacgcuugaguuuaacaaugaaucuuucaacuggaccggaguggcucagaauggcacauccuaugccugcaagcggcgcagcgucaaguccuuuuucucuagacugaacuggcuccacaaacuggaguacaaguauccugcgcuuaaugugaccaugcccaacaaugacaaauuugauaagcuguacauuuggggcguucaucacccuaucacagacagcgagcaaaccucucucuacgugcaggccuccgggcgggucacggugagcacaaaacgcucccagcagaccgugauuccgaacaucggauauagacccuggguccggggcguuucuagccgcauuuccaucuacuggacaauugugaagccuggggauauccugcugaucaacagcaccggaaaucucauugcucccagaggcuauuucaagauccggucugggaaauccagcauuaugcgcucugacgccccuaucggaaacuguaauagcgaaugcauuacccccaacggcuccaucccgaaugacaagccuuuucaaaacgugaauagaaucacauacggcgcuuguccccgguaugucaaacagaacacgcugaagcuggccaccgggaugcgcaaugugccugagaaacagacaagaggaauuuucggcgcgaucgccggguuuauugaaaacggaugggagggcaugguugaugggugguacggauuccggcaccaaaauucugagggcaccggccaggcugccgaccuuaagagcacacaggcugccaucaaccagauuaaugggaaacucaacagacugaucgaaaagaccaaugagaaguuucaucaaaucgaaaaagaguucuccgaaguggagggacgcauucaggaucuugagaaguaugucgaagacacgaaaaucgaucuguggagcuacaacgccgagcuccugguggcucuggaaaaccagcacacaauugaccucaccgauucugagaugaauaagcuguucgaacggaccagaaaacagcuucgcgagaacgcggaggacaugggcaaugggugcuuuaagaucuaccauaagugugauaacgccugcauuggauccauccggaauggcacauaugaccacgauguuuacagagacgaagcucugaacaaucgcuuccaaauuaaagggguggagcucaagagcggcuauaaagacuggauccuguggaucucuuuugccauuuccugcuuccuucugugugucgugcuccugggauuuaucaugugggccugccagaagggcaacauuaaauguaauaucugcauuuga

SEQ ID NO: 201187 - RNA, 1701 nt, Artificial Sequence
  derived and/or modified CDS sequence (opt5) from hemagglutinin__InfluenzaA__AFM72208
augaagaccaucauugcccugagcuacauccucugccugguguucgcucagaaacuucccggcaacgacaauuccacagccacgcugugucucgggcaccaugcggucccuaacggaacccugguuaagacaauuaccaaugaucaaaucgaggugacaaacgcuaccgaacuugugcagucuagcuccacaggcagaauuugcgacucuccgcaccagauccuggauggggagaauuguacccucaucgacgcccugcugggagauccccauugcgacggcuuucagaacaaagaaugggaucucuucgucgagcggagcaaggccuauuccaauuguuacccuuaugacgugcccgauuacgcuucucugcgcagccuuguugccuccagcgggacgcuggaauuuaacaaugagucuuucaacuggaccggaguggcucaaaauggcacauccagcgccugcaaaagacggucuauuaacuccuuuuucagccgccucaauuggcugcaccagcuuaaguauagauacccugcgcugaacgucaccaugcccaauaacgacaaguuugauaaacucuauaucuggggcgugcaucacccuucuacagacuccgaucagaccagccuguacacgcaggccuccgggcggguuacagugucuaccaagcgcagccaacagacagucauuccgaacaucggauccagacccugggugcggggcauuagcucucgcaucuccauuuacuggaccaucgugaaaccuggggacauccugcucauuaauagcaccggaaaccugaucgcucccagaggcuauuucaagauucggucugggaaaagcuccaucaugcgcucugacgccccuauuggaaaguguaauagcgagugcaucacacccaacggcuccaucccgaaugauaagccuuuucagaacgucaauagaauuacguacggcgcuuguccccgguauguuaaacagaacacccuuaagcuggccacagggaugcgcaaugugccugaaaaacaaaccagaggaaucuucggcgcgauugccggguuuaucgagaacggaugggaaggcaugauggacgggugguacggauuccggcaccagaauagcgagggcacaggccaggcugccgaucucaagucuacccaagcugccauuaaccagaucaaugggaaacugaacagacuuaucgagaagacgaaugaaaaauuucaucagauugagaaggaguucuccgaaguggaaggacgcauccaggaccuggagaaguaugucgaggauacaaaaauugaccucuggagcuacaacgccgaacugcugguggcucucgagaaccaacacaccaucgaucugaccgacucugaaaugaauaagcuguucgagcggacaagaaaacagcugcgcgaaaacgcggaggauaugggcaaugggugcuuuaagauuuaucauaaaugugacaacgccugcaucggauccauucggaauggcaccuacgaucacgacguuuacagagacgaggcucucaacaaucgcuuccagaucaaggggguggaacuuaagagcggcuauaaagauuggauccuuuggauuuccuuugccaucucuugcuuccugcucugugucgugcugcugggauuuauuaugugggccugccagaagggcaacauccgguguaauauuugcaucuga

SEQ ID NO: 201188 - RNA, 1701 nt, Artificial Sequence
  derived and/or modified CDS sequence (opt5) from hemagglutinin__InfluenzaA__AFM72219
augaagaccaucauugcccugagcuacauccucugccugguguucgcucagaaacuucccggcaacgacaauuccacagccacgcugugucucgggcaccaugcggucccuaacggaacccugguuaagacaauuaccaaugaucaaaucgaggugacaaacgcuaccgaacuugugcagucuagcuccacaggcagaauuugcgacucuccgcaccagauccuggauggggagaauuguacccucaucgacgcccugcugggagauccccauugcgacggcuuucagaacaaagaaugggaucucuucgucgagcggagcaaggccuauuccaauuguuacccuuaugacgugcccgauuacgcuucucugcgcagccuuguugccuccagcgggacgcuggaauuuaacaaugagucuuucaacuggaccggaguggcucaaaauggcacauccagcgccugcaaaagacggucuauuaacuccuuuuucagccgccucaauuggcugcaccagcuuaaguauagauacccugcgcugaacgucaccaugcccaauaacgacaaguuugauaaacucuauaucuggggcgugcaucacccuucuacagacuccgaucagaccagccuguacacgcaggccuccgggcggguuacagugucuaccaagcgcagccaacagacagucauuccgaacaucggauccagacccugggugcggggcauuagcucucgcaucuccauuuacuggaccaucgugaaaccuggggacauccugcucauuaagagcaccggaaaucugaucgcucccagaggcuauuucaaaauucggucuggaaagagcuccaucaugcgcucugacgccccuauugggaaguguaacagcgagugcaucacacccaauggcuccaucccgaacgauaaaccuuuucagaaugucaacagaauuacguacggcgcuuguccccgguauguuaagcagaauacccuuaaacuggccacagggaugcgcaacgugccugaaaagcaaaccagaggaaucuucggcgcgauugccggguuuaucgagaauggaugggaaggcaugauggacgggugguacggauuccggcaccagaacagcgagggcacaggccaggcugccgaucucaaaucuacccaagcugccauuaaucagaucaacgggaagcugaauagacuuaucgagaaaacgaacgaaaaguuucaucagauugagaaggaguucuccgaaguggaaggacgcauccaggaccuggagaaauaugucgaggauacaaagauugaccucuggagcuacaaugccgaacugcugguggcucucgagaaccaacacaccaucgaucugaccgacucugaaaugaacaaacuuuucgagcggacaagaaagcagcugcgcgaaaaugcggaggauaugggcaacgggugcuuuaaaauuuaucauaagugugacaaugccugcaucggauccauucggaacggcaccuacgaucacgacguuuacagagacgaggcucucaauaaccgcuuccagaucaaggggguggaacugaaaagcggcuauaaggauuggauccuuuggauuuccuuugccaucucuugcuuccugcucugugucgugcugcugggauuuauuaugugggccugccagaaaggcaauauccgguguaacauuugcaucuga

SEQ ID NO: 201189 - RNA, 1698 nt, Artificial Sequence
  derived and/or modified CDS sequence (opt5) from hemagglutinin__InfluenzaA__AFM72230
augaaggccaaacugcucgugcugcuuugcaccuucacagcuacguacgccgacaccaucuguauuggcuaucacgcgaacaauagcacagauaccgucgacacaguucuggagaagaacgugaccgugacacauuccgucaaucuccuggaagauucucacaacgggaaacuuugccugcucaagggaaucgcuccccugcagcugggcaauuguagcguggccggguggauucucggaaacccugagugcgaacugcuuaucuccaaaaagucuuggagcuacauuguugagaccccgaaucccgaaaacggcacguguuauccuggguacuuugccgacuaugaggagcugagagaacaacucuccucugugagcuccuucgagcgguuugaaaucuuccccaaggagagcucuuggccuaaucauaccgucacaggaguguccgcuagcugcucucacaacggcaaauccagcuuuuaccgcaaucugcuuuggcugaccggcaagaacgggcucuaucccaaucugucuaaauccuacguuaacaauaaggagaaagaagugcugguccucuggggagugcaucacccuccgaacaucggcaaccagagagcccuguaccacacagagaaugcuuaugugagcgucguuuccucucauuacagccggcgcuucacccccgaaauugccaagagaccuaaggugcgggaucaggaggggcgcaucaacuauuacuggacgcuucuggaacccggagacacaauuaucuuugaggcgaauggcaaccucauugccccuugguaugcuuucgcccuguccagaggguuuggaagcggcaucauuaccucuaaugcucccauggaugagugugacgccaaaugccagacaccgcaaggcgcgaucaacuccagccuuccuuuccagaaugugcaccccgucaccaucggggaauguccuaaguacgugcggucugccaaacugcgcaugguuaccggacucagaaacauucccagcauccagucccggggccuguuuggggcuauugccggauucaucgagggcggguggacaggaaugguggauggcugguauggcuaccaucaccagaaugaacaagggucuggauacgcugccgaccaaaagagcacgcagaacgccauuaauggcaucaccaacaaagucaauuccgugaucgagaagaugaacacacaguuuaccgcuguugggaaagaguucaauaagcuggaacgcagaauggagaaccucaacaagaaaguggaugacggauuccuggauauuuggacauauaaugcggaacuucugguccuccuggagaacgaacggacccuugacuuucacgacagcaaugugaagaaccuguacgagaaagucaagucucagcucaaaaauaacgccaaggaaaucggcaaugggugcuucgaguuuuaucauaaguguaacaaugagugcauggaauccgugaaaaacggcacguacgauuaucccaaguacagcgaggaaucuaaacugaaucgcgagaagauugacggaguuaaacuggaguccaugggcguguaucagauccucgcuauuuacagcacagucgccuccucucuggugcuucugguuagccucggggccaucuccuucuggaugugcucuaacggaagccugcaguguagaaucugcauuuga

SEQ ID NO: 201190 - RNA, 1701 nt, Artificial Sequence
  derived and/or modified CDS sequence (opt5) from hemagglutinin__InfluenzaA__AFM72246
augaagaccaucauugcccugagcuacauccucugccugguguucgcucagaaacuucccggcaacgacaauuccacagccacgcugugucucgggcaccaugcggucucuaacggaacccugguuaagacaauuaccaaugaucaaaucgaggugacaaacgcuaccgaacuugugcagagcuccucuacaggcagaauuugcgacagcccucaccagauccuggauggggagaauuguacccucaucgacgcccugcugggagauccgcauugcgacggcuuucagaacaaagaaugggaucucuucgucgagcgguccaaggccuauucuaauuguuaccccuaugacgugccugauuacgcuagccugcgcucccuuguugccagcucugggacgcuggaauuuaacaaugaguccuucaacuggaccggaguggcucaaaauggcacaagcucugccugcaaaagacgguccaacaagagcuuuuucucucgccucaauuggcugcaccagcuuaaguauaaauaccccgcgcugaacgucaccaugccuaauaacgagaaguuugacaaacucuauauuuggggcgugcaucaccccuccacagauagcgaccagaucuccauuuacgcccaggcuucugggagaguuaccgugagcacgaagcggucccaacagacagucaucccuaacauuggaagcucuccgugggugcgcggcguguccagcagaaucucuauuuacuggaccaucgucaaacccggggauauccugcugauuaauagcacaggaaaccucaucgccccucggggcuauuucaagauucgcuccgggaagucuagcaucaugagauccgacgcucccauuggaaaauguaauagcgaaugcaucaccccuaacggcucuauccccaaugacaagccguuucagaacguuaaucggauuaccuacggcgccuguccucgcuaugugaaacagaacacacugaagcuggcgacggggaugagaaaugugcccgagaaacaaacccggggaaucuucggcgccauugcuggguuuaucgaaaacggaugggagggcauggucgaugggugguacggauuccgccaccaaaauuccgagggcacaggccaggccgcugaccuuaagagcacccaggccgccauuaaccagaucaaugggaaacucaacagacugaucgaaaagacaaaugagaaguuucaucagauugaaaaagaguucucugaaguggagggacggauccaggaucuugagaaguauguugaagacaccaaaauugaucugugguccuacaacgcugagcuccugguggcgcuggaaaaccaacacacgaucgaccucacagauagcgagaugaauaagcuguucgaaagaaccaaaaagcagcuucgcgagaacgccgaggacaugggcaaugggugcuuuaagauuuaucauaaaugugauaacgcuugcaucggauccauucggaauggcaccuacgaccacgaugucuacagagacgaagcccugaacaaucgcuuccagaucaaggggguggagcucaaaucuggcuauaaggacuggauccuguggauuagcuuugccaucuccugcuuccuucuguguguugugcuccugggauuuauuaugugggcuugccagaaaggcaacauccgguguaauauuugcaucuga

SEQ ID NO: 201191 - RNA, 1701 nt, Artificial Sequence
  derived and/or modified CDS sequence (opt5) from hemagglutinin__InfluenzaA__AFM72257
augaagaccaucauugcccugagcuacauccucugccugguguucgcucagaaacuucccgucaacgacaauuccacagccacgcugugucucggccaccaugcgguuccuaacgggacccuggugaagacaauuaccaaugaucacaucgaggugacaaacgcuaccgaacuuguccaaucuagcuccacaggaagaauuugcgacucuccgcaucagauccuggauggcgagaauuguacccucaucgacgcccugcugggggauccccacugcgacggauuucagaacaaagaaugggaucucuucguggagcggagcacggccuauuccaauuguuacccuuaugacguucccgauuacgcuucucugcgcagccuuguggccuccagcggcacccuggaauuuaacaaugagucuuucaacuggacaggggucgcucagaauggaaccuccagcgccugcaagagacggucuauuaaauccuuuuucagccgccucaacuggcugcaucaacuuaauuauaaguacccugcgcugaacgugacaaugcccaauaacgagaaguuugacaaacucuauaucuggggcguucaccacccuucuaccgauuccgaccagauuagcaucuacgcccaggcuuccggcagagugacggucucuacaaagcggagccagcaaaccgugauuccgaacaucgggucccgccccugggugagaggagucagcucuggcauuuccaucuacuggacaaucguuaaaccuggggauauucugcugaucaauagcaccggaaaccucauugcuccccggggcuauuucaagauccgcucugggaaaagcuccauuaugagaucuaaugccccuaucggaaaguguaacagcgaaugcaucacccccaauggcuccauuccgaacgacaagccuuuucagaaugugaaccggaucacauacggcgccuguccccgcuaugugaaacagaauacgcugaaacuugcgaccgggaugagaaacgucccugagaagcagacacggggaauuuucggcgccaucgcuggguuuauugaaaauggaugggagggcaugguggacgggugguacggauuccgccaucaaaacagcgagggcaccggccaggccgcugaucugaagucuacacaggccgccaucaaucaaaucaacgggaaacucaauagacugauugaaaagaccaacgagaaauuucaccagaucgaaaaggaguucuccgaaguugagggacggauucaggaccuugagaaguauguggaagauacgaaaaucgaccuguggagcuacaacgcugagcuccuggucgcgcuggaaaaucagcauacaauugaucucaccgacucugagaugaacaagcuguucgaaagaacccgcaaacaacuucgggagaaugccgaggauaugggcaacgggugcuuuaagaucuaucacaaaugugacaaugcuugcauuggauccaucagaaacggcacauacgaucacgacguguaccgcgaugaagcccugaauaaccgguuccagaucaaggggguugagcucaagagcggcuauaaagacuggauucuguggaucuccuuugccauuucuugcuuccuucugugugugguccuccugggauuuaucaugugggcuugccagaagggcaauauuagauguaacaucugcaucuga

SEQ ID NO: 201192 - RNA, 1701 nt, Artificial Sequence
  derived and/or modified CDS sequence (opt5) from hemagglutinin__InfluenzaA__AFM72268
augaagaccaucauugcccugagcuacauccucugccugguguucgcucagaaacuucccgucaacgacaauuccacagccacgcugugucucggccaccaugcgguuccuaacgggacccuggugaagacaauuaccaaugaucacaucgaggugacaaacgcuaccgaacuuguccaaucuagcuccacaggaagaauuugcgacucuccgcaucagauccuggauggcgagaauuguacccucaucgacgcccugcugggggauccccacugcgacggauuucagaacaaagaaugggaucucuucguggagcggagcacggccuauuccaauuguuacccuuaugacguucccgauuacgcuucucugcgcagccuuguggccuccagcggcacccuggaauuuaacaaugagucuuucaacuggacaggggucgcucagaauggaaccuccagcgccugcaagagacggucuauuaaauccuuuuucagccgccucaacuggcugcaucaacuuaauuauaaguacccugcgcugaacgugacaaugcccaauaacgagaaguuugacaaacucuauaucuggggcguucaccacccuaacaccgauucugaccagauuuccaucuacgcccaggcuagcggcagagugacggucuccacaaagcggucucagcaaaccgugauuccgaauaucgggagccgccccugggugagaggagucuccagcggcauuucuaucuacuggacaaucguuaaaccuggggauauucugcugaucaacuccaccggaaaucucauugcuccccggggcuauuucaagauccgcagcgggaaaucuagcauuaugagauccaacgccccuaucggaaaguguaauucugaaugcaucacccccaacggcagcauuccgaaugacaagccuuuucagaacgugaaucggaucacauacggcgccuguccccgcuaugugaaacagaacacgcugaagcuggcgaccgggaugagaaaugucccugagaaacagacacggggaauuuucggcgccaucgcuggguuuauugaaaacggaugggagggcaugguggacgggugguacggauuccgccaucaaaauuccgagggcaccggccaggccgcugaucuuaagagcacacaggccgccaucaaccaaaucaaugggaaacucaacagacugauugaaaagaccaacgagaaauuucaccagaucgaaaaggaguucucugaaguugagggacggauucaggaccuugagaaguauguggaagauacgaaaaucgaccugugguccuacaaugcugagcuccuggucgcgcuggaaaaccagcauacaauugaucucaccgacagcgagaugaauaagcuguucgaaagaacccgcaaacaacuucgggagaacgccgaggauaugggcaaugggugcuuuaagaucuaucacaaaugugacaacgcuugcauuggaucuaucagaaauggcacauacgaucacgacguguaccgcgaugaagcccugaacaaucgguuccagaucaaggggguugagcucaaguccggcuauaaagacuggauucuguggaucagcuuugccauuuccugcuuccuucugugugugguccuccugggauuuaucaugugggcuugccagaagggcaacauuagauguaauaucugcaucuga

SEQ ID NO: 201193 - RNA, 1701 nt, Artificial Sequence
  derived and/or modified CDS sequence (opt5) from hemagglutinin__InfluenzaA__AFM72279
augaagaccaucauugcccugagcuacauccucugccugguguucgcucagaaacuucccgucaacgacaauuccacagccacgcugugucucggccaccaugcgguuccuaacgggacccuggugaagacaauuaccaaugaucacaucgaggugacaaacgcuaccgaacuuguccaaucuagcuccacaggaagaauuugcgacucuccgcaucagauccuggauggcgagaauuguacccucaucgacgcccugcugggggauccccacugcgacggauuucagaacaaagaaugggaucucuucguggagcggagcacggccuauuccaauuguuacccuuaugacguucccgauuacgcuucucugcgcagccuuguggccuccagcggcacccuggaauuuaacaaugagucuuucaacuggacaggggucgcucagaauggaaccuccagcgccugcaagagacggucuauuaaauccuuuuucagccgccucaacuggcugcaucaacuuaaguauaaguacccugcgcugaaugugacaaugcccaacaaugagaaauuugacaagcucuauaucuggggcguucaccacccuucuaccgauuccgaccagauuagcaucuacgcccaggcuuccggcagagugacggucucuacaaaacggagccagcaaaccgugauuccgaacaucggguccaagcauugggugcgcggagucagcucuagaauuuccaucuacuggacaaucguuaaacccggcgauauucugcugaucaacagcaccgggaaucucauugccccucggggauauuucaagauccgcucuggcaagagcuccauuaugagaucuaacgcucccaucgggaaauguaauagcgaaugcaucaccccuaacggauccauucccaaugacaagccguuucagaacgugaaucggaucacauacggcgccuguccucgcuaugugaaacagaacacgcugaaacuugcgaccggcaugagaaauguccccgagaagcagacacgggggauuuucggagccaucgcuggcuuuauugaaaacgggugggagggaaugguggacggcugguacggguuccgccaccaaaauagcgagggaaccggccaggccgcugaucugaagucuacacaggccgccaucaaccaaaucaauggcaaacucaacagacugauugaaaagaccaaugagaaguuucaucagaucgaaaaagaguucuccgaaguugaggggcggauucaggaccuugagaaguauguggaagauacgaaaaucgaccuguggagcuacaacgcugagcuccuggucgcgcuggaaaaccagcacacaauugaucucaccgacucugagaugaauaagcuguucgaaagaacccgcaaacaacuucgggagaacgccgaggauaugggaaauggcugcuuuaagaucuaucacaagugugacaacgcuugcauuggguccaucagaaauggaacauacgaucaugacguguaccgcgaugaagcccugaacaaucgguuccagaucaaaggcguugagcucaagagcggguauaaagacuggauucuguggaucuccuuugccauuucuugcuuccuucugugugugguccuccugggcuuuaucaugugggcuugccagaagggaaacauuagauguaauaucugcaucuga

SEQ ID NO: 201194 - RNA, 1701 nt, Artificial Sequence
  derived and/or modified CDS sequence (opt5) from hemagglutinin__InfluenzaA__AFM72290
augaagaccaucauugcccugagcuacauccucugccugguguucgcucagaaacuucccgucaacgacaauuccacagccacgcugugucucggccaccaugcgguuccuaacgggacccuggugaagacaauuaccaaugaucacaucgaggugacaaacgcuaccgaacuuguccaaucuagcuccacaggaagaauuugcgacucuccgcaucagauccuggauggcgagaauuguacccucaucgacgcccugcugggggauccccacugcgacggauuucagaacaaagaaugggaucucuucguggagcggagcacggccuauuccaauuguuacccuuaugacguucccgauuacgcuucucugcgcagccuuguggccuccagcggcacccuggaauuuaacaaugagucuuucaacuggacaggggucgcucagaauggaaccuccagcgccugcaagagacggucuauuaaauccuuuuucagccgccucaacuggcugcaucaacuuaaggacaaguauccugcgcugaaugugacaaugcccaacaaugagaaauuugauaagcucuacaucuggggcguucaccacccuucuaccgacuccgaucagauuagcaucuaugcccaggcuuccggcagagugacggucucuacaaaacggagccagcaaaccgugauuccgaacaucggguccaagcauugggugcgcggagucagcucuagaauuuccaucuacuggacaaucguuaaacccggcgacauucugcugaucaacagcaccgggaaucucauugccccucggggauacuucaagauccgcucuggcaagagcuccauuaugagaucuaacgcucccaucgggaaauguaauagcgaaugcaucaccccuaacggauccauucccaaugacaagccguuucagaacgugaaucggaucacauauggcgccuguccucgcuacgugaaacagaacacgcugaaacuugcgaccggcaugagaaauguccccgagaagcagacacgggggauuuucggagccaucgcuggcuuuauugaaaacgggugggagggaaugguggauggcugguauggguuccgccaccaaaauagcgagggaaccggccaggccgcugaccugaagucuacacaggccgccaucaaccaaaucaauggcaaacucaacagacugauugaaaagaccaaugagaaguuucaucagaucgaaaaagaguucuccgaaguugaggggcggauucaggaucuugagaaguacguggaagacacgaaaaucgaucuguggagcuauaacgcugagcuccuggucgcgcuggaaaaccagcacacaauugaccucaccgauucugagaugaauaagcuguucgaaagaacccgcaaacaacuucgggagaacgccgaggacaugggaaauggcugcuuuaagaucuaccacaagugugauaacgcuugcauuggguccaucagaaauggaacauaugaccaugauguguaccgcgacgaagcccugaacaaucgguuccagaucaaaggcguugagcucaagagcggguacaaagacuggauucuguggaucuccuuugccauuucuugcuuccuucugugugugguccuccugggcuuuaucaugugggcuugccagaagggaaacauuagauguaauaucugcaucuga

SEQ ID NO: 201195 - RNA, 1701 nt, Artificial Sequence
  derived and/or modified CDS sequence (opt5) from hemagglutinin__InfluenzaA__AFM72301
augaagaccaucauugcccugagcuacauccucugccugguguucucccagaaacuucccggcaacgacaauucuacagcuacgcugugucucgggcaccaugccgucccuaacggaaccauuguuaagacaaucaccaaugaucaaauugaggugacaaacgcgaccgaacuggugcagagcuccucuacaggcgggaucugcgacagcccgcaccagauccuugauggagagaauuguacccugauugacgcucuccugggcgauccccagugcgacggguuucaaaacaaaaagugggaucuguucgucgaaagauccaaagccuauucuaauuguuacccuuaugacgugcccgauuacgccagccuccggucccugguugcuagcucuggaacgcuugaguuuaacaaugaauccuucaacugggccggcgugacccagaauggcacaagcucugcuugcaagcgcagauccaacaagagcuuuuucucucggcugaauuggcucacccagcugaaauauaaguacccugcccuuaacgucacaaugcccaauaacgagaaauuugacaagcuguauaucuggggagugcaucacccuguuaccgauuccgaccagauuagccucuacgcgcaagccuccgggcgcaucacggugucuacaaaaagaagccagcagaccgucauuccgaacaucggcuaccggccccgcgugagagauauuuccagccggaucucuaucuauuggacaauugugaagccuggggacauccugcugauuaauuccaccggaaaccucaucgcuccccgcggcuacuucaagauuagaagcgggaaaucuagcaucaugcgguccgacgccccuaucggaaaguguaauucugagugcauuacccccaacggcagcaucccgaaugauaaaccuuuucagaacgucaaucgcauuacauauggcgcuugucccagauacguuaagcaaaacacgcugaaacuugccaccgggaugcggaaugugccugaaaagcagacacgcggaaucuucggcgcgauugccggguuuaucgagaacggaugggaaggcaugguggacgggugguauggauucagacaucaaaauuccgagggcaccggccaggcugccgaucugaaaagcacacaggcugccaucaaccagauuaaugggaagcucaaccggcugaucggaaagaccaaugagaaauuucaccagauugaaaaggaguucucugaagucgagggcagaauccaagaccuugaaaaauacguggaggauacgaagauugaccugugguccuauaacgccgagcuccugguugcucuggaaaaccagcacacaaucgaucucaccgacagcgagaugaauaaacuguucgaacgcaccaagaagcagcuucgggagaacgcggaagauauggggaauggaugcuuuaaaauuuaccauaagugugacaacgccugcaucgagucuaucagaaauggcacauacgaucacgacguguaucgcgacgaggcucugaacaaucgguuccagauuaaaggggucgaacucaaguccggcuacaaagauuggauccuguggauuagcuuugccaucuccugcuuccuucuguguguggcccuccugggauuuauuaugugggcuugccaaaagggcaacaucagauguaauaucugcauuuga

SEQ ID NO: 201196 - RNA, 1701 nt, Artificial Sequence
  derived and/or modified CDS sequence (opt5) from hemagglutinin__InfluenzaA__AFM72312
augaagaccaucauugcccugagcuacauccucugccugguguucgcucagaaacuucccggcaacgacaauuccacagccacgcugugucucgggcaccaugcggucccuaacggaaccauuguuaagacaaucaccaaugaucaaauugaggugacaaacgcuaccgaacuggugcagucuagcuccacaggcgggaucugcgacucuccgcaccagauccuugauggagagaauuguacccugauugacgcccuccugggcgauccccagugcgacggguuucaaaacaaaaagugggaucuguucgucgaaagaagcaaagccuauuccaauuguuacccuuaugacgugcccgauuacgcuucucuccggagccugguugccuccagcggaacgcuugaguuuaacaaugaaucuuucaacuggaccggcgugacacagaauggcaccuccagcgcuugcaagcgcagaucuaacaaguccuuuuucagccggcugaauuggcucacacaucugaaauauaaguacccugcccuuaacgucaccaugcccaauaacgagaaauuugacaagcuguauaucuggggagugcaccauccuguuacggauucugaccagauuaaccucuacgcgcaggccuccgggcgcaucacagugagcaccaaaagaucccaacagacagucauuccgaauaucggcuaccggccccgcgugagagauauuccuucucggaucagcaucuauuggaccauugugaagcccggggacauccugcugauuaacuccaccggaaaucucaucgcuccucgcggcuacuucaagauuagaagcgggaaaucuuccaucaugcggagcgacgcccccaucggaaaguguaacucugagugcauuacaccgaauggcagcaucccuaacgauaaacccuuucagaaugucaaccgcauuacguauggcgcuuguccuagauacguuaagcagaauacccugaaacuugccacagggaugcggaacgugcccgaaaagcaaacccgcggaaucuucggcgcgauugccggguuuaucgagaauggaugggaaggcaugguggacgggugguauggauucagacaccagaacuccgagggcacaggccaggcugccgaucugaaaucuacccaagcugccaucaaucagauuaacgggaagcucaaucggcugaucggaaagacgaacgagaaauuucaccagauugaaaaggaguucagcgaagucgagggcagaauccaggaccuugaaaaauacguggaggauacaaagauugaccugugguccuauaacgccgagcuccugguugcucuggaaaaucaacauaccaucgaucucaccgacagcgagaugaacaaacuguucgaacgcacaaagaagcagcuucgggagaaugcggaagauauggggaacggaugcuuuaaaauuuaccacaagugugacaaugccugcaucggcucuaucagaaacgggaccuacgaucaugacguguaucgcgacgaggcucugaauaaccgguuccagauuaaaggcgucgagcucaaguccggauacaaagauuggauccuguggauuagcuuugccaucucuugcuuccuucuguguguggcccuccugggcuuuauuaugugggcuugccagaaggggaauaucagauguaacaucugcauuuga

SEQ ID NO: 201197 - RNA, 1701 nt, Artificial Sequence
  derived and/or modified CDS sequence (opt5) from hemagglutinin__InfluenzaA__AFM72323
augaaggccaucauugcucugagcuacauccucugccugguguucgcccagaaacuucccggcaacgacaauuccaccgcgacacugugucucgggcaccaugcugucccuaacggaacgauuguuaagaccaucacaaaugaucaaauugaggugaccaacgccacagaacuggugcagucuagcuccaccggcgggaucugcgacucuccgcaccagauccuugauggagagaauuguacacugauugacgcccuccugggcgauccccagugcgacggguuucaaaacaaaaagugggaucuguucgucgaaagaagcaaggcuuauuccaauuguuacccuuaugacgugcccgauuacgccucucuccggagccugguugcuuccagcggaacccuugaguuuaacaaugaaucuuucaacuggacgggcgugacccagaauggcacauccagcgccugcaaacgcagaucuaacaaguccuuuuucagccggcugaauuggcucacccaucugaaauauaaguacccugcgcuuaacgucacaaugcccaauaacgagaaauuugacaagcuguauaucuggggagugcaccauccuguuaccgauucugaccagauuaaccucuacgcccaggcuuccgggcgcaucacggugagcacaaaaagaucccaacagaccgucauuccgaauaucggcuaccggccccgcgugagagauaacccuucucggauuagcaucuauuggacaaucgugaagcccggggacauucugcugaucaauuccaccggaaaccucauugccccucgcggcuacuucaagaucagaagcgggaaaucuuccauuaugcggagcgacgcucccaucggaaaguguaauucugagugcaucaccccgaacggcagcauuccuaaugauaaacccuuucagaacgucaaucgcaucacauauggcgccuguccuagauacguuaagcagaacacgcugaaacuugcgaccgggaugcggaaugugcccgaaaagcaaacacgcggaauuuucggcgccaucgcuggguuuauugagaacggaugggaaggcaugguggacgggugguauggauucagacaccaaaauuccgagggcaccggccaggccgcugaucugaaaucuacacaggccgccaucaaccagaucaaugggaagcucaaccggcugauuggaaagaccaacgagaaauuucaccagaucgaaaaggaguucagcgaagucgagggccgcauucaggaccuugaaaaauacguggaggauacgaagaucgaccugugguccuauaaugcugagcuccugguugcgcuggaaaaccaacauacaauugaucucaccgacagcgagaugaauaaacuguucgaaagaaccaagaagcagcuucgggagaacgccgaagauauggggaauggaugcuuuaaaaucuaccacaagugugacaacgcuugcauuggcucuaucagaaaugggacauacgaucaugacguguaucgcgacgaggcccugaacaaucgguuccagaucaaaggcgucgagcucaaguccggauacaaagauuggauucuguggaucagcuuugccauuucuugcuuccuucuguguguggcucuccugggcuuuaucaugugggccugccagaaggggaacauuagauguaauaucugcaucuga

SEQ ID NO: 201198 - RNA, 1701 nt, Artificial Sequence
  derived and/or modified CDS sequence (opt5) from hemagglutinin__InfluenzaA__AFM72334
augaagaccaucauugcccugagcuacauccucugccugguguucgcucagaaacuucccggcaacgacaauuccacagccacgcugugucucgggcaccaugcggucccuaacggaaccauuguuaagacaaucaccaaugaucaaauugaggugacaaacgcuaccgaacuggugcagucuagcuccacaggcgagaucugcaauucuccgcaccagauccuugacggggaaaacuguacccugauugaugcccuccugggagacccccagugcgauggcuuucaaaauaaaaagugggaccuguucgucgagagaagcaaagcccauuccaacuguuauccuuacgaugugcccgacuaugcuucucuccggagccugguugccuccagcgggacgcuugaauuuaauaacgagucuuucaauuggaccggagugacacagaacggcaccuccagcgcuugcauccgcagaucuaauaacuccuuuuucagccggcugaauuggcucacacaccugaacuuuaaguacccugcccuuaacgucaccaugcccaauaacgagcaguucgauaagcuguauauuuggggcgugcuccauccugggacguacaaagaccagaucuuucuguaugcgcaagccucuggacgcauuacaguuuccaccaagagaagccagcaggcugugaucccgaauauuggcucccggccccgcgucagaaacaucccuucucgggugagcaucuacuggacaauugugaaacccggggauauccugcucauuaauuccaccggaaaccugaucgccccucgcggcuacuucaagauuagaagcgggaaaucuuccaucaugcggagcgacgcucccaucggaaaguguaauucugccugcauuaccccgaacggcagcaucccuaaugauaagcccuuucagaacgucaaucgcauuacauauggcgcguguccuagauacguuaaacaaaacacgcuuaagcuggccaccgggaugcggaaugugcccgaaaaacagacacgcggaaucuucggcgcuauugccggguuuaucgagaacggaugggaaggcaugguggacgggugguauggauucagacaccaaaauuccgagggccggggccaggcugccgaccucaagucuacccaggccgcuaucgaucagauuaacgggaaacugaacagacuuaucggaaagacaaaugagaaauuccaccagauugaaaaggaguuuagcgaagucgagggccgcauccaagaccuggaaaaguacguggaggauaccaaaauugaccucugguccuauaacgcggagcugcugguugcccucgaaaaucagcauacgaucgaucugacagacagcgagaugaacaaacuuuucgaaaagaccaagaaacagcugcgggagaaugcugaagauauggggaacggaugcuuuaagauuuaccacaagugugacaaugccugcaucggcucuaucagaaacgggaccuaugaucaugacguguaccgcgaugaggcccucaauaaccgguuccagauuaaaggcgucgagcugaaguccggauacaaagacuggauccuuuggauuagcuuugcuaucucuugcuuccugcucuguguggcccugcugggcuuuauuaugugggcgugccaaaaggggaauaucagauguaacaucugcauuuga

SEQ ID NO: 201199 - RNA, 1701 nt, Artificial Sequence
  derived and/or modified CDS sequence (opt5) from hemagglutinin__InfluenzaA__AFM72345
augaagaccaucauugcccugagcuacauccucugccugguguucgcucagaaacuucccggcaacgacaauuccacagccacgcugugucucgggcaccaugcggucccuaacggaaccauuguuaagacaaucaccaaugaucaaauugaggugacaaacgcuaccgaacuggugcagucuagcuccacaggcgggaucugcgacucuccgcaccagauccuugauggagagaauuguacccugauugacgcccuccugggcgauccccagugcgacggguuucaaaacaaaaagugggaucuguucgucgaaagaagcaaagccuauuccaauuguuacccuuaugacgugcccgauuacgcuucucuccggagccugguugccuccagcggaacgcuugaguuuaacaaugaaucuuucgacuggaccggcgugacacagaacggcaccuccagcgcuugcaagcgcagaucuaauaaguccuuuuucagccggcugaacuggcucacacaucugaaauauaaguacccugcccuuaaugucaccaugcccaacaaugagaaauuugauaagcuguauaucuggggagugcaccauccuguuacggacucugaucagauuucccucuacacacaggcgagcgggcgcaucaccguguccacaaaaagaucucaacagaccgucauuccgaacaucggcuuccggccccgcgugagagacauuagcucccggaucagcaucuacuggaccauugugaagccuggggacauccugcugauuaacucuacaggaaaucucaucgcuccccgcggcuauuuuaagauuagauccgggaaaagcucuaucaugcggagcgaugccccuaucggaaaguguaacuccgagugcauuacgcccaauggcucuaucccgaacgacaaaccuuuccagaaugucaaccgcauuaccuacggcgccugucccagauauguuaagcagaauacacugaaacuugcuaccgggaugcggaacgugccugaaaagcaaacacgcggaaucuuuggcgccauugcgggguucaucgagaauggaugggaaggcaugguggaugggugguacggauuuagacaccagaacagcgagggcaccggccaggccgcugaccugaaauccacgcaagccgcuaucaaucagauuaacgggaagcucaaucggcugaucggaaagacaaacgagaaauuccaccagauugaaaaggaguucagcgaagucgagggcagaauccaggaucuugaaaaauauguggaggacaccaagauugaucuguggucuuacaaugccgagcuccugguugcccuggaaaaccaacauaccaucgaccucacagauuccgagaugaacaaacuguuugaacgcaccaagaagcagcuucgggagaaugcugaagacauggggaacggaugcuucaaaauuuaucacaagugugauaaugcgugcaucggcagcaucagaaacgggacauacgaccaugacguguaccgcgaugaggcccugaauaaccgguuucagauuaaaggcgucgagcucaagucuggauauaaagacuggauccuguggauuuccuucgcuaucagcugcuuucuucuguguguggcccuccugggcuucauuaugugggccugccagaaggggaauaucagauguaacaucugcauuuga

SEQ ID NO: 201200 - RNA, 1701 nt, Artificial Sequence
  derived and/or modified CDS sequence (opt5) from hemagglutinin__InfluenzaA__AFM72356
augaagaccaucauugcccugagcuacauccucugccugguguucgcucagaaacuucccggcaacgacaauuccacagccacgcugugucucgggcaccaugcggucccuaacggaaccauuguuaagacaaucaccaaugaucaaauugaggugacaaacgcuaccgaacuggugcagucuagcuccacaggcgggaucugcgacucuccgcaccagauccuugauggagagaauuguacccugauugacgcccuccugggcgauccccagugcgacggguuucaaaacaaaaagugggaucuguucgucgaaagaagcaaagccuauuccaauuguuacccuuaugacgugcccgauuacgcuucucuccggagccugguugccuccagcggaacgcuugaguuuaacaaugaaucuuucaacuggaccggcgugacacagaauggcaccuccagcgcuugcaagcgcagaucuaacaaguccuuuuucagccggcugaauuggcucacacaucugaaauuuaaguauccugcccuuaacgucaccaugcccaauaacgagaaauucgacaagcuguacaucuggggagugcaccauccugggacggauaacgaccagauuaaucucuauguucaggcgucuggccgcaucacaguguccaccaaaagaagccaacagacagucauuccgaacaucgggucccggccccgcgugagagaugugccuucucggauuagcaucuacuggaccaucgucaagcccggagacauucugcugaucuccagcaccggcaaucucauugccccucgcggguacuuuaagaucagaucuggaaaauccagcauuaugcggucugacgcucccaucggcaaguguaacagcgagugcaucacaccgaauggcuccauuccuaacgauaaacccuuccagaauguuaaccgcaucacguauggggccuguccuagauacgugaagcagaauacccugaaacuugcuacaggaaugcggaacgugcccgaaaagcaaacccgcggcauuuuuggggccaucgcgggauucauugagaauggcugggaagggauggucgacggaugguauggcuuuagacaccagaacucugagggcacagggcaggccgcugaucugaaaagcacccaagccgcuaucaaucagaucaacggaaagcucaaucggcugauuggcaagacgaacgagaaauuccaccagaucgaaaaggaguucuccgaaguggaggggcgcauucaggaccuugaaaaauacguugaggauacaaagaucgaccuguggagcuauaacgccgagcuccugguggcccuggaaaaucaacauaccauugaucucaccgacucugagaugaacaaacuguuugaaagaacaaagaagcagcuucgggagaaugcugaagauaugggaaacggcugcuucaaaaucuaccacaagugugacaaugcgugcauuggguccaucagaaacggcaccuaugaucaugacgucuaccgcgacgaggcccugaauaaccgguuucagaucaaaggaguggagcucaagagcggcuacaaagauuggauucuguggaucucuuucgcuauuuccugcuuucuucuguguguugcccuccugggguucaucaugugggccugccagaagggaaauauuagauguaacaucugcaucuga

SEQ ID NO: 201201 - RNA, 1701 nt, Artificial Sequence
  derived and/or modified CDS sequence (opt5) from hemagglutinin__InfluenzaA__AFM72367
augaagaccaucauugcccugagcuacauccucugccugguguucgcucagaaacuucccggcaacgacaauuccacagccacgcugugucucgggcaccaugcggucccuaacggaaccauuguuaagacaaucaccaaugaucaaauugaggugacaaacgcuaccgaacuggugcagucuagcuccacaggcgggaucugcgacucuccgcaccagauccuugauggagagaauuguacccugauugacgcccuccugggcgauccccagugcgacggguuucaaaacaaaaagugggaucuguucgucgaaagaagcaaagccuauuccaauuguuacccuuaugacgugcccgauuacgcuucucuccggagccugguugccuccagcggaacgcuugaguuuaacaaugaaucuuucaacuggaccggcgugacacagaauggcaccuccagcgcuugcaagcgcagaucuaacaaguccuuuuucagccggcugaauuggcucacacaucugaaauuuaaguauccugcccuuaacgucaccaugcccaauaacgagaaauucgacaagcuguacaucuggggagugcaccauccuguuacggauaacgaccagauuaaucucuaugcgcaggccucugggcgcaucacaguguccaccaaaagaagccaacagacagucauuccgaacaucggcucccggccccgcgugagagaugugccuucucggauuagcaucuacuggaccaucgucaagcccggggacauucugcugaucuccagcaccggaaaucucauugcuccucgcggcuacuuuaagaucagaucugggaaauccagcauuaugcggucugacgcccccaucggaaaguguaacagcgagugcaucacaccgaauggcuccauuccuaacgauaaacccuuccagaauguuaaccgcaucacguauggcgcuuguccuagauacgugaagcagaauacccugaaacuugccacagggaugcggaacgugcccgaaaagcaaacccgcggaauuuuuggcgcgaucgccggguucauugagaauggaugggaaggcauggucgacgggugguauggauuuagacaccagaacucugagggcacaggccaggcugccgaucugaaaagcacccaagcugccaucaaucagaucaacgggaagcucaaucggcugauuggaaagacgaacgagaaauuccaccagaucgaaaaggaguucuccgaaguggagggccgcauucaggaccuugaaaaauacguugaggauacaaagaucgaccuguggagcuauaacgccgagcuccugguggcucuggaaaaucaacauaccauugaucucaccgacucugagaugaacaaacuguuugaaagaacaaagaagcagcuucgggagaaugcggaagauauggggaacggaugcuucaaaaucuaccacaagugugacaaugccugcauuggcuccaucagaaacgggaccuaugaucaugacgucuaccgcgacgaggcucugaauaaccgguuucagaucaaaggcguggagcucaagagcggauacaaagauuggauucuguggaucucuuucgccauuuccugcuuucuucuguguguugcccuccugggcuucaucaugugggcuugccagaaggggaauauuagauguaacaucugcaucuga

SEQ ID NO: 201202 - RNA, 1701 nt, Artificial Sequence
  derived and/or modified CDS sequence (opt5) from hemagglutinin__InfluenzaA__AFM72378
augaagaccaucauugcccugagcuacauccucugccugguguucgcucagaaacuucccggcaacgacaauuccacagccacgcugugucucgggcaccaugcggucccuaacggaaccauuguuaagacaaucaccaaugaucaaauugaggugacaaacgcuaccgaacuggugcagucuagcuccacaggcgagaucugcaauucuccgcaccagauccuugacggggaaaacuguacccugauugaugcccuccugggagacccccagugcgauggcuuucaaaauaaaaagugggaccuguucgucgagagaagcaaagcccauuccaacuguuauccuuacgaugugcccgacuaugcuucucuccggagccugguugccuccagcgggacgcuugaauuuaauaacgagucuuucaauuggaccggagugacacagaacggcaccuccagcgcuugcauccgcagaucuaauaacuccuuuuucagccggcugaauuggcucacacagcugaacuuuaaguacccugcccuuaacgucaccaugcccaauaacgagcaguucgauaagcuguauauuuggggcgugcaccauccuguuacggacaaagaucaaaucuuucucuacgcgcaggccucugggcgcauuacaguguccaccaagagaagccagcaggcugucaucccgaauauuggauaucggccccgcgugagaaacaucccuucccgggugucuaucuacuggacaauugucaaacccggcgacauccugcugauuaauagcaccgggaaccucaucgccccucgcggauacuucaagauuagauccggcaaaagcucuaucaugcgguccgaugcucccaucgggaaguguaauagcgccugcauuaccccgaacggaucuaucccuaaugacaagcccuuucaaaacguuaaucgcauuacauauggcgcguguccuagauacgugaaacagaacacgcugaaacuugccaccggcaugcggaaugugcccgaaaaacagacacgcgggaucuucggagcuauugccggcuuuaucgagaacgggugggaaggaauggucgacggcugguauggguucagacaccaaaauagcgagggacggggccaggcugccgaucugaaguccacccaggccgcuaucgaccagauuaacggcaaacucaacagacugaucgggaagacaaaugagaaauuccaccaaauugaaaaggaguuuucugaaguggagggacgcauccaggaucuugaaaaguacguugaggacaccaaaauugaucuguggagcuauaacgcggagcuccugguggcccuggaaaaucagcauacgaucgaccucacagauuccgagaugaacaagcuguucgaaaagaccaagaaacagcuucgggagaaugcugaagacaugggcaacgggugcuuuaagauuuaccacaagugugauaaugccugcaucggaagcaucagaaacggcaccuaugaccaugaugucuaccgcgacgaggcccugaauaaccgguuccaaauuaaagggguggagcucaagucuggcuacaaagacuggauccuguggauuuccuuugcuaucagcugcuuccuucuguguguugcccuccugggauuuauuaugugggcgugccagaagggcaauaucagauguaacaucugcauuuga

SEQ ID NO: 201203 - RNA, 1701 nt, Artificial Sequence
  derived and/or modified CDS sequence (opt5) from hemagglutinin__InfluenzaA__AFM72389
augaagaccaucauugcccugagcuacauccucugccugguguucgcucagaaacuucccggcaacgacaauuccacagccacgcugugucucgggcaccaugcggucccuaacggaaccauuguuaagacaaucaccaaugaucaaauugaggugacaaacgcuaccgaacuggugcagucuagcuccacaggcgagaucugcaauucuccgcaccagauccuugacggggaaaacuguacccugauugaugcccuccugggagacccccagugcgauggcuuucaaaauaaaaagugggaccuguucgucgagagaagcaaagcccauuccaacuguuauccuuacgaugugcccgacuaugcuucucuccggagccugguugccuccagcgggacgcuugaauuuaauaacgagucuuucaauuggaccggagugacacagaacggcaccuccagcgcuugcauccgcagaucuaauaacuccuuuuucagccggcugaauuggcucacacaccugaacuuuaaguacccugcccuuaacgucaccaugcccaauaacgagcaguucgauaagcuguauauuuggggcgugcaucacccuguuacggacaaagaucagaucuuucucuacgcgcaagccucugggcgcauuacaguguccaccaagagaagccagcaggcugucaucccgaauauuggauaucggccccgcgugagaaacaauccuucccgggugucuaucuacuggacaaucgucaaacccggcgacauucugcugaucaacagcaccgggaaucucauugccccucgcggauacuucaagaucagauccggcaaaagcucuauuaugcgguccgaugcucccaucgggaaguguaacagcgccugcaucaccccgaauggaucuauuccuaacgacaagcccuuucagaauguuaaccgcaucacauauggcgcguguccuagauacgugaaacaaaauacgcugaaacuugccaccggcaugcggaacgugcccgaaaaacagacacgcgggauuuucggagcuaucgccggcuuuauugagaaugggugggaaggaauggucgacggcugguauggguucagacaccagaacagcgagggacggggccaagcugccgaucugaaguccacccaggccgcuaucgaccagaucaacggcaaacucaauagacugauugggaagacaaacgagaaauuccaucagaucgaaaaggaguuuucugaaguggagggacgcauucaagaucuugaaaaguacguugaggacaccaaaaucgaucuguggagcuauaaugcggagcuccugguggcccuggaaaaccagcacacgauugaccucacagauuccgagaugaauaagcuguucgaaaagaccaagaaacagcuucgggagaacgcugaagacaugggcaaugggugcuuuaagaucuaccauaagugugauaacgccugcauuggaagcaucagaaauggcaccuaugaccacgaugucuaccgcgacgaggcccugaacaaucgguuccagaucaaagggguggagcucaagucuggcuacaaagacuggauucuguggaucuccuuugcuauuagcugcuuccuucuguguguugcccuccugggauuuaucaugugggcgugccaaaagggcaacauuagauguaauaucugcaucuga

SEQ ID NO: 201204 - RNA, 1701 nt, Artificial Sequence
  derived and/or modified CDS sequence (opt5) from hemagglutinin__InfluenzaA__AFM72400
augaagaccaucauugcccugagcuacauccucugccugguguucgcucagaaacuucccggcauugacaacuccacagccacgcugugucucgggcaccaugcggucccuaauggaaccaucguuaagacaauuaccaacgaucaaaucgaggugacaaaugcuaccgaacuggugcagucuagcuccacaggcgagaucugcgacucuccgcaccagauucuugauggggaaaacuguacccugaucgacgcccuccugggagauccccagugcgacggcuuucaaaauaaaaagugggaucuguucgucgagagaagcaaagccuauuccaacuguuacccuuaugacgugcccgauuacgcuucucuccggagccugguugccuccagcgggacgcuugaauuuaauaacgagucuuucaauugggcuggagugacccagaacggcacauccagcgccugcaagcgcggcucuaauaacuccuuuuucagcagacugaauuggcucacccauucuaaguuuaaauauccugcgcugaacgucacaaugcccaauaacgaggaguucgacaaacuuuacauuuggggagugcugcacccugggaccgauaacgaccagaucuuucucuaugcccaggcuuccggccggauuacgguuagcacaaagcgcucccaacagaccgugaucccgaauauugggucuagaccccggguccgcaacaucccuagcagaaucuccauuuacuggacaaucgugaagcccggagauauucugcugaucaauagcaccggcaaccucauugccccucggggguacuucaaaauccgcucuggaaaguccagcaucaugagaucugacgcucccauuggcaaguguaauagcgaaugcaucaccccgaacggcuccauuccuaaugacaaacccuuucagaacgugaaucggaucacauauggggccuguccucgcuacgucaagcagaacacgcugaaacuugcgaccggaaugagaaauguucccgaaaagcaaacacggggcauuuucggggccaucgcuggauuuaucgagaacggcugggaggggaugguggauggaugguauggcuuccgccaucaaaauucugaaggcauugggcaggccgcugaccugaaaagcacccaggccgccaucgaucagauuaacggaaagcucaauagacugaucggcaaaacaaacgagaaguuccaccagauugaaaaggaguuuuccgaaguggaggggcggauccaggaccuugagaaauacgucgaagauaccaagauugaccuguggagcuauaacgcugagcuccugguggcgcuggaaaaucaacacacgaucgaucucacagacucugagaugaacaaacuguucgaaaagaccaaaaagcagcuuagagagaaugccgaggauaugggaaacggcugcuuuaagaucuaccauaaaugugacaaugcuugcauuggguccauccgcaacggcaccuaugaucacgacguuuaccgggacgaagcccugaauaacagauuccagauuaagggaguggagcucaaaagcggcuacaaggauuggauccuguggauuucuuuugccaucuccugcuuccuucugugugucgcucuccugggguuuaucaugugggccugccagaaaggaaauauucgcuguaacaucugcauuuga

SEQ ID NO: 201205 - RNA, 1701 nt, Artificial Sequence
  derived and/or modified CDS sequence (opt5) from hemagglutinin__InfluenzaA__AFM72411
augaagaccaucauugcccugagcuacauccucugccugguguucgcucagaaacuucccggcauugacaacuccacagccacgcugugucucgggcaccaugcggucccuaauggaaccaucguuaagacaauuaccaacgaucaaaucgaggugacaaaugcuaccgaacuggugcagucuagcuccacaggcgagaucugcgacucuccgcaccagauucuugauggggaaaacuguacccugaucgacgcccuccugggagauccccagugcgacggcuuucaaaauaaaaagugggaucuguucgucgagagaagcaaagccuauuccaacuguuacccuuaugacgugcccgauuacgcuucucuccggagccugguugccuccagcgggacgcuugaauuuaauaacgagucuuucaauugggcuggagugacccagaacggcacauccagcgccugcaagcgcggcucuaauaacuccuuuuucagcagacugaauuggcucacccagucuaaguuuaaauauccugcgcugaacgucacaaugcccaauaacgaggaguucgacaaacuuuacauuuggggagugcaucacccuguuaccgauaacgaccagaucuuucuguaugcccaggcuuccgggcggauuacggugagcacaaagcgcucccagcagaccgucaucccgaauauuggcucuagaccccgggugcgcaacaucccuagcagaaucuccauuuacuggacaaucgugaagcccggggauauucuccugaucaauagcaccggaaaccugauugccccucggggcuacuucaaaauccgcucugggaaguccagcaucaugagaucugacgcucccauuggaaaguguaauagcgaaugcaucaccccgaacggcuccauuccuaaugacaaacccuuucagaacgucaaucggaucacauauggcgccuguccucgcuacguuaagcaaaacacgcucaaacuggcgaccgggaugagaaaugugcccgaaaagcagacacggggaauuuucggcgccaucgcuggguuuaucgagaacggaugggagggcaugguggaugggugguauggauuccgccaucaaaauucugaaggcauuggccaagccgcugaccuuaaaagcacccaggccgccaucgaucagauuaacgggaagcugaauagacucaucggaaaaacaaacgagaaguuccaccagauugaaaaggaguuuuccgaagucgagggccggauccaagacuucgagaaauacguggaagauaccaagauugaccuguggagcuauaacgcugagcuucugguugcgcucgaaaaucagcacacgaucgaucugacagacucugagaugaacaaacuguuugaaaagaccaaaaagcagcucagagagaaugccgaggauauggggaacggaugcuucaagaucuaccauaaaugugacaaugcuugcauuggcuccauccgcaacgggaccuaugaucacgacguguaccgggacgaagcccugaauaacagauuucagauuaagggcgucgagcuuaaaagcggauacaaggauuggauccuguggauuucuuucgccaucuccugcuuucuccuguguguggcccuucugggcuucaucaugugggcuugccaaaaagggaauauucgcuguaacaucugcauuuga

SEQ ID NO: 201206 - RNA, 1701 nt, Artificial Sequence
  derived and/or modified CDS sequence (opt5) from hemagglutinin__InfluenzaA__AFM72422
augaagaccaucauugcccugagcuacauccucugccugguguucgcucagaaacuucccggcaacgacaauuccacagccacgcugugucucgggcaccaugcggucccuaacggaaccauuguuaagacaaucaccaaugaucaaauugaggugacaaacgcuaccgaacuggugcagucuagcuccacaggcgagaucugcgacucuccgcaccagauccuugauggggaaaauuguacccugauugacgcccuccugggagauccccagugcgacggcuuucaaaacaaaaagugggaucuguucgucgagagaagcaaagccuauuccaauuguuacccuuaugacgugcccgauuacgcuucucuccggagccugguugccuccagcgggacgcuugaauuuaacaaugagucuuucaacuggaccggagugacacagaauggcaccuccagcgcuugcauccgcagaucuaacaauuccuuuuucagccggcugaacuggcucacacaucugaaguuuaaguauccugcccuuaaugucaccaugcccaacaacgaggaguucgacaaacuguacauuuggggcgugcaccauccuguuacggauaaugaccagaucuuucucuaugcgcaggccucugggcgcauuacaguguccaccaagagaagccaacagacagucaucccgaacauuggauuccggccccgcgugagaaauaucccuucccggaucucuauuuacuggaccaucgugaaacccggcgauauucugcugaucaacagcaccgggaaucucauugcuccucgcggauacuuuaagaucagauccggcaaaagcucuaucaugcgguccgacgcccccauugggaaguguaacagcgaaugcaucacaccgaauggaucuauuccuaacgacaagcccuuccagaaugucaaccgcaucacguauggcgcuuguccuagauacguuaaacagaauacccugaaacuugccacaggcaugcggaacgugcccgaaaaacaaacccgcgggauuuuuggagcgaucgccggcuucaucgagaaugggugggagggaaugguggauggcugguauggguucagacaccagaacagcgaaggaauuggccaggcugccgaccugaaguccacacaagcugccaucgaucagauuaauggcaaacucaaccggcugaucgggaagaccaacgagaaauuucaccagauugaaaaggaguucucugaagucgagggaagaauccaggaccuugagaaguacgccgaagauacgaaaauugaccuguggagcuauaaugcugagcuccugguggcgcuggaaaaccaacauacaaucgaucucaccgacuccgagaugaauaagcuguuugaaaagaccaagaaacagcuucgcgagaacgccgaggauaugggcaaugggugcuucaagaucuaccacaagugugacaacgcuugcauuggaagcauccggaauggcacauaugaucaugacguuuacagagacgaagcccugaacaaucgcuuucagauuaaagggguggagcucaagucuggcuacaaagauuggauccuguggauuuccuucgccaucagcugcuuucuucugugugucgcucuccugggauucaucaugugggccugccagaagggcaacauucgguguaauaucugcauuuga

SEQ ID NO: 201207 - RNA, 1701 nt, Artificial Sequence
  derived and/or modified CDS sequence (opt5) from hemagglutinin__InfluenzaA__AFM72433
augaagaccaucauugcccugagcuacauccucugccugguguucgcucagaaacuucccggcaacgacaauuccacagccacgcugugucucgggcaccaugcggucccuaacggaaccauuguuaagacaaucaccaaugaucaaauugaggugacaaacgcuaccgaacuggugcagucuagcuccacaggcgagaucugcgacucuccgcaccagauccuugauggggaaaauuguacccugauugacgcccuccugggagauccccagugcgacggcuuucaaaacaaaaagugggaucuguucgucgagagaagcaaagccuauuccaauuguuacccuuaugacgugcccgauuacgcuucucuccggagccugguugccuccagcgggacgcuugaauuuaacaaugagucuuucaacuggaccggagugacacagaauggcaccuccagcgcuugcauccgcagaucuaacaauuccuuuuucagccggcugaacuggcucacacaucugaaguuuaaguauccugcccuuaaugucaccaugcccaacaacgaggaguucgacaaacuguacauuuggggcgugcaccauccuguuacggauaaugaccagaucuuucucuaugcgcaggccucugggcgcauuacaguguccaccaagagaagccaacagacagucaucccgaacauuggauuccggccccgcgugagaaauaacccuucccggaucucuaucuacuggaccauugugaaacccggcgauauccugcugauuaauagcaccgggaaccucaucgcuccucgcggauacuuuaagauuagauccggcaaaagcucuaucaugcgguccgacgcccccaucgggaaguguaauagcgaaugcauuacaccgaacggaucuaucccuaaugacaagcccuuccagaacgucaaucgcauuacguauggcgcuuguccuagauacguuaaacagaacacccugaaacuugccacaggcaugcggaaugugcccgaaaaacaaacccgcgggaucuuuggagcgauugccggcuucaucgagaacgggugggagggaaugguggauggcugguauggguucagacaccagaauagcgaaggaaucggccaggcugccgaccugaaguccacacaagcugccauugaucagaucaacggcaaacucaaccggcugauugggaagaccaaugagaaauuucaccagaucgaaaaggaguucucugaagucgagggacgcauucaggaccuugagaaguacgccgaagauacgaaaaucgaccuguggagcuauaacgcugagcuccugguggcgcuggaaaaucaacauacaauugaucucaccgacuccgagaugaacaagcuguuugaaaagaccaagaaacagcuuagagagaaugccgaggauaugggcaacgggugcuucaagaucuaccacaagugugacaaugcuugcaucggaagcauucggaacggcacauaugaucaugacguuuacagagacgaagcccugaauaaccgcuuucagaucaaagggguggagcucaagucuggcuacaaagauuggauucuguggaucuccuucgccauuagcugcuuucuucugugugucgcucuccugggauucaucaugugggccugccagaagggcaauauccgguguaacauuugcaucuga

SEQ ID NO: 201208 - RNA, 1701 nt, Artificial Sequence
  derived and/or modified CDS sequence (opt5) from hemagglutinin__InfluenzaA__AFM72444
augaagaccaucauugcccugagcuacauccucugccugguguucgcucagaaacuucccggcaacgacaauuccacagccacgcugugucucgggcaccaugcggucccuaacggaaccauuguuaagacaaucaccaaugaucaaauugaggugacaaacgcuaccgaacuggugcagucuagcuccacaggcgagaucugcgacucuccgcaccagauccuugauggggaaaauuguacccugauugacgcccuccugggagauccccagugcgacggcuuucaaaacaaaaagugggaucuguucgucgagagaagcaaagccuauuccaauuguuacccuuaugacgugcccgauuacgcuucucuccggagccugguugccuccagcgggacgcuugaauuuaacaaugagucuuucaacuggaccggagugacacagaauggcaccuccagcgcuugcauccgcagaucuaacaauuccuuuuucagccggcugaacuggcucacacaucugaaguuuaaguauccugcccuuaaugucaccaugcccaacaacgaggaguucgacaaacuguacauuuggggcgugcaccauccuguuacggauaaugaccagauccuccuguaugcgcaggccucugggcgcauuacaguguccaccaagagaagccaacagacagucaucccgaacauuggauuucggccccgcgugagaaauaacccuucccggaucucuaucuacuggaccauugugaaacccggcgauauccugcucauuaauagcaccgggaaccugaucgcuccucgcggauacuucaagauuagauccggcaaaagcucuaucaugcgguccgacgcccccaucgggaaguguaauagcgaaugcauuacaccgaacggaucuaucccuaaugacaagcccuuucagaacgucaaucgcauuacguauggcgcuuguccuagauacguuaaacagaacacccuuaagcuggccacaggcaugcggaaugugcccgaaaaacaaacccgcgggaucuucggagcgauugccggcuuuaucgagaacgggugggagggaaugguggauggcugguauggguucagacaccagaauagcgaaggaaucggccaggcugccgaccucaaguccacacaagcugccauugaucagaucaacggcaaacugaaccggcuuauugggaagaccaaugagaaauuccaccagaucgaaaaggaguuuucugaagucgagggacgcauucaggaccuggagaaguacgccgaagauacgaaaaucgaccucuggagcuauaacgcugagcugcugguggcgcucgaaaaucaacauacaauugaucugaccgacuccgagaugaacaaacuuuucgaaaagaccaagaaacagcugagagagaaugccgaggauaugggcaacgggugcuuuaagaucuaccacaagugugacaaugcuugcaucggaagcauucggaacggcacauaugaucaugacguuuacagagacgaagcccucaauaaccgcuuccagaucaaagggguggagcugaagucuggcuacaaagauuggauucuuuggaucuccuuugccauuagcugcuuccugcucugugucgcucugcugggauuuaucaugugggccugccagaagggcaauauccgguguaacauuugcaucuga

SEQ ID NO: 201209 - RNA, 1701 nt, Artificial Sequence
  derived and/or modified CDS sequence (opt5) from hemagglutinin__InfluenzaA__AFM72455
augaagaccaucauugcccugagcuacauccucugccugguguucgcucagaaacuucccggcaacgacaauuccacagccacgcugugucucgggcaccaugcggucccuaacggaaccauuguuaagacaaucaccaaugaucaaauugaggugacaaacgcuaccgaacuggugcagucuagcuccacaggcgagaucugcgacucuccgcaccagauccuugauggggaaaauuguacccugauugacgcccuccugggagauccccagugcgacggcuuucaaaacaaaaagugggaucuguucgucgagagaagcaaagccuauuccaauuguuacccuuaugacgugcccgauuacgcuucucuccggagccugguugccuccagcgggacgcuugaauuuaacaaugagucuuucaacuggaccggagugacacagaauggcaccuccagcgcuugcauccgcagaucuaacaauuccuuuuucagccggcugaacuggcucacacagcugaaguuuaaguauccugcccuuaaugucaccaugcccaacaacgaggaguucgacaaacuguacauuuggggcgugcaucacccuguuacggauaaugaccagaucuuucucuaugcgcaagccucugggcgcauuacaguguccaccaagagaagccagcagacagucaucccgaacauuggauuccggccccgcgugagaaauaacccuucccggaucucuaucuacuggaccauugugaaacccggcgauauccugcugauuaauagcaccgggaaccucaucgcuccucgcggauacuuuaagauuagauccggcaaaagcucuaucaugcgguccgacgcccccaucgggaaguguaauagcgaaugcauuacaccgaacggaucuaucccuaaugacaagcccuuccagaacgucaaucgcauuacguauggcgcuuguccuagauacguuaaacaaaacacccugaaacuugccacaggcaugcggaaugugcccgaaaaacagacccgcgggaucuuuggagcgauugccggcuucaucgagaacgggugggagggaaugguggauggcugguauggguucagacaucagaauagcgaaggaaucggccaagcugccgaccugaaguccacacaggcugccauugaucagaucaacggcaaacucaaccggcugauugggaagaccaaugagaaauuucaccagaucgaaaaggaguucucugaagucgagggacgcauucaagaccuugagaaguacgccgaagauacgaaaaucgaccuguggagcuauaacgcugagcuccugguggcgcuggaaaaucagcacacaauugaucucaccgacuccgagaugaacaagcuguuugaaaagaccaagaaacagcuuagagagaaugccgaggauaugggcaacgggugcuucaagaucuaccauaagugugacaaugcuugcaucggaagcauucggaacggcacauaugaucacgacguuuacagagacgaagcccugaauaaccgcuuucagaucaaagggguggagcucaagucuggcuacaaagauuggauucuguggaucuccuucgccauuagcugcuuucuucugugugucgcucuccugggauucaucaugugggccugccaaaagggcaauauccgguguaacauuugcaucuga

SEQ ID NO: 201210 - RNA, 1701 nt, Artificial Sequence
  derived and/or modified CDS sequence (opt5) from hemagglutinin__InfluenzaA__AFM72466
augaagaccaucauugcccugagcuacauccucugccugguguucgcucagaaacuucccggcaacgacaauuccacagccacgcugugucucgggcaccaugcggucccuaacggaaccauuguuaagacaaucaccaaugaucaaauugaggugacaaacgcuaccgaacuggugcagucuagcuccacaggcgagaucugcgacucuccgcaccagauccuugauggggaaaauuguacccugauugacgcccuccugggagauccccagugcgacggcuuucaaaacaaaaagugggaucuguucgucgagagaagcaaagccuauuccaauuguuacccuuaugacgugcccgauuacgcuucucuccggagccugguugccuccagcgggacgcuugaauuuaacaaugagucuuucaacuggaccggagugacacagaauggcaccuccagcgcuugcauccgcagaucuaacaauuccuuuuucagccggcugaacuggcucacacaucugaaguuuaaguauccugcccuuaaugucaccaugcccaacaacgaggaguucgacaaacuguacauuuggggcgugcaccauccuguuacggauaaggaccagaucuuucucuaugcgcaggccucugggcgcauuacaguguccaccaaaagaagccaacagacagucaucccgaauauuggauuccggccccgcgugagaaacaauccuucccggaucucuaucuacuggaccauugugaagcccggcgauauccugcugauuaacagcaccgggaaucucaucgcuccucgcggauacuuuaaaauuagauccggcaagagcucuaucaugcgguccgacgcccccaucgggaaguguaacagcgaaugcauuacaccgaauggaucuaucccuaacgacaaacccuuccagaaugucaaccgcauuacguauggcgcuuguccuagauacguuaagcagaauacccugaaacuugccacaggcaugcggaacgugcccgaaaagcaaacccgcgggaucuuuggagcgauugccggcuucaucgagaaugggugggagggaaugguggauggcugguauggguucagacaccagaacagcgaaggaaucggccaggcugccgaccugaaauccacacaagcugccauugaucagaucaauggcaagcucaaccggcugauugggaaaaccaacgagaaguuucaccagaucgaaaaggaguucucugaagucgagggacgcauucaggaccuugagaaauacgccgaagauacgaagaucgaccuguggagcuauaaugcugagcuccugguggcgcuggaaaaccaacauacaauugaucucaccgacuccgagaugaauaaacuguuugaaaagaccaaaaagcagcuuagagagaacgccgaggauaugggcaaugggugcuucaagaucuaccacaaaugugacaacgcuugcaucggaagcauucggaauggcacauaugaucaugacguuuacagagacgaagcccugaacaaucgcuuucagaucaaggggguggagcucaaaucuggcuacaaggauuggauucuguggaucuccuucgccauuagcugcuuucuucugugugucgcucuccugggauucaucaugugggccugccagaaaggcaacauccgguguaauauuugcaucuga

SEQ ID NO: 201211 - RNA, 1701 nt, Artificial Sequence
  derived and/or modified CDS sequence (opt5) from hemagglutinin__InfluenzaA__AFM72488
augaagaccaucauugcccugagcuacauccucugccugguguucgcucagaaacuucccggcaacgacaauuccacagccacgcugugucucgggcaccaugcggucccuaacggaaccauuguuaagacaaucaccaaugaucaaauugaggugacaaacgcuaccgaacuggugcagucuagcuccacaggcgggaucugcgacucuccgcaccagauccuugauggagagaauuguacccugauugacgcccuccugggcgauccccagugcgacggguuucaaaacaaaaagugggaucuguucgucgaaagaagcaaagccuauuccaauuguuacccuuaugacgugcccgauuacgcuucucuccggagccugguugccuccagcggaacgcuugaguuuaacaaugaaucuuucaacuggaccggcgugacacagaauggcaccuccagcgcuugcaagcgcagaucuaacaauuccuuuuucagccggcugaacuggcucacacagcugaaguuuaaauauccugcccuuaaugucaccaugcccaacaacgagaaguucgacaaacuguacaucuggggagugcaucacccuguuacggauaaugagcagauuuuucucuaugcgcaagccucugggcgcaucacaguguccaccaagagaagccagcagacagucauuccgaacaucggcuuccggccccgcgugagaaauauuccuucccggaucucuaucuacuggaccauugugaaacccggggacauccugcugauuaacagcaccggaaaucucaucgcuccucgcggcuacuuuaagauuagauccggaaagagcucuaucaugcgguccgaugcccccaucgggaaauguaacagcaagugcauuacaccgaauggcucuaucccuaacgacaaacccuuccagaaugucaaccgcauuacguauggcgcuuguccuagauacguuaagcaaaauacccugaaacuugccacagggaugcggaacgugcccgaaaagcagacccgcggaaucuuuggcgcgauugccggguucaucgagaauggaugggaaggcaugguggacgggugguauggauucagacaucagaacagcgagggcaucggccaagcugccgaucugaaauccacacaggcugccauugaccagaucaaugggaagcucaaccggcugauuggaaagaccaacgagaaauuucaccagaucgaaaaggaguucucugaagucgagggccgcauucaagaucuugaaaaauacguggaggacacgaagaucgaucuguggagcuauaaugccgagcuccugguugcucuggaaaaccagcacacaauugaccucaccgauuccgagaugaauaaacuguuugaaaagaccaagaaacagcuuagagagaacgcggaagacauggggaauggaugcuucaagaucuaccauaaaugugauaacgccugcaucggcagcauucggaaugggacauaugaccacgauguguacagagacgaggcucugaacaaucgcuuucagaucaagggcgucgagcucaaaucuggauacaaggacuggauucuguggaucuccuucgccauuagcugcuuucuucuguguguggcccuccugggcuucaucaugugggcuugccaaaaggggaacauccgguguaauauuugcaucuga

SEQ ID NO: 201212 - RNA, 1701 nt, Artificial Sequence
  derived and/or modified CDS sequence (opt5) from hemagglutinin__InfluenzaA__AFM72499
augaagaccaucauugcccugagcuacauccucugccugguguucgcucagaaacuucccggcaacgacaauuccacagccacgcugugucucgggcaccaugcggucccuaacggaaccauuguuaagacaaucaccaaugaucaaauugaggugacaaacgcuaccgaacuggugcagucuagcuccacaggcgggaucugcgacucuccgcaccagauccuugauggagagaauuguacccugauugacgcccuccugggcgauccccagugcgacggguuucaaaacaaaaagugggaucuguucgucgaaagaagcaaagccuauuccaauuguuacccuuaugacgugcccgauuacgcuucucuccggagccugguugccuccagcggaacgcuugaguuuaacaaugaaucuuucaacuggaccggcgugacacagaauggcaccuccagcgcuugcaagcgcagaucuaacaauuccuuuuucagccggcugaacuggcucacacagcugaaguuuaaauauccugcccuuaaugucaccaugcccaacaacgagaaguucgacaaacuguacaucuggggagugcaucacccuguuacggauaaugaccagauuuuucucuaugcgcaagccucugggcgcaucacaguguccaccaagagaagccagcagacagucauuccgaacaucggcucccggccccgcgugagaaauauuccuucucggaucagcaucuacuggaccauugugaaacccggggauauccugcugauuaacuccaccggaaaucucaucgcuccucgcggcuacuucaagauuagaagcgggaagucuuccaucaugcggagcgacgcccccaucggaaaauguaacucugagugcauuacaccgaauggcagcaucccuaacgacaagcccuuucagaaugucaaccgcauuacguauggcgcuuguccuagauacguuaaacaaaauacccugaaacuugccacagggaugcggaacgugcccgaaaaacagacccgcggaaucuucggcgcgauugccggguuuaucgagaauggaugggaaggcaugguggaugggugguauggauucagacaucagaacuccgagggcaucggccaagcugccgaccugaagucuacacaggcugccauugaucagaucaaugggaaacucaaccggcugauuggaaagaccaacgagaaguuccaccagaucgaaaaagaguuuagcgaagucgagggccgcauucaagaccuugaaaaguacguggaggauacgaaaaucgaccugugguccuauaaugccgagcuccugguugcucuggaaaaccagcacacaauugaucucaccgacagcgagaugaauaagcuguucgaaaagaccaagaagcagcuuagagagaacgcggaagauauggggaauggaugcuuuaaaaucuaccauaagugugacaacgccugcaucggcucuauucggaaugggacauaugaucacgacguguacagagacgaggcucugaacaaucgcuuccagaucaaaggcgucgagcucaaguccggauacaaagauuggauucuguggaucagcuuugccauuucuugcuuccuucuguguguggcccuccugggcuuuaucaugugggcuugccaaaaggggaacauccgguguaauauuugcaucuga

SEQ ID NO: 201213 - RNA, 1698 nt, Artificial Sequence
  derived and/or modified CDS sequence (opt5) from hemagglutinin__InfluenzaA__AFM72521
augaaggugaaacugcucguccugcuuugcaccuucacagccacguacgcugacaccaucuguauuggcuaucacgccaacaauagcacagauaccguugacacagugcuggagaagaacgugaccgucacacauuccgugaaucuccuggaaaacucucacaaugggagacuuugccugcucaaaggaaucgcgccccugcagcugggcaacuguagcguugcuggguggauucucggaaauccugagugcgaacugcuuaucuccaaggagucuuggagcuacauuguggaaaaaccgaaccccgagaauggcaccuguuauccugggcauuuugccgauuacgaggaacugcgggagcaacucuccucugucagcucccuggaacgcuucgagaucuuucccaaggagagcucuuggccuaaccacacggugaccggaguuuccgccagcugcucucauaauggcgaauccagcuucuauagaaaccuucuguggcucacaggcaagaaugggcuguaccccaaccugucuaaauccuaugcuaauaacaaggagaaagaagugcucguccuguggggagugcaccacccuccgaacaucggcaaucagaaggcccuuuaccauaccgagaacgcuuacgugagcgucguuuccucucacuauagccggaaauuuacacccgaaauugccaagcgcccuaaggugagagaccaggaggggcggaucaauuacuauuggacccugcucgagcccggagauacgauuaucuucgaagcgaacggcaaucugauugccccucgcuacgcuuuugcccuuuccagaggguucggaagcggcaucauuaacucuaaugcucccauggacaaaugugaugccaagugccagacaccgcaaggcgcgaucaacuccagccugccuuuucagaaugugcaucccgucaccaucggggaguguccuaaauaugugcggucugccaagcuccgcaugguuacaggacugagaaacauucccagcauccagucccggggccuguucggggcuauugccggauuuaucgaaggcggguggaccggaaugguggacggcugguacggcuaucaccaccagaaugagcaagggucuggauacgcugccgaucagaaaagcacccagaacgccauuaauggcaucacaaacaaggucaauuccgugaucgagaaaaugaacacgcaguucaccgcuguugggaaggaauuuaacaagcucgagcgcagaauggaaaaucugaacaaaaagguggacgauggauucauugacaucuggacauacaaugcggagcuucugguccuccuggaaaacgagcggacccuugauuuccaugacagcaaugugaaaaaccuguaugaaaaggucaaaucucaacucaagaauaacgccaaggagauuggcaaugggugcuuugaguucuaccacaaauguaacgacgaaugcauggaguccgugaagaauggcacauaugauuaccccaaauauagcgaagagucuaagcugaaccgcgagaaaaucgacggaguuaagcuggaauccaugggcguguaccagauucucgcuaucuauagcaccgucgccuccucucuggugcuucugguuagccucggggccaucuccuuuuggaugugcucuaauggaagccugcaguguagaauuugcaucuga

SEQ ID NO: 201214 - RNA, 1698 nt, Artificial Sequence; identical to SEQ ID NO: 201213
  derived and/or modified CDS sequence (opt5) from hemagglutinin__InfluenzaA__AFM72532

SEQ ID NO: 201215 - RNA, 1698 nt, Artificial Sequence; identical to SEQ ID NO: 201213
  derived and/or modified CDS sequence (opt5) from hemagglutinin__InfluenzaA__AFM72543

SEQ ID NO: 201216 - RNA, 1698 nt, Artificial Sequence
  derived and/or modified CDS sequence (opt5) from hemagglutinin__InfluenzaA__AFM72554
augaaggugaaacugcucguccugcuuugcaccuucacagccacguacgcugacaccaucuguauuggcuaucacgccaacaauagcacagauaccguugacacagugcuggagaagaacgugaccgucacacauuccgugaaucuccuggaaaacucucacaaugggagacuuugccugcucaaaggaaucgcgccccugcagcugggcaacuguagcguugcuggguggauucucggaaauccugagugcgaacugcuuaucuccaaggagucuuggagcuacauuguggaaaaaccgaaccccgagaauggcaccuguuauccugggcauuuugccgauuacgaggaacugcgggagcaacucuccucugucagcucccuggaacgcuucgagaucuuucccaaggagagcucuuggccuaaccacacggugaccggaguuuccgccagcugcucucauaauggcgaauccagcuucuauagaaaccuucuguggcucacaggcaagaaugggcuguaccccaaccugucuaaauccuaugcuaauaacaaggagaaagaagugcucguccuguggggagugcaccacccuccgaacaucggcaaucagaaggcccuuuaccauaccgagaacgcuuacgugagcgucguuuccucucacuauagccggaaauuuacacccgaaauugccaagcgcccuaaggugagagaccaggaggggcggaucaauuacuauuggacccugcucgagcccggagauacgauuaucuucgaagcgaacggcaaucugauugccccucgcuacgcuuuugcccuuuccagaggguucggaagcggcaucauuaacucuaaugcucccauggacaaaugugaugccaagugccagacaccgcaaggcgcgaucaacuccagccugccuuuucagaaugugcaucccgucaccaucggggaguguccuaaauaugugcggucugccaagcuccgcaugguuacaggacugagaaacauucccagcauccagucccggggccuguucggggcuauugccggauuuaucgaaggcggguggaccggaaugguggacggcugguacggcuaucaccaccagaaugagcaagggucuggauacgcugccgaucagaaaagcacccagaacgccauuaauggcaucacaaacaaggucaauuccgugaucgagaaaaugaacacgcaguucaccgcuguugggaaggaauuuaacaagcucgagcgcagaauggaaaaucugaacaaaaagguggacgauggauucauugacaucuggacauacaaugcggagcuucugguccuccuggaaaacgagcggacccuugauuuccaugacagcaaugugaaaaaccuguaugaaaaggucaaaucucaacucaagaauaacgccaaggagauuggcaaugggugcuuugaguucuaccacaaauguaacgacgaaugcauggaguccgugaagaauggcacauaugauuaccccaaauauagcgaagagucuaagcugaaccgcgagaaaaucgacgaaguuaagcuggaguccaugggaguguaccagauucucgcuaucuauagcaccgucgccuccucucuggugcuucugguuagccucggcgccaucuccuuuuggaugugcucuaaugggagccugcaguguagaauuugcaucuga

SEQ ID NO: 201217 - RNA, 1701 nt, Artificial Sequence
  derived and/or modified CDS sequence (opt5) from hemagglutinin__InfluenzaA__AFM72565
augaagaccaucauugcccugagcuacauccucugccugguguucgcucagaaacuucccggcaacgacaauuccacagccacgcugugucucgggcaccaugcggucccuaacggaaccauuguuaagacaaucaccaaugaucaaauugaggugacaaacgcuaccgaacuggugcagucuagcuccacaggcgagaucugcgacucuccgcaccagauccuugauggggaaaauuguacccugauugacgcccuccugggagauccccagugcgacggcuuucaaaacaaaaagugggaucuguucgucgagagaagcaaagccuauuccaauuguuacccuuaugacgugcccgauuacgcuucucuccggagccugguugccuccagcgggacgcuugaauuuaacaaugagucuuucaacuggaccggagugacacagaauggcaccuccagcucuugcauccgcagauccaacaauagcuuuuucucucggcugaacuggcucacacaucugaaguuuaaguauccugcucuuaaugucaccaugcccaacaacgagaaauucgacaagcuguacauuuggggcgugcaccauccugggacggauaaugaccagaucuuuccguaugcccaggcguccggacgcauuacaguuagcaccaaaagaucccaacagacagugauccccaacauuggcucucggccucgcgucagaaauauccccagccggaucuccauuuacuggaccaucgugaagccuggggauauucuccugaucaacagcaccggaaaucugauugcuccccgcggcuacuucaaaaucagaucugggaaguccagcaucaugcggucugacgccccgauuggaaaguguaacagcgaaugcaucacaccuaauggcuccauucccaacgacaaaccuuuucagaaugugaaccgcaucacguauggcgccugucccagauacgucaagcagaauacccucaaacuggcuacagggaugcggaacguucccgagaagcaaacccgcggaauuuucggcgccaucgcgggguuuaucgaaaauggaugggagggcaugguggaugggugguauggauucagacaccagaacucugagggcauuggccaggccgcugaccuuaaaagcacacaagccgcuaucgaucagauuaaugggaagcugaaccggcucaucggaaaaaccaacgaaaaguuccaccagauugagaaggaauuuuccgagguggaaggcagaauccaggaccuggagaaauacgucgaggauacgaagauugaccuuuggagcuauaaugccgaacugcucguggcccuggagaaccaacauacaaucgaucugaccgacucugaaaugaauaaacucuucgagaagaccaaaaagcagcugcgcgaaaacgcugaggauauggggaauggaugcuuuaagaucuaccacaaaugugacaacgcgugcauuggcuccauccggaaugggacauaugaucaugacguuuacagagacgaggcccuuaacaaucgcuuccagauuaagggcguggaacugaaaagcggauacaaggauuggauccucuggauuucuuuugcuaucuccugcuuccugcuuugugucgcccugcucggcuuuaucaugugggccugccagaaagggaacauucgguguaauaucugcauuuga

SEQ ID NO: 201218 - RNA, 1701 nt, Artificial Sequence
  derived and/or modified CDS sequence (opt5) from hemagglutinin__InfluenzaA__AFM72576
augaagaccaucauugcccugagcuacauccucugccugguguucgcucagaaacuucccggcaacgacaauuccacagccacgcugugucucgggcaccaugcggucccuaacggaaccauuguuaagacaaucaccaaugaucaaauugaggugacaaacgcuaccgaacuggugcagucuagcuccacaggcgagaucugcgacucuccgcaccagauccuugauggggaaaauuguacccugauugacgcccuccugggagauccccagugcgacggcuuucaaaacaaaaagugggaucuguucgucgagagaagcaaagccuauuccaauuguuacccuuaugacgugcccgauuacgcuucucuccggagccugguugccuccagcgggacgcuugaauuuaacaaugagucuuucaacuggaccggagugacacagaauggcaccuccagcucuugcauccgcggcuccaacaauagcuuuuucucuagacugaacuggcucacacaucugaaguuuaaguauccugcucuuaaugucaccaugcccaacaacgagaaauucgacaagcuguacauuuggggagugcaccauccugggacggauaaugaccagaucuuuccguaugcccaggcguccggccggauuacaguuagcaccaaacgcucccaacagacagugauccccaacauugggucuagaccucggguccgcaauauccccagcagaaucuccauuuacuggaccaucgugaagccuggagauauucuccugaucaacagcaccggcaaucugauugcuccccggggguacuucaaaauccgcucuggaaaguccagcaucaugagaucugacgccccgauuggcaaguguaacagcgaaugcaucacaccuaauggcuccauucccaacgacaaaccuuuucagaaugugaaccggaucacguauggggccuguccccgcuacgucaagcagaauacccucaaacuggcuacaggaaugagaaacguucccgagaagcaaacccggggcauuuucggggccaucgcgggauuuaucgaaaauggcugggaggggaugguggauggaugguauggcuuccgccaccagaacucugagggcauugggcaggccgcugaccuuaaaagcacacaagccgcuaucgaucagauuaauggaaagcugaacagacucaucggcaaaaccaacgaaaaguuccaccagauugagaaggaauuuuccgagguggaagggcggauccaggaccuggagaaauacgucgaggauacgaagauugaccuuuggagcuauaaugccgaacugcucguggcccuggagaaccaacauacaaucgaucugaccgacucugaaaugaauaaacucuucgagaagaccaaaaagcagcugagagaaaacgcugaggauaugggaaauggcugcuuuaagaucuaccacaaaugugacaacgcgugcauuggguccauccgcaauggcacauaugaucaugacguuuaccgggacgaggcccuuaacaauagauuccagauuaagggaguggaacugaaaagcggcuacaaggauuggauccucuggauuucuuuugcuaucuccugcuuccugcuuugugucgcccugcucggguuuaucaugugggccugccagaaaggaaacauucgcuguaauaucugcauuuga

SEQ ID NO: 201219 - RNA, 1698 nt, Artificial Sequence
  derived and/or modified CDS sequence (opt5) from hemagglutinin__InfluenzaA__AFM72799
augaaggugaaacugcucguccugcuuugcaccuucacagccacguacgcugacaccaucuguauuggcuaucacgccaacaauagcacagauaccguugacacagugcuggagaagaacgugaccgucacacauuccgugaaucuccuggaagauaaccacaaugggaaacuuugccugcucaagggaaaagcgccccugcagcugggcaacuguucuguugcuggguggauccucggaaauccugagugcggccugcuuauuagcaaggaauccuggucuuacaucguggagagaccgaaccccgaaaaugggaccuguuauccuggacauuuugccgacuacgaggagcugcgggaacaacucagcuccgucucuagcuucgagcgcuuugaaauuuuccccaaggaguccagcuggccuaaccacacggugaccggcguuucugccuccugcagccauaauggcgagucuuccuuuuauaaaaaccugcuuuggcugacagggaagaauggacucuaccccaaccugagcaaaucuuaugcuaauaacaaggaaaaagaggugcugguccucuggggcgugcaccacccuccgaacaucgggaaucagaugacccuguaccauaaggaaaacgccuacguguccgucguuagcucccacuauucuagaaaguucacacccgagaucgcuaaacggccuaaggugcgcgaucaggaaggaagaauuaauuacuauuggacccuucuggagcccggcgacacgaucauuuuugaggccaacgggaaucucaucgcgccucgguacgccuucgcucugagccgcggauuuggcuccggcauuaucaacagcaaugcccccauggaugaaugugacgcuaaaugccagacaccgcaaggggccauuaacucuucccuuccuuuccagaaugugcaucccgucaccaucggagaguguccuaaguaugugagaagcgcgaaacugcggaugguuacaggccuccgcaacauccccucuauucagagcagagggcuguuuggagccaucgcuggcuucauugaagggggauggaccggcaugguggauggcugguacggguaucaccaccagaaugagcaaggauccggcuacgccgcugaccagaagucuacccagaacgccaucaaugggauuacaaacaaagucaauagcgugaucgaaaagaugaacacgcaguuuaccgccguuggaaaggaguucaacaaacuggagcggcgcauggaaaaucucaacaagaaaguggaugacggcuucaucgaugucuggacauacaaugcugagcugcuugugcugcucgaaaacgagagaacccuggacuuucaugacuccaaugucaagaaccuuuaugaaaaagugaagaaucaacugaagaacaaugcgaaagagauugggaacggcugcuucgaguuuuaccacaaguguaaugaugaaugcauggagagcguuaaaaacggaacauaugacuaccccaaguauucugaagaguccaaacucagccgggagaagaucgauggcgugaagcuggaaucuaugggggucuaccagauucuggccaucuauuccaccguggcuagcucccucguucugcuugugucucugggagccauuagcuucuggaugugcuccaauggcucucuccagugucgcaucugcaucuga

SEQ ID NO: 201220 - RNA, 1698 nt, Artificial Sequence; identical to SEQ ID NO: 201219
  derived and/or modified CDS sequence (opt5) from hemagglutinin__InfluenzaA__AFM72810

SEQ ID NO: 201221 - RNA, 1698 nt, Artificial Sequence; identical to SEQ ID NO: 201219
  derived and/or modified CDS sequence (opt5) from hemagglutinin__InfluenzaA__AFM72821

SEQ ID NO: 201222 - RNA, 1701 nt, Artificial Sequence
  derived and/or modified CDS sequence (opt5) from hemagglutinin__InfluenzaA__AFM72852
augaaggccauccuggugguccuccuguacaccuucgcuacagccaacgcggacacgcuuugcauuggcuaucacgcuaauaacagcaccgauacaguugacaccgugcuggagaaaaaugugacagucacccauuccgugaaccuccuggaagauaagcacaaugggaaacuuuguaagcugagaggaguugcuccccuccaucugggcaaaugcaacaucgccggguggauucugggaaauccugagugugaaucucucagcacagccuccucuuggagcuacaucguggagaccccguccucugacaacggcacgugcuaucccggggauuuuauugacuacgaagaacugcgggagcagcuuagcuccgucagcucuuucgaacgcuuugagaucuucccuaagaccuccagcuggcccaaucacgauucugacaagggagugacagccgcuuguccucaugccggcgcgaaauccuuuuauaagaaccugaucuggcucguuaaaaagggcaauagcuaccccaaacugucuaaguccuauauuaacgauaaggggaaagaagugcuuguccuguggggaauccaccacccuagcaccuccgccgaccaacagucucucuaccagaaugcugaugccuacguguucgugggcagcuccagauauagcaagacauuuaaaccggagauugcuauccggcccaagguccgcgacagagaggggcggaugaacuacuauuggacccugguugaaccuggagauaaaauuacguucgaggccacaggcaaucugguggugccccgcuacgcguuugccauggaaagaaacgcugggucuggaaucauuaucuccgacaccccuguccaugacugcaacacaaccugucagacccccaagggcgccaucaauacaagccucccguuccaaaacauucacccuaucacgauuggcaaaugccccaaguaugugaagucuaccaaacugcggcuugcuacagggcugcgcaauaucccuagcauucaguccagaggacucuuuggcgccaucgccggguucaucgagggaggcuggaccgggaugguugauggaugguacggcuaucaucaccagaacgaacagggcucuggguacgcugcggaccugaaguccacacaaaaugccauugaugagaucaccaacaaagugaauagcgucauugagaagaugaacacgcaguuuacagcugugggaaaagaguucaaucaccuugagaagcggaucgaaaaccugaauaagaaaguugacgauggcuuccucgacauuuggaccuacaacgccgagcugcuggugcuccuggaaaaugagcgcacccuugauuaucaugacagcaacgucaagaaucuguacgagaaagugagaucucagcucaagaacaacgccaaagaaaucgggaauggauguuuugaguucuaucacaagugcgauaacacauguauggaauccgucaagaauggcaccuacgacuaucccaaauacagcgaggaagcuaagcugaaccgggaggagaucgauggggugaaacuugaaucuacacgcauuuaucagauccuggccauuuacuccacgguugcgagcucccucgugcuggucgugucucugggcgcuaucagcuuuuggaugugcuccaauggaucucuccaaugcagaauuuguaucuga

SEQ ID NO: 201223 - RNA, 1701 nt, Artificial Sequence
  derived and/or modified CDS sequence (opt5) from hemagglutinin__InfluenzaA__AFM72862
augaaggccauccuggugguccuccuguacaccuucgcuacagccaacgcggacacgcuuugcauuggcuaucacgcuaauaacagcaccgauacaguugacaccgugcuggagaagaaugugacagucacccauuccgugaaccuccuggaagauaagcacaaugggaaacuuuguaagcugagaggaguugcuccccuccaucugggcaaaugcaacaucgccggguggauucugggaaauccugagugugaaucucucagcacagccuccucuuggagcuacaucguggagaccccguccucugacaacggcacgugcuaucccggggauuuuauugacuacgaagaacugcgggagcagcuuagcuccgucagcucuuucgaacgcuuugagaucuucccuaagaccuccagcuggcccaaucacgauucuaacaagggagugacagccgcuuguccucaugccggcgcgaaauccuuuuauaagaaucugaucuggcucguuaaaaagggcaacagcuaccccaaacugucuaauuccuauauuaacgacaaggggaaggaagugcuuguccuguggggaauccaccacccuagcaccuccgccgaucaacagucucucuaccagaaugcugacgccuacguguucgugggcagcuccagauauagcaaaacauuuaagccggagauugcuauccggcccaaaguccgcgauagagaggggcggaugaacuacuauuggacccugguugaaccuggagacaagauuacguucgaggccacaggcaaccugguggugccccgcuacgcguuugccauggaaagaaaugcugggucuggaaucauuaucuccgauaccccuguccaugacugcaacacaaccugucagacccccaaaggcgccaucaauacaagccucccguuccaaaacauucacccuaucacgauuggcaagugccccaaauaugugaagucuaccaagcugcggcuugcuacagggcugcgcaauaucccuagcauucaguccagaggacucuuuggcgccaucgccggguucaucgagggaggcuggaccgggaugguugacggaugguacggcuaucaucaccagaacgaacagggcucuggguacgcugcggaucugaaaagcacacaaaaugccauugacgagaucaccaacaaggucaauuccgugauugagaaaaugaacacgcaguuuacagcugugggaaaggaguucaaucaccuugagaaacggaucgaaaaccugaauaagaagguugaugacggcuuccucgauauuuggaccuacaacgccgagcugcuggugcuccuggaaaaugagcgcacccuugacuaucaugauagcaacgucaaaaaccuguacgagaaggugagaucucagcucaaaaauaacgccaaggaaaucgggaauggauguuuugaguucuaucacaaaugcgacaacacauguauggaauccgucaagaauggcaccuacgauuaucccaaguacagcgaggaagcuaaacugaaccgggaggagaucgacggggugaaacuugaaucuacacgcauuuaucagauccuggccauuuacuccacgguugcgagcucccucgugcuggucgugucucugggcgcuaucagcuuuuggaugugcuccaauggaucucuccaaugcagaauuuguaucuga

SEQ ID NO: 201224 - RNA, 1701 nt, Artificial Sequence
  derived and/or modified CDS sequence (opt5) from hemagglutinin__InfluenzaA__AFM72872
augaagaccaucauugcccugagcuacacacucugccugguguucgcucagaaacuucccggcaacgacaauuccacggccacccugugucucgggcaccaugcggucccuaacggaacaaucguuaagaccauuacaaaugaucaaaucgaggugaccaacgcuacagaacuggugcagucuagcuccaccggcgagauuugcgacucuccgcaccagauccuugaugggaaaaauuguacgcugaucgacgcccuccugggagauccccagugcgacggcuuucaaaacaagaaaugggaucuguucgucgaaagaagcaaggccuauuccaauuguuacccuuaugacgugcccgauuacgcuucucuccggagccugguugccuccagcgggacccuugaguuuaacaaugaaucuuucaacuggacaggagugacccagaauggcacauccagcgcuugcauucgcagaucuaagaacuccuuuuucagccggcugaauuggcucacccaucugaacuuuaaauauccugcccuuaaugucacgaugcccaacaacgagcaguucgacaagcuguacaucuggggcgugcaccauccugggacagauaaagaccagauuuuuccguaugcgcaagccucuggacgcaucaccguuuccacaaagagaagccagcagaccgcuauucccaauaucggcucccggccucgcgugagaaacauucccucucggaucagcaucuacuggaccauugucaaaccuggggauauccuccugauuaauuccacaggaaaccugaucgcuccccgcggcuacuucaagauuagaagcgggaagucuuccaucaugcggagcgacgccccgaucggaaaauguaauucugagugcauuacgccuaacggcagcauccccaaugacaagccuuuucagaacgugaaucgcauuaccuauggcgccugucccagauacgugaaacaaaacacacucaagcuggcgaccgggaugcggaauguccccgaaaaacagacacgcggaaucuucggcgccauugcuggguuuaucgagaacggaugggaaggcaugguugaugggugguauggauucagacaccaaaauuccgagggccggggccaggccgcugaccuuaagucuacccaggccgccaucgaucagauuaacgggaaacugaauagacucaucggaaagacgaacgagaaguuccaccagauugaaaaagaguuuagcgaaguggagggccgcauccaagaccuggaaaaguacguggaggauacaaaaauugaccuuugguccuauaacgcugagcugcucgucgcgcuggaaaaucagcauaccaucgaucugaccgacagcgagaugaacaaacucuucgaaaagacaaagaagcagcugcgggagaaugccgaagauauggggaacggaugcuuuaaaauuuaccacaagugugacaaugcuugcaucggcucuaucagaaacgggaccuaugaucaugacguguaccgcgacgaggcccuuaauaaccgguuccagauuaaaggcguugagcugaaguccggauacaaagauuggauccucuggauuagcuuugccaucucuugcuuccugcuuuguguggcucugcucggcuuuauuaugugggccugccaaaaggggaauaucagauguaacaucugcauuuga

SEQ ID NO: 201225 - RNA, 1701 nt, Artificial Sequence
  derived and/or modified CDS sequence (opt5) from hemagglutinin__InfluenzaA__AFM72883
augaagaccaucauugcccugagcuacauccucugccugguguucgcucagaaacuucccggcaacgacaauuccacagccacgcugugucucgggcaccaugcggucccuaacggaaccauuguuaagacaaucaccaaugaucaaauugaggugacaaacgcuaccgaacuggugcaaaauucuagcacaggcgagaucugcgacuccccgcaccagauccuugaugggaaaaacuguacccugauugacgcccuccugggagauccccagugcgacggcuuucagaauaagaaaugggaucuguucgucgaaagaucuaaggccuauagcaacuguuacccuuaugacgugcccgauuacgcuucccuccggucucugguugccagcuccgggacgcuugaguuuaauaacgaaucuuucaauuggaccggagugacacagaacggcaccucuuccgcuugcauccgcagaagcaagaauagcuuuuucucccggcugaacuggcucacacaucugaauuuuaaauauccugcccuuaacgucaccaugcccaacaaugagcaguucgacaagcuguacauuuggggcgugcaccauccuguuacggauaaagaccagaucuuucucuaugcgcaagccagcgggcgcauuacagugucuaccaagagaucccagcagacagucaucccgaacauuggaagccggccccgcgugagaaauaucccuacccggaucuccauuuacuggaccaucgugaaacccggcgauauucugcugaucaacucuacagggaaucucauugcuccucgcggauacuucaagaugcagagcggcaaguccagcaucaugagaucugacgcccccaucgggaaauguaacuccgagugcauuacgccgaauggaagcaucccuaacgacaagcccuuucaaaaugucaaccggauuaccuauggcgcuuguccucgcuacguuaaacagaauacacugaaacuugccaccggcaugagaaacgugcccgaaaaacagacacgggggaucuucggagcgauugccggcuuuaucgagaaugggugggaaggaaugguggauggcugguauggguuccgccaccaaaacucugagggaagaggccaggcugccgaccucaagagcacccaggcugccaucgaucagauuaauggcaaacugaaccggcugaucgggaagacgaacgagaaguuccaccaaauugaaaaagaguuuuccgaagucgagggaagaauccaggaccuugaaaaguacguggaggauacaaaaauugaccuguggucuuauaaugccgagcuccugguugcucuggaaaaccagcauaccaucgaucucaccgacagcgagaugaauaagcuguucgaaaagacaaagaagcagcuucgcgagaacgcggaagauaugggcaaugggugcuuuaaaauuuaccacaagugugacaacgccugcaucggauccauccggaauggcaccuaugaucauaacguguacagagacgaggcucugaauaaccgcuuccaaauuaaaggggucgagcucaagagcggcuacaaagacuggauccuguggauuucuuuugccaucuccugcuuccuucuguguguggcccuccugggauuuauuaugugggcuugccagaagggcaauauccgguguaacaucugcauuuga

SEQ ID NO: 201226 - RNA, 1701 nt, Artificial Sequence
  derived and/or modified CDS sequence (opt5) from hemagglutinin__InfluenzaA__AFM72894
augaagaccaucauugcccugagcuacauccucugccugguguucgcucagaaacuucccggcaacgacaauuccacagccacgcugugucucgggcaccaugcggucccuaacggaaccauuguuaagacaaucaccaaugaucaaauugaggugacaaacgcuaccgaacuggugcaaaauucuagcacaggcgagaucugcgacuccccgcaccagauccuugaugggaaaaacuguacccugauugacgcccuccugggagauccccagugcgacggcuuucagaauaagaaaugggaucuguucgucgaaagaucuaaggccuauagcaacuguuacccuuaugacgugcccgauuacgcuucccuccggucucugguugccagcuccgggacgcuugaguuuaauaacgaaucuuucaauuggaccggagugacacagaacggcaccucuuccgcuugcauccgcagaagcaagaauagcuuuuucucccggcugaacuggcucacacagcugaauuuuaaauauccugcccuuaacgucaccaugcccaacaaugagcaguucgacaagcuguacauuuggggcgugcaucacccuguuacggauaaagaccaaaucuuucucuaugcgcaggccagcgggcgcauuacagugucuaccaagagaucccagcagacagucaucccgaacauuggaagccggccccgcgugagaaauaucccuucccggaucucuauuuacuggaccaucgugaaacccggcgauauucugcugaucaacagcaccgggaaucucauugcuccucgcggauacuucaagaugcaauccggcaagagcucuaucaugagauccgacgcccccaucgggaaauguaacagcgagugcauuacaccgaauggaucuaucccuaacgacaagcccuuucagaaugucaaccggauuacguauggcgcuuguccucgcuacguuaaacagaauacccugaaacuugccacaggcaugagaaacgugcccgaaaaacaaacccgggggaucuucggagcgauugccggcuuuaucgagaaugggugggaaggaaugguggauggcugguauggguuccgccaucagaacagcgagggaagaggccaggcugccgaccugaaguccacacaggcugccaucgaucaaauuaauggcaaacucaaccggcugaucgggaagaccaacgagaaguuccaccagauugaaaaagaguuuucugaagucgagggaagaauccaggaccuugaaaaguacguggaggauacgaaaauugaccuguggagcuauaaugccgagcuccugguugcucuggaaaaccagcacacaaucgaucucaccgacuccgagaugaauaagcuguucgaaaagaccaagaagcaacuucgcgagaacgcggaagauaugggcaaugggugcuuuaaaauuuaccauaagugugacaacgccugcaucggaagcauccggaauggcacauaugaucacaacguguacagagacgaggcucugaauaaccgcuuccagauuaaaggggucgagcucaagucuggcuacaaagacuggauccuguggauuuccuuugccaucagcugcuuccuucuguguguggcccuccugggauuuauuaugugggcuugccagaagggcaauauccgguguaacaucugcauuuga

SEQ ID NO: 201227 - RNA, 1701 nt, Artificial Sequence
  derived and/or modified CDS sequence (opt5) from hemagglutinin__InfluenzaA__AFM72916
augaagaccaucauugcccugagcuacauccucugccugguguucgcucagaaaauucccggcaacgacaauuccacagccacgcuuugucuggggcaccaugcggucccuaacggaaccaucguuaagacaauuaccaaugaucaaaucgaggugacaaacgcuaccgaacucgugcagucuagcuccacaggcgagaucugcgacucuccgcaccagauucuggaugggaaaaauuguacccuuaucgacgcccugcucggagauccccagugcgacggcuuucaaaacaagaaaugggaucuguucgucgaaagaagcaaggccuauuccaauuguuacccuuaugacgugcccgauuacgcuucucugcggagccucguugccuccagcgggacgcuggaguuuaacaaugaaucuuucaacuggaccggagugacacagaauggcaccuccagcgcuugcauucgcagaucuaagaacuccuuuuucagccggcuuaauuggcugacacaucucaacuuuaaauauccugcccugaaugucaccaugcccaacaacgagcaguucgacaaacuuuacaucuggggcgugcaccauccugggacggauaaggaccagauuuuuccguaugcgcaagccucuggacgcaucacaguuuccaccaagagaagccagcagacagcuauucccaauaucggcucccggccucgcgugagaaacauccccucucggauuagcaucuacuggaccauugucaaaccuggggauauccugcucauuaauuccaccggaaaccugaucgcuccccgcggcuacuucaagaucagaagcgggaagucuuccauuaugcggagcgacgcuccgaucggaaaauguaauucuggcugcauuacaccuaacggcagcauccccaaugacaagccuuuucagaacgugaaucgcauuacguauggggccugucccagauacgugaaacaaaacacccugaagcucgcgacaggaaugcggaauguccccgagaaacagacccgcggcaucuucggggccaucgcuggauuuauugaaaacggcugggaggggaugguugauggaugguauggcuucagacaccaaaauuccgaaggccgggggcaggccgcugaccugaagucuacacaggccgccaucgaucagauuaacggaaaacuuaauagacugaucggcaagaccaacgagaaguuccaccagauugagaaagaauuuagcgagguggaagggcgcauccaagaccucgagaaguacguggaagauacgaaaauugaccugugguccuauaacgcugagcuucuggucgcgcucgagaaucagcauacaaucgaucugaccgacagcgaaaugaacaagcuguucgagaaaaccaagaagcagcuccgggaaaaugccgaggauaugggaaacggcugcuuuaaaaucuaccacaagugugacaaugcuugcauugggucuaucagaaacggcacauaugaucaugacguguaccgcgacgaagcccugaauaaccgguuccagauuaaaggaguugagcuuaaguccggcuacaaagauugguuucuguggaucagcuucgccauuucuugcuuucuccuguguguggcccuucugggguucaucaugugggccugccaaaagggaaauaucagauguaacauuugcaucuga

SEQ ID NO: 201228 - RNA, 1701 nt, Artificial Sequence
  derived and/or modified CDS sequence (opt5) from hemagglutinin__InfluenzaA__AFM72927
augaagaccaucauugcccugagcuacauccucugccugguguucgcucagaaacuucccggcaacgacaauuccacagccacgcugugucucgggcaccaugcggucccuaacggaaccauuguuaagacaaucaccaaugaucaaauugaggugacaaacgcuaccgaacuggugcagucuagcuccacaggcgagaucugcgacucuccgcaccagauccuugauggggaaaauuguacccugauugacgcccuccugggagauccccagugcgacggcuuucaaaacaaaaagugggaucuguucgucgagagaagcaaagccuauuccaauuguuacccuuaugacgugcccgauuacgcuucucuccggagccugguugccuccagcgggacgcuugaauuuaacaaugagucuuucaacuggaccggagugacacagaauggcaccuccagcgcuugcauccgcagaucuaacaauuccuuuuucagccggcugaacuggcucacacaucugaaguuuaaguauccugcccuuaaugucaccaugcccaacaacgagcaguucgacaaacuguacauuuggggcgugcaccauccugggacggauaaugaccagacaucucucuaugcgcaagccuccggacgcaucaccguuagcacaaagagaucccagcagaccgugauuccgaacaucggcucucggccccgcgucagaaauauuccuagccggaucuccaucuacuggaccauugugaaacccggggauauccugcugauuaacagcaucggaaaucucauugcuccucgcggcuacuuuaagaucagaucugggaaauccagcaucaugcggucugacgcccccauuggaaaguguaacagcgaaugcaucacaccgaauggcuccauuccuaacgacaagcccuuccagaaugugaaccgcaucacguauggcgcuuguccuagauacgucaaacaaaauacccugaagcuggccacagggaugcggaacguucccgagaaacagacccgcggaauuuuuggcgcgaucgccggguucaucgaaaauggaugggagggcaugguggaugggugguauggauuuagacaccagaacucugagggccggggccaagcugccgaccuuaagagcacacaggcugccauugaucagaucaaugggaaacucaacagacugauuggaaagaccaacgaaaaauuccaccagaucgagaaggaguucuccgaaguggaaggccgcauucaagaccuugagaaguacgucgaggauacgaaaaucgaccuguggagcuauaaugccgaacuccugguggcucuggagaaccagcauacaauugaucucaccgacucugaaaugaauaagcuguuugagaaaaccaagaaacagcuucgggaaaacgcggaggauauggggaauggaugcuucaagaucuaccacaagugugacaacgccugcaucggcuccauuagaaaugggacauaugaucauaacguuuaccgcgacgaggcucugaauaaccgguuucagaucaaaggcguggaacucaagagcggauacaaagacuggauucuguggaucucuuucgccauuuccugcuuucuucugugugucgcccuccugggcuucaucaugugggcuugccaaaaggggaauaucagauguaacauuugcaucuga

SEQ ID NO: 201229 - RNA, 1701 nt, Artificial Sequence
  derived and/or modified CDS sequence (opt5) from hemagglutinin__InfluenzaA__AFM72938
augaagaccaucauugcccugagcuacauccucugccugguguucgcucagaaacuucccggcaacgacaauuccacagccacgcugugucucgggcaccaugcggucccuaacggaaccauuguuaagacaaucaccaaugaucaaauugaggugacaaacgcuaccgaacuggugcagucuagcuccacaggcgagaucugcgacucuccgcaccagauccuugauggggaaaauuguacccugauugacgcccuccugggagauccccagugcgacggcuuucaaaacaaaaagugggaucuguucgucgagagaagcaaagccuauuccaauuguuacccuuaugacgugcccgauuacgcuucucuccggagccugguugccuccagcgggacgcuugaauuuaacaaugagucuuucaacuggaccggagugacacagaauggcaccuccagcgcuugcauccgcagaucuaacaauuccuuuuucagccggcugaacuggcucacacaucugaaguuuaaguauccugcccuuaaugucaccaugcccaacaacgagcaguucgacaaacuguacauuuggggcgugcaccauccugggacggauaaugaccagacaucucucuaugcgcaagccuccggacgcaucaccguuagcacaaagagaucccagcagaccgugauuccgaacaucggcucucggccccgcgucagaaauaacccuagccggauuuccaucuacuggaccaucgugaaacccggggauauucugcugaucaauagcauuggaaaccucaucgcuccucgcggcuacuuuaagauuagaucugggaaauccagcaucaugcggucugacgcccccaucggaaaguguaauagcgaaugcauuacaccgaacggcuccaucccuaaugacaagcccuuccagaacgugaaucgcauuacguauggcgcuuguccuagauacgucaaacaaaacacccugaagcuggccacagggaugcggaauguucccgagaaacagacccgcggaaucuuuggcgcgauugccggguucaucgaaaacggaugggagggcaugguggaugggugguauggauuuagacaccaaaauucugagggccggggccaggcugccgaccuuaagagcacacaggcugccaucgaucagauuaacgggaaacucaacagacugaucggaaagaccaaugaaaaauuccaccagauugagaaggaguucuccgaaguggaaggccgcauccaagaccuugagaaguacgucgaggauacgaaaauugaccuguggagcuauaacgccgaacuccugguggcucuggagaaucagcauacaaucgaucucaccgacucugaaaugaacaagcuguuugagaaaaccaagaaacagcuucgggaaaaugcggaggauauggggaacggaugcuucaagauuuaccacaagugugacaaugccugcaucggcuccaucagaaacgggacauaugaucauaauguuuaccgcgacgaggcucugaacaaucgguuucagauuaaaggcguggaacucaagagcggauacaaagacuggauccuguggauuucuuucgccaucuccugcuuucuucugugugucgcccuccugggcuucauuaugugggcuugccaaaaggggaacaucagauguaauaucugcauuuga

SEQ ID NO: 201230 - RNA, 1701 nt, Artificial Sequence
  derived and/or modified CDS sequence (opt5) from hemagglutinin__InfluenzaA__AFM72949
augaagaccaucauugcccugagcuacauccucugccugguguucgcucagaaacuucccggcaacgacaauuccacagccacgcugugucucgggcaccaugcggucccuaacggaaccauuguuaagacaaucaccaaugaucaaauugaggugacaaacgcuaccgaacuggugcagucuagcuccacaggcgagaucugcgacucuccgcaccagauccuugauggggaaaauuguacccugauugacgcccuccugggagauccccagugcgacggcuuucaaaacaaaaagugggaucuguucgucgagagaagcaaagccuauuccaauuguuacccuuaugacgugcccgauuacgcuucucuccggagccugguugccuccagcgggacgcuugaauuuaacaaugagucuuucaacuggaccggagugacacagaauggcaccuccagcgcuugcauccgcagaucuaacaauuccuuuuucagccggcugaacuggcucacacagcugaaguuuaaguauccugcccuuaaugucaccaugcccaacaacgagcaguucgacaaacuguacauuuggggcgugcaucacccugggacggauaaugaccaaacaucucucuaugcgcaggccuccggacgcaucaccguuagcacaaagagaucccagcagaccgugauuccgaacaucggcucucggccccgcgucagaaauaacccuagccggauuuccaucuacuggaccaucgugaaacccggggauauucugcugaucaauagcauuggaaaccucaucgcuccucgcggcuacuuuaagauuagaucugggaaauccagcaucaugcggucugacgcccccaucggaaaguguaauagcgaaugcauuacaccgaacggcuccaucccuaaugacaagcccuuccaaaacgugaaucgcauuacguauggcgcuuguccuagauacgucaaacagaacacccugaagcuggccacagggaugcggaauguucccgagaaacagacccgcggaaucuuuggcgcgauugccggguucaucgaaaacggaugggagggcaugguggaugggugguauggauuuagacaucaaaauucugagggccggggccaggcugccgaccuuaagagcacacaggcugccaucgaucagauuaacgggaaacucaacagacugaucggaaagaccaaugaaaaauuccaccaaauugagaaggaguucuccgaaguggaaggccgcauccaggaccuugagaaguacgucgaggauacgaaaauugaccuguggagcuauaacgccgaacuccugguggcucuggagaaucagcacacaaucgaucucaccgacucugaaaugaacaagcuguuugagaaaaccaagaaacagcuucgggaaaaugcggaggauauggggaacggaugcuucaagauuuaccauaagugugacaaugccugcaucggcuccaucagaaacgggacauaugaucacaauguuuaccgcgacgaggcucugaacaaucgguuucaaauuaaaggcguggaacucaagagcggauacaaagacuggauccuguggauuucuuucgccaucuccugcuuucuucugugugucgcccuccugggcuucauuaugugggcuugccagaaggggaacaucagauguaauaucugcauuuga

SEQ ID NO: 201231 - RNA, 1701 nt, Artificial Sequence
  derived and/or modified CDS sequence (opt5) from hemagglutinin__InfluenzaA__AFM72960
augaagaccaucauugcccugagcuacauccucugccugguguucgcucagaaacuucccggcaacgacaauuccacagccacgcugugucucgggcaccaugcggucccuaacggaaccauuguuaagacaaucaccaaugaucaaauugaggugacaaacgcuaccgaacuggugcagucuagcuccacaggcgagaucugcgacucuccgcaccagauccuugauggggaaaauuguacccugauugacgcccuccugggagauccccagugcgacggcuuucaaaacaaaaagugggaucuguucgucgagagaagcaaagccuauuccaauuguuacccuuaugacgugcccgauuacgcuucucuccggagccugguugccuccagcgggacgcuugaauuuaacaaugagucuuucaaguggaccggagugacacagaacggcaccuccagcgcuugcauccgcagaucuaauaacuccuuuuucagccggcugaauuggcucacacaucugaaguuuaaauauccugcccuuaacgucaccaugcccaauaacgagcaguucgacaagcuguacauuuggggcgugcaccauccugggacggauaacgaccagacaucucucuaugcgcaagccuccggacgcaucaccguuagcacaaaaagaucccagcagaccgugauuccgaauaucggcucucggccccgcgucagaaacauuccuagccggaucuccaucuacuggaccauugugaagcccggggauauccugcugauuaauagcaucggaaaccucauugcuccucgcggcuacuuuaaaaucagaucugggaaguccagcaucaugcggucugacgcccccauuggaaaguguaauagcgaaugcaucacaccgaacggcuccauuccuaaugacaaacccuuccagaacgugaaucgcaucacguauggcgcuuguccuagauacgucaagcaaaacacccugaaacuugccacagggaugcggaauguucccgagaagcagacccgcggaauuuuuggcgcgaucgccggguucaucgaaaacggaugggagggcaugguggaugggugguauggauuuagacaccaaaauucugagggccggggccaggcugccgaccugaaaagcacacaggcugccauugaucagaucaacgggaagcucaauagacugauuggaaaaaccaacgaaaaguuccaccagaucgagaaggaguucuccgaaguggaaggccgcauucaagaccuugagaaauacgucgaggauacgaagaucgaccuguggagcuauaacgccgaacuccugguggcucuggagaaucagcauacaauugaucucaccgacucugaaaugaacaaacuguuugagaagaccaaaaagcagcuucgggaaaaugcggaggauauggggaacggaugcuucaagaucuaccacaaaugugacaaugccugcaucggcuccauuagaaacgggacauaugaucauaauguuuaccgcgacgaggcucugaacaaucgguuucagaucaagggcguggaacucaaaagcggauacaaggacuggauucuguggaucucuuucgccauuuccugcuuucuucugugugucgcccuccugggcuucaucaugugggcuugccaaaaagggaacaucagauguaauauuugcaucuga

SEQ ID NO: 201232 - RNA, 1701 nt, Artificial Sequence
  derived and/or modified CDS sequence (opt5) from hemagglutinin__InfluenzaA__AFM72971
augaagaccaucauugcccugagcuacauccucugccugguguucgcucagaaacuucccggcaacgacaauuccacagccacgcugugucucgggcaccaugcggucccuaacggaaccauuguuaagacaaucaccaaugaucaaauugaggugacaaacgcuaccgaacuggugcagucuagcuccacaggcgagaucugcgacucuccgcaccagauccuugauggggaaaauuguacccugauugacgcccuccugggagauccccagugcgacggcuuucaaaacaaaaagugggaucuguucgucgagagaagcaaagccuauuccaauuguuacccuuaugacgugcccgauuacgcuucucuccggagccugguugccuccagcgggacgcuugaauuuaacaaugagucuuucaaguggaccggagugacacagaacggcaccuccagcgcuugcauccgcagaucuaauaacuccuuuuucagccggcugaauuggcucacacagcugaacuuuaaguauccugcccuuaaugucaccaugcccaacaacgagcaguucgacaaacuguacauuuggggcgugcaucacccugggacggauaaugaccaaacaucucucuaugcgcaggccuccggacgcaucaccguuagcacaaagagaucccagcagaccgugauuccgaacaucggcucucggccccgcgucagaaauauuccuagccggaucuccaucuacuggaccauugugaaacccggggauauccugcugauuaacagcaucggaaaucucauugcuccucgcggcuacuuuaagaucagaucugggaaauccagcaucaugcggucugacgcccccauuggaaaguguaacagcgaaugcaucacaccgaauggcuccauuccuaacgacaagcccuuccaaaaugugaaccgcaucacguauggcgcuuguccuagauacgucaaacagaauacccugaagcuggccacagggaugcggaacguucccgagaaacagacccgcggaauuuuuggcgcgaucgccggguucaucgaaaauggaugggagggcaugguggaugggugguauggauuuagacaucaaaacucugagggccggggccaggcugccgaccuuaagagcacacaggcugccauugaucagaucaaugggaaacucaacagacugauuggaaagaccaacgaaaaauuccaccaaaucgagaaggaguucuccgaaguggaaggccgcauucaggaccuugagaaguacgucgaggauacgaaaaucgaccuguggagcuauaaugccgaacuccugguggcucuggagaaccagcacacaauugaucucaccgacucugaaaugaauaagcuguuugagaaaaccaagaaacagcuucgggaaaacgcggaggauauggggaauggaugcuucaagaucuaccauaagugugacaacgccugcaucggcuccauuagaaaugggacauaugaucacaacguuuaccgcgacgaggcucugaauaaccgguuucaaaucaaaggcguggaacucaagagcggauacaaagacuggauucuguggaucucuuucgccauuuccugcuuucuucugugugucgcccuccugggcuucaucaugugggcuugccagaaggggaauaucagauguaacauuugcaucuga

SEQ ID NO: 201233 - RNA, 1701 nt, Artificial Sequence
  derived and/or modified CDS sequence (opt5) from hemagglutinin__InfluenzaA__AFM72982
augaagaccaucauugcccugagcuacauccucugccugguguucgcucagaaacuucccggcaacgacaauuccacagccacgcugugucucgggcaccaugcggucccuaacggaaccauuguuaagacaaucaccaaugaucaaauugaggugacaaacgcuaccgaacuggugcagucuagcuccacaggcgagaucugcgacucuccgcaccagauccuugauggggaaaauuguacccugauugacgcccuccugggagauccccagugcgacggcuuucaaaacaaaaagugggaucuguucgucgagagaagcaaagccuauuccaauuguuacccuuaugacgugcccgauuacgcuucucuccggagccugguugccuccagcgggacgcuugaauuuaacucugaguccuucaauuggaccggagugacacagaacggcaccagcucugcuugcauccgcagauccaauaacagcuuuuucucucggcugaauuggcucacacaucugaacuuuaaguauccugcccuuaaugucaccaugcccaacaacgagcaguucgacaagcuguacauuuggggcgugcaccauccugggacggauaaagaccagaucuuuccguaugcgcaagccuccggacgcauuacaguuagcaccaagagaucccagcaggcugugauccccaauauuggcucucggccucgcgucagaaacauccccagccggaucuccauuuacuggacaaucgugaaaccuggggauauucuccugaucaauagcaccggaaaccugauugcuccccgcggcuacuucaagaucagaucugggaaauccagcaucaugcggucugacgccccgauuggaaaguguaauagcgaaugcaucaccccuaacggcuccauucccaaugacaagccuuuucagaacgugaaucgcaucacauauggcgccugucccagauacauuaaacaaucuacgcucaagcuggcgaccgggaugcggaacguccccgagaaacagacacgcggaaucuucggcgccaucgcuggguuuauugaaaauggaugggagggcaugguugaugggugguauggauucagacaccagaacagcgagggccggggccaagccgcugaccuuaaguccacccaggccgccaucgaucagauuaaugggaaacugaacagacucaucggaaagacaaaugaaaaauuccaccagauugagaaggaauuuagcgagguggaaggccgcauccaagaccuggagaaguacguggaggauaccaaaauugaccuuuggucuuauaacgcugaacugcucgucgcgcuggagaaccagcauacgaucgaucugacagacuccgaaaugaauaaacucuucgagaagaccaagaaacagcugcgggaaaacgccgaggauauggggaauggaugcuuuaagaucuaccacaagugugacaacgcuugcauuggcagcaucagaaaugggaccuaugaucaugacguguaccgcgacgaggcccuuaacaaucgguuccagauuaaaggcguugaacugaagucuggauacaaagauuggauccucuggauuucccuggccaucagcugcuuucuucuguguguggcucuccugggcuucaucaugugggccugccaaaaggggaacauuagauguaauaucugcauuuga

SEQ ID NO: 201234 - RNA, 1701 nt, Artificial Sequence
  derived and/or modified CDS sequence (opt5) from hemagglutinin__InfluenzaA__AFM72993
augaagaccaucauugcccugagcuacauccucugccugguguucgcucagaaacuucccggcaacgacaauuccacagccacgcugugucucgggcaccaugcggucccuaacggaaccauuguuaagacaaucaccaaugaucaaauugaggugacaaacgcuaccgaacuggugcagucuagcuccgccggcgagaucugcgacucuccgcaccagauccuugauggggaaaauuguacacugauugacgcccuccugggagauccccagugcgacggcuuucaaaacaaaaagugggaucuguucgucgagagaagccgggcuuauuccaauuguuacccuuaugacgugcccgauuacgccucucuccgcagccugguugcuuccagcgggacccuugaauuuaacaaugagucuuucaacuggacgggagugacccagaauggcacauccagcgccugcaucagacggucuaacaauuccuuuuucagccgccugaacuggcucacccaucugaauuuuaaauauccugcgcuuaacgucacaaugcccaacaaugagcaguucgacaagcuguacauuuggggcgugcuccacccugggaccuauaaggaucagaucuuucuguacgcccaggcuucuggaagaauuacgguuuccacaaaacggagccagcaggccgugaucccgaacauuggcucccgccccagaguccggaauaucccuucucgcaucagcauuuacuggaccaucgugaagcccggggacauucugcucaucaacuccacaggaaaucugauugcuccuagaggcuauuucaaaauccggagcgggaagucuuccaucaugcgcagcgaugcccccauuggaaaauguaacucugaaugcaucaccccgaauggcagcauuccuaacgacaagcccuuucagaaugugaacagaaucaccuacggcgcguguccucgguaugucaagcaauccacacuuaaacuggccacggggaugcgcaauguucccgagaagcagaccagaggaauuuucggcgcuaucgccggguuuaucgaaaacggaugggagggcaugguggacgggugguacggauuccggcaucaaaauucugagggcagaggccaagcugccgaucucaaaagcacacaggccgcuauugaccagaucaacgggaagcugaaucgccuuauuggaaaaaccaacgaaaaguuccaccagaucgagaaagaauuuuccgagguggaaggccggauucaagaucuggagaaguaugucgaggacacaaagaucgaucucuggagcuacaacgcggaacugcugguggcccucgagaaucagcacaccauugaccugacggauucugaaaugaacaaacuuuucgagaagaccaaaaagcagcugagagaaaaugcugaggacauggggaacggaugcuuuaaaaucuaucauaagugugauaaugccugcaucggcuccauucgcaacgggacauacgaccacgauguuuaccgggacgaggcccucaauaacagauuccagaucaagggcguggaacugaaaagcggauauaaggacuggauucuuuggaucucuuuugcuauuuccugcuuccugcucugugucgcccugcugggcuuuaucaugugggcgugccaaaaagggaauauccgcuguaacauuugcaucuga

SEQ ID NO: 201235 - RNA, 1701 nt, Artificial Sequence
  derived and/or modified CDS sequence (opt5) from hemagglutinin__InfluenzaA__AFM73004
augaagaccaucauugcccugagcuacauccucugccugguguucgcucagaaacuucccggcaacgacaauuccacagccacgcugugucucgggcaccaugcggucccuaacggaaccauuguuaagacaaucaccaaugaucaaauugaggugacaaacgcuaccgaacuggugcagucuagcuccgccggcgagaucugcgacucuccgcaccagauccuugauggggaaaauuguacacugauugacgcccuccugggagauccccagugcgacggcuuucaaaacaaaaagugggaucuguucgucgagagaagccgggcuuauuccaauuguuacccuuaugacgugcccgauuacgccucucuccgcagccugguugcuuccagcgggacccuugaauuuaacaaugagucuuucaacuggacgggagugacccagaauggcacauccagcgccugcaucagacggucuaacaauuccuuuuucagccgccugaacuggcucacccaucugaauuuuaaauauccugcgcuuaacgucacaaugcccaacaaugagcaguucgacaagcuguacauuuggggcgugcuccacccugggaccuauaaggaucagaucuuucuguacgcccaggcuucuggaagaguuacgguguccacaaaacggagccagcaggccgucauuccgaacaucggcucccgccccagagugcggaauauuccuucucgcaucagcaucuacuggaccauugugaagcccggggacauccugcucauuaacuccacaggaaaucugaucgcuccuagaggcuauuucaaaauucggagcgggaagucuuccaucaugcgcagcgaugcccccaucggaaaauguaacucugaaugcauuaccccgaauggcagcaucccuaacgacaagcccuuucagaaugucaacagaauuaccuacggcgcguguccucgguauguuaagcaauccacacuuaaacuggccacggggaugcgcaaugugcccgagaagcagaccagaggaaucuucggcgcuauugccggguuuaucgaaaacggaugggagggcaugguggacgggugguacggauuccggcaucaaaauucugagggcagaggccaagcugccgaucucaaaagcacacaggccgcuaucgaccagauuaacgggaagcugaaucgccuuaucggaaaaaccaacgaaaaguuccaccagauugagaaagaauuuuccgaggucgaaggccggauccaagaucuggagaaguauguggaggacacaaagauugaucucuggagcuacaacgcggaacugcugguugcccucgagaaucagcacaccaucgaccugacggauucugaaaugaacaaacuuuucgagaagaccaaaaagcagcugagagaaaaugcugaggacauggggaacggaugcuuuaaaauuuaucauaagugugauaaugccugcaucggcuccauccgcaacgggacauacgaccacgauguguaccgggacgaggcccucaauaacagauuccagauuaagggcgucgaacugaaaagcggauauaaggacuggauccuuuggauuucuuuugcuaucuccugcuucuuucuguguguggcccuccugggcuucauuaugugggcgugccaaaaagggaauauccgcuguaacaucugcauuuga

SEQ ID NO: 201236 - RNA, 1701 nt, Artificial Sequence
  derived and/or modified CDS sequence (opt5) from hemagglutinin__InfluenzaA__AFM73015
augaaggccauccuggugguccuccuguacaccuucgcuacagccaacgcggacacgcuuugcauuggcuaucacgcuaauaacagcaccgauacaguugacaccgugcuggagaaaaaugugacagucacccauuccgugaaccuccuggaagauaagcacaaugggaaacuuuguaagcugagaggaguugcuccccuccaucugggcaaaugcaacaucgccggguggauucugggaaauccugagugugaaucucucagcacagccuccucuuggagcuacaucguggagaccuccucuagcgacaacggcacgugcuauccgggggauuuuauugacuacgaagaacugcgggagcagcuuuccagcgucucuuccuucgaacgcuuugagaucuuccccaagaccagcucuuggccuaaucacgauuccaacaagggagugacagccgcuuguccccaugccggcgcgaaaggcuuuuauaagaaucugaucuggcucguuaaaaaggggaacagcuacccuaaacugucuaaguccuauauuaaugacaagggaaaagaagugcuuguccuguggggcauccaccaccccagcaccacagccgaucaacagucccucuaccagaacgcugacaccuacguguucguggggacgucuagauauagcaagaaauuuaagccugagauugccauccggccgaaaguccgcgauagagagggacggaugaauuacuauuggacacugguugaacccggcgacaagauuaccuucgaggcuacagggaaccugguggugccucgcuacgccuuugcgauggaaagaaacgccggauccggcaucauuaucagcgauacccccguccaugacugcaauaccacaugucagacgccuaaaggcgcuaucaacaccucucuccccuuccaaaauauucacccgaucacaauugggaagugcccuaaguaugugaaauccaccaagcugcggcuugccacaggacugcgcaacguucccagcauccagucuagaggccucuuuggggcuauugccggauucaucgagggcggguggaccggaaugguggacggcugguacggcuaucaucaccagaaugaacaggggagcggauacgccgcugaucugaaauccacgcaaaacgcgaucgacaagauuacaaauaaagucaacucugugaucgagaagaugaauacccaguuuaccgccguuggcaaggaguucaaccaccuugaaaaacggauugagaaucugaacaagaaaguggaugacggguuccucgauaucuggacauacaaugcugaacugcugguccuccuggagaacgaacgcacccuugacuaucaugauagcaaugugaagaaccuguacgagaaagucagaaaccagcucaagaauaacgccaaggagauuggaaauggcuguuuugaguucuaucacaaaugcgacaacacauguauggaguccgugaagaaugggacguacgauuauccuaaauacagcgaagaggccaagcugaaccgggaagagaucgacggcguuaaacuugagucuacccgcaucuaucagauucuggcuaucuacuccacaguggccagcucucucguccuggugguuucccugggagcgauuagcuuuuggaugugcuccaauggcucucuccaaugcagaaucuguauuuga

SEQ ID NO: 201237 - RNA, 1701 nt, Artificial Sequence
  derived and/or modified CDS sequence (opt5) from hemagglutinin__InfluenzaA__AFM73025
augaaggccauccuggugguccuccuguacaccuucgcuacagccaacgcggacacgcuuugcauuggcuaucacgcuaauaacagcaccgauacaguugacaccgugcuggagaaaaaugugacagucacccauuccgugaaccuccuggaagauaagcacaaugggaaacuuuguaagcugagaggaguugcuccccuccaucugggcaaaugcaacaucgccggguggauucugggaaauccugagugugaaucucucagcacagccuccucuuggagcuacaucguggagaccuccucuagcgacaacggcacgugcuauccgggggauuuuauugacuacgaagaacugcgggagcagcuuuccagcgucucuuccuucgaacgcuuugagaucuuccccaagaccagcucuuggccuaaucacgauuccaacaagggagugacagccgcuuguccccaugccggcgcgaaaggcuuuuauaagaaucugaucuggcucguuaaaaaggggaacagcuacccuaaacugucuaaguccuauauuaaugacaagggaaaagaagugcuuguccuguggggcauccaccaccccagcaccacagaugaccaacagucccucuaccagaacgccgauaccuacguguucguggggacgucuagauauagcaagaaauuuaagccugagauugcuauccggccgaaaguccgcgacagagagggacggaugaauuacuauuggacacugguugaacccggcgauaagauuaccuucgaggccacagggaaccugguggugccucgcuacgcuuuugccauggaaagaaacgcgggauccggcaucauuaucagcgacacccccguccaugacugcaauaccacaugucagacgccuaaaggcgccaucaacaccucucuccccuuccaaaauauucacccgaucacaauugggaagugcccuaaguaugugaaauccaccaagcugcggcuugcuacaggacugcgcaacguucccagcauccagucuagaggccucuuuggggccauugcuggauucaucgagggcggguggaccggaaugguggauggcugguacggcuaucaucaccagaaugaacaggggagcggauacgccgccgaccugaaauccacgcaaaacgcuaucgauaagauuacaaauaaagucaacucugugaucgagaagaugaauacccaguuuaccgcgguuggcaaggaguucaaccaccuugaaaaacggauugagaaucugaacaagaaaguggacgauggguuccucgacaucuggacauacaaugccgaacugcugguccuccuggagaacgaacgcacccuugauuaucaugacagcaaugugaagaaccuguacgagaaagucagaaaccagcucaagaauaacgcuaaggagauuggaaauggcuguuuugaguucuaucacaaaugcgauaacacauguauggaguccgugaagaaugggacguacgacuauccuaaauacagcgaagaggccaagcugaaccgggaagagaucgauggcguuaaacuugagucuacccgcaucuaucagauucuggccaucuacuccacaguggcuagcucucucguccuggugguuucccugggagccauuagcuuuuggaugugcuccaauggcucucuccaaugcagaaucuguauuuga

SEQ ID NO: 201238 - RNA, 1701 nt, Artificial Sequence; identical to SEQ ID NO: 201237
  derived and/or modified CDS sequence (opt5) from hemagglutinin__InfluenzaA__AFM73035

SEQ ID NO: 201239 - RNA, 1701 nt, Artificial Sequence
  derived and/or modified CDS sequence (opt5) from hemagglutinin__InfluenzaA__AFM73045
augaaggccauccuggugguccuccuguacaccuucgcuacagccaacgcggacacgcuuugcauuggcuaucacgcuaauaacagcaccgauacaguugacaccgugcuggagagaaaugugacagucacccauuccgugaaccuccuggaagauaaacacaaugggaagcuguguaaacugcggggaguugcgccccuccaucugggcaagugcaacaucgccggguggauucugggaaauccugagugugaaucucucagcacagcuuccucuuggagcuacaucguggagaccuccucuagcgacaacggcacgugcuauccgggggauuuuauugacuacgaagaacugcgcgagcagcuuuccagcgucucuuccuucgaaagauuugagaucuuccccaaaaccagcucuuggccuaaucacgaauccaacaagggagugacagccgcuuguccccaugccggcgccaagagcuuuuauaaaaaucugaucuggcucguuaagaaaggcaacucuuacccuaagcuguccaaaagcuauauuaaugauaaggggaaggaggugcuuguccuguggggaauccaccaccccuccaccucugccgaccaacagagccucuaccagaacgcugaugccuacguguucgugggcacaucccgguauagcaaaaaguuuaaaccugagauugcuauccgcccgaaggucagagaccaggaagggcggaugaauuacuauuggacccugguugagcccggagauaaaauuacguucgaagccacaggcaaccugguggugccucgcuacgcguuugccauggagagaaacgcugggucuggaaucauuaucuccgacacccccguccaugauugcaauacaaccugucaaaccccuaagggcgccaucaacacaagccuccccuuccagaauauucacccgaucacgauuggcaaaugcccuaaguaugugaagucuaccaaacugcggcuugcuacagggcugcgcaacguucccagcauccaguccagaggacucuuuggcgccauugccggguucaucgaaggaggcuggaccgggaugguggacggaugguacggcuaucaucaccagaaugagcaaggcucuggguacgcugcggaccuuaagagcacacagaacgccaucgaugagauuaccaauaaagucaacuccgugaucgaaaagaugaauacgcaguuuacagcuguuggaaaagaguucaaccaccuugaaaagcggauugagaaucugaacaagaaaguggacgauggcuuccucgacaucuggaccuacaaugccgaacugcugguccuccuggagaacgagcgcacccuugauuaucaugacagcaaugugaagaaccuguacgaaaaagucagaucucagcucaagaacaaugccaaagagauugggaacggauguuuugaguucuaucacaagugcgauaauacauguauggaguccgugaagaacggcaccuacgacuauccuaaauacagcgaagaggcuaagcugaaucgggaggaaaucgaugggguuaaacuugagucuacacgcaucuaucaaauucuggccaucuacuccacgguggcgagcucccucguccuggugguuucucugggcgcuauuagcuuuuggaugugcuccaacggaucucuccagugcagaaucuguauuuga

SEQ ID NO: 201240 - RNA, 1701 nt, Artificial Sequence
  derived and/or modified CDS sequence (opt5) from hemagglutinin__InfluenzaA__AFM73055
augaaggccauccuggugguccuccuguacaccuucgcuacagccaacgcggacacgcuuugcauuggcuaucacgcuaauaacagcaccgauacaguugacaccgugcuggagagaaaugugacagucacccauuccgugaaccuccuggaagauaagcacaaugggaaacuuuguaaacugcggggaguugcgccccuccaucugggcaagugcaacaucgccggguggauucugggaaauccugagugugaaucucucagcacagcuuccucuuggagcuacaucguggagaccuccucuagcgacaacggcacgugcuauccgggggauuuuauugacuacgaagaacugcgcgagcagcuuuccagcgucucuuccuucgaaagauuugagaucuuccccaaaaccagcucuuggccuaaucacgauuccaacaagggagugacagccgcuuguccccaugccggcgccaagagcuuuuauaaaaaucugaucuggcucguugaaaagggcaacucuuacccuaaacuguccaagagcuauauuaaugacaaagggaaggaggugcuuguccuguggggaauccaccaccccuccaccucugccgaucaacagagccucuaccagaacgcugacgccuacguguucgugggcacaucccgguauagcaagaaauuuaagccugagauugcuauccgcccgaaagucagagaucgggaagggcgcaugaauuacuauuggacccugguugagcccggagacaagauuacguucgaagccacaggcaaccugguggugccuagauacgcguuugccauggagcggaacgcugggucuggaaucauuaucuccgauacccccguccaugacugcaauacaaccugucagaccccuaaaggcgccaucaacacaagccuccccuuccaaaauauucacccgaucacgauuggcaagugcccuaaauaugugaagucuaccaagcugcgccuugcuacagggcugagaaacguucccagcauccagucccggggacucuuuggcgccauugccggguucaucgaaggaggcuggaccgggaugguggacggaugguacggcuaucaucaccagaaugagcagggcucuggguacgcugcggaucugaaaagcacacaaaacgccaucgacgagauuaccaauaaggucaacuccgugaucgaaaagaugaauacgcaguuuacagcuguuggaaaggaguucaaccaccuugaaaaacgcauugagaaucugaacaagaagguggaugacggcuuccucgauaucuggaccuacaaugccgaacugcugguccuccuggagaacgagagaacccuugacuaucaugauagcaaugugaaaaaccuguacgaaaagguccggucucagcucaaaaacaaugccaaggagauugggaacggauguuuugaguucuaucacaaaugcgacaauacauguauggaguccgugaagaacggcaccuacgauuauccuaaguacagcgaagaggcuaaacugaaucgcgaggaaaucgacgggguuaaacuugagucuacaagaaucuaucagauucuggccaucuacuccacgguggcgagcucccucguccuggugguuucucugggcgcuauuagcuuuuggaugugcuccaacggaucucuccaaugccggaucuguauuuga

SEQ ID NO: 201241 - RNA, 1701 nt, Artificial Sequence
  derived and/or modified CDS sequence (opt5) from hemagglutinin__InfluenzaA__AFM73065
augaaggccauccuggugguccuccuguacaccuucgcuacagccaacgcggacacgcuuugcauuggcuaucacgcuaauaacagcaccgauacaguugacaccgugcuggagagaaaugugacagucacccauuccgugaaccuccuggaagauaagcacaaugggaaacuuuguaaacugcggggaguugcgccccuccaucugggcaagugcaacaucgccggguggauucugggaaauccugagugugaaucucucagcacagcuuccucuuggagcuacaucguggagaccuccucuagcgacaacggcacgugcuauccgggggauuuuauugacuacgaagaacugcgcgagcagcuuuccagcgucucuuccuucgaaagauuugagaucuuccccaaaaccagcucuuggccuaaucacgauuccaacaagggagugacagccgcuuguccccaugccggcgccaagagcuuuuauaaaaaucugaucuggcucguuaaggaaggcaacucuuacccuaaacuguccaagagcuauauuaaugacaaagggaaggaggugcuuguccuguggggaauccaccaccccuccaccucugccgaucaacagagccucuaccagaacgcugacgccuacguguucgugggcacaucccgguauagcaagaaauuuaagccugagauugcuauccgcccgaaagucagagaucgggaagggcgcaugaauuacuauuggacccugguugagcccggagacaagauuacguucgaagccacaggcaaccugguggugccuagauacgcguuugccauggagcggaacgcugggucuggaaucauuaucuccgauacccccguccaugacugcaauacaaccugucagaccccuaaaggcgccaucaacacaagccuccccuuccaaaauauucacccgaucacgauuggcaagugcccuaaauaugugaagucuaccaagcugcgccuugcuacagggcugagaaacguucccagcauccagucccggggacucuuuggcgccauugccggguucaucgaaggaggcuggaccgggaugguggacggaugguacggcuaucaucaccagaaugagcagggcucuggguacgcugcggaucugaaaagcacacaaaacgccaucgacgagauuaccaauaaggucaacuccgugaucgaaaagaugaauacgcaguuuacagcuguuggaaaggaguucaaccaccuugaaaaacgcauugagaaucugaacaagaagguggaugacggcuuccucgauaucuggaccuacaaugccgaacugcugguccuccuggagaacgagagaacccuugacuaucaugauagcaaugugaaaaaccuguacgaaaagguccggucucagcucaaaaacaaugccaaggagauugggaacggauguuuugaguucuaucacaaaugcgacaauacauguauggaguccgugaagaacggcaccuacgauuauccuaaguacagcgaagaggcuaaacugaaucgcgaggaaaucgacgggguuaaacuugagucuacaagaaucuaucagauucuggccaucuacuccacgguggcgagcucccucguccuggugguuucucugggcgcuauuagcuuuuggaugugcuccaacggaucucuccaaugccggaucuguauuuga

SEQ ID NO: 201242 - RNA, 1701 nt, Artificial Sequence; identical to SEQ ID NO: 192987
  derived and/or modified CDS sequence (opt5) from hemagglutinin__InfluenzaA__AFM73477

SEQ ID NO: 201243 - RNA, 1707 nt, Artificial Sequence
  derived and/or modified CDS sequence (opt5) from hemagglutinin__InfluenzaA__AFM78567
auggagaagaucgugcugcuccuggccauugucagccuuguuaaauccgaccagaucugcauuggcuaccacgcuaacaauucuaccgaacaaguggauacaaucauggagaagaacgugacggucacccaugcccaggacauucuggaaaagacacacaaugggaaacucugugaucuggacggagugaaaccccuuauccugagagauugcagcguugcgggcuggcuccuggggaacccuaugugugacgaguucaucaaugugccggaaugguccuauauugucgagaaggcuaaccccaccaaugaucugugcuacccuggaucuuuuaacgacuaugaggaacucaagcaucugcuuagccggaucaaucacuucgagaaaauucagaucauucccaaguccucuuggagcgaucaugaagccuccagcggcgugucuuccgccuguccuuaccuggggagccccuccuuuuuccgcaacguuguguggcucaucaaaaagaacucuacauauccuaccauuaaaaagagcuacaauaauacaaaccaggaggaccugcuuguccuguggggaauccaccacccgaaugaugcugccgagcaaaccagacucuaucagaaccccacgaccuacaucucuauuggcacauccacccugaaccagcggcuggugccuaagaucgcuacacgcagcaaagugaauggccaguccgggagaauggaauuuuucuggaccauucucaagcccaacgacgccaucaauuuugagucuaacggaaauuucauugcgccugaauacgccuauaaaaucgucaagaaaggcgauagcgcuaucaugaaguccgagcuggaauacgggaacugcaauacgaaaugucaaacacccaugggagccauuaacagcucuaugccguuucauaauauccacccucuuaccauuggcgagugccccaaguauguuaaguccaaccggcuggugcucgcuacagggcugcgcaauagcccucagagagagucucggcgcaaaaagagaggacuuuucggcgccaucgcgggcuuuauugaagggggauggcagggcaugguggacgggugguacggauaucaucacagcaacgagcagggcuccggguacgccgcugacaaagaaucuacccaaaaggccaucgauggagucaccaauaaagugaacagcaucauugacaagaugaauacacaguucgaggcuguuggccgggaauuuaacaaccuggagcgcagaaucgagaaucucaacaagaaaauggaagauggcuuccuggacguguggacguauaaugccgagcugcucguccugauggaaaacgagcggacccuugauuuccacgacuccaaugugaagaaccuguacgauaaaguucgccuccagcugagagacaaugccaaggaacuugggaacggauguuuugaguucuaccauaaaugcgauaaugaguguauggaaagcauucggaacggcacauauaauuacccccaauauucugaggaagcuagacugaagcgcgaggagaucuccggggugaagcucgaaagcauuggaaccuaccagauccugucuauuuauuccacagucgcgagcucccuggcccucgcuaucaugauggccggccugucucuuuggaugugcagcaacgggucccugcagugccggaucuguauuuga

SEQ ID NO: 201244 - RNA, 1701 nt, Artificial Sequence
  derived and/or modified CDS sequence (opt5) from hemagglutinin__InfluenzaA__AFM78646
augaaggccauccuggugguccuccuguacaccuucgcuacagccaacgcggacacgcuuugcauuggcuaucacgcuaauaacagcaccgauacaguugacaccgugcuggagaagaaugugacagucacccauuccgugaaccuccuggaagauaagcacaaugggaaacuuuguaagcugagaggaguugcuccccuccaucugggcaaaugcaacaucgccggguggauucugggaaauccugagugugaaucucucagcacagccuccucuuggagcuacaucguggagaccuccucuagcgacaacggcacgugcuauccgggggauuuuauugacuacgaagaacugcgggagcagcuuuccagcgucucuuccuucgaacgcuuugagaucuuccccaagaccagcucuuggccuaaucacgaucccaacaagggagugacagccgcuuguccucaugccggcgcgaaauccuuuuauaagaaucugaucuggcucguuaaaaagggcaacagcuaccccaaacugucuaaguccuauauuaaugacaaggggaaagaagugcuuguccuguggggaauccaccacccuagcaccuccgccgaucaacagggccucuaccagaacgcugacgccuacguguucguggggacaucuagauauagcaagaaauuuaagccggagauugcuauccggcccaaaguccgcgaucaggagggaagaaugaauuacuauuggacccugguugaaccuggcgacaagauuacguucgaggccacagggaaccugguggugccccgguacgcguuugccauggaacgcaacgcuggauccggcaucauuaucagcgauaccccuguccaugacugcaauacaaccugucaaacccccaaaggcgccaucaacacaucucucccguuccagaauauucacccuaucacgauugggaagugccccaaguaugugaaauccaccaagcugagacuugcuacaggacugcggaacguuccuagcauccagucucgcggccucuuuggggccauugccggauucaucgagggcggguggaccggaaugguggacggcugguacggcuaucaucaccagaaugaacaagggagcggauacgcugcggaucugaaauccacacagaacgccaucgacgagauuaccaauaaggucaacucugugaucgagaaaaugaauacgcaguuuacagcuguuggcaaggaguucaaccaccuugagaagagaauugaaaaucugaacaaaaagguggaugacggguuccucgauaucuggaccuacaaugccgagcugcugguccuccuggaaaacgagcggacccuugacuaucaugauagcaaugugaaaaaccuguacgagaagguccgcucccagcucaaaaacaaugccaaggaaauuggaaacggcuguuuugaguucuaucacaagugcgacaauacauguauggaaagcgugaaaaacgggaccuacgauuaucccaaguacucugaggaagcuaaacugaauagagaggagaucgacggcguuaaacuugaauccacacggaucuaucaaauucuggccaucuacagcacgguggcgucuucccucguccuggugguuagccugggagcuauuuccuuuuggaugugcucuaacggcagccuccagugccgcaucuguauuuga

SEQ ID NO: 201245 - RNA, 1698 nt, Artificial Sequence
  derived and/or modified CDS sequence (opt5) from hemagglutinin__InfluenzaA__AFM85179
augaaggugaaacugcucauccugcuuugcaccuucacagccacguacgcugacaccauuuguaucggcuaucacgccaacaauagcacagauaccgucgacacaguucuggagaagaacgugaccgugacacauuccgucaaucuccuggaaaacucucacaaugggaaacuuugccugcucaagggaauugcgccccugcagcugggcaacuguagcguggcuggguggauccucggaaauccugagugcgaacugcuuauuuccaaagagucuuggagcuacaucguugaaaccccgaaccccgagaauggcacguguuauccuggguacuuugccgauuaugaggaacugagagagcaacucuccucugugagcuccuucgaacgguuugagaucuuccccaaggagagcucuuggccuaaccauaccgucacaggaguguccgccagcugcucucacaauggcaaguccagcuuuuaccgcaaccugcuuuggcugaccggcaaaaaugggcucuaucccaaccugucuaaguccuacgcuaauaacaaagaaaaggagguucugauucucuggggagugcaucacccuccgaacaucggcgaccagagaacacuguacuauaccgaaaaugccuacgucagcgugguguccucucacuauagccggcgcuucacgcccgagauuacaaaaagaccuaagguccgggaucaggaagggcgcaucaacuacuauuggacccuucuggagcccggagacacaauuaucuuugaggcuaauggcaaccucauugccccuugguacgcguucgcccuguccagaggguuuggaagcggcaucaucauuucuaaugcucccauggaugaaugugacgccaagugccagaccccgcaaggcgcuaucaacuccagccuuccuuuccagaauguucaucccgugaccauuggggaguguccuaaauaugugcggucugccaagcugcgcauggucacaggacucagaaacauccccagcauucagucccggggccuguuuggggcgaucgccggauucaucgaaggcggguggacgggaaugguggauggcugguacggcuaccaccaucagaaugagcaagggucuggauaugcugccgaccagaaaagcacccagaacgcuauuaauggcaucacaaacaagguuaauuccgugauugaaaagaugaacacccaguuuacagccgucgggaaagaguucaauaaauucgagcgcagaauggaaaaccugaacaagaagguggaugacggauuucucgauaucuggaccuacaaugccgagcugcuuguucugcucgaaaacgagcggacgcuggacuuccacgacagcaaugugaaaaaccuuuaugaaaaggucaaaucucaacugaagaauaacgcuaaagagauuggcaaugggugcuuugaguucuaccacaaguguaacaaugaaugcauggaguccgugaagaacggcacauaugauuaccccaaauauagcgaagagucuaagcucaaucgcgagaaaaucgacggagucaagcuggaauccaugggcguguaccagauccuggcgauuuacagcaccguugccuccucucucgugcugcuugucagccugggggcuaucuccuuuuggaugugcucuaacggaagccuccaguguagaauuugcaucuga

SEQ ID NO: 201246 - RNA, 1701 nt, Artificial Sequence
  derived and/or modified CDS sequence (opt5) from hemagglutinin__InfluenzaA__AFN11846
augaagaccaucauugcccugagcuacauccucugccugguguucgcucagaaacuucccggcaacgacaauuccacagccacgcugugucucgggcaccaugcggucccuaacggaacccugguuaagacaauuaccaaugaucaaaucgaggugacaaacgcuaccgaacuugugcagucuagcuccacaggcagaauuugcgacucuccgcaccggauccuggaugggaaaaauuguacccucaucgacgcccugcugggagauccccauugcgacggcuuucagaacaaggagugggaucucuucgucgaacgcagcaaagccuauuccaauuguuacccuuaugacgugcccgauuacgcuucucugagaagccuuguugccuccagcgggacgcuggaguuuaccaacgaaggauucaauuggacaggcguggcucaggacggcaagucuuaugccugcaagcggggguccgucaagagcuuuuucucucgccucaacuggcugcacaaacuugaguacaaauauccugcgcugaaugugaccaugcccaacaaugauaaguuugacaaacucuacauuuggggaguucaucacccuuccacagauagcgaccaaaccucucuguacgugcaggccuccggcagagucacggugagcacaaagcggucccagcagaccgugaucccgaacauugggucucgccccugggucagaggaaucagcucccggauuagcaucuauuggacaauuguuaagccuggcgacauccugcucaucaauucuaccgggaaccugauugcuccccgcggauacuucaaaaucagaaacggcaaguccagcauuaugcggucugaugccccuaucggcaauuguaacagcgagugcauuacccccaauggguccaucccgaacgacaaaccuuuucaaaaugugaaccgcaucacauauggagcuugucccagauacgugaagcagaauacgcuuaaacuggccaccggcaugcggaacgucccugaaaagcagacacgcgggauuuucggagcgaucgccggcuuuauugagaaugggugggaaggaaugguggauggcugguauggcuucagacaccagaacucugaggggaccggacaagcugccgaccucaaaagcacacaggcugccaucgaucagauuaauggcaagcugaaccggcuuaucgagaagaccaaugaaaaauuucaucaaaucgagaaggaguucuccgaaguugaagggcgcauucaggaccuggagaaauacguggaggauacgaagaucgaccucuggagcuauaacgccgaacugcuggucgcucucgagaaucagcacacaauugaucugaccgacucugaaaugaacaaacuuuucgagagaacccggaagcagcugagagaaaacgcggaggauaugggaaauggcugcuuuaagaucuaccauaaaugugacaacgccugcauuggguccauccgcaauggcacauacgaccacgauguguaucgggacgaggcucucaacaauagauuccaaauuaagggaguugaacugaaaagcggcuacaaggauuggauccuuuggaucucuuuugccauuuccugcuuccugcucugugugguccugcugggguuuaucaugugggccugccagaaaggaaacauucgcuguaauaucugcauuuga

SEQ ID NO: 201247 - RNA, 1701 nt, Artificial Sequence; identical to SEQ ID NO: 195602
  derived and/or modified CDS sequence (opt5) from hemagglutinin__InfluenzaA__AFN17371

SEQ ID NO: 201248 - RNA, 1701 nt, Artificial Sequence; identical to SEQ ID NO: 194741
  derived and/or modified CDS sequence (opt5) from hemagglutinin__InfluenzaA__AFN17381

SEQ ID NO: 201249 - RNA, 1701 nt, Artificial Sequence; identical to SEQ ID NO: 194741
  derived and/or modified CDS sequence (opt5) from hemagglutinin__InfluenzaA__AFN17391

SEQ ID NO: 201250 - RNA, 1701 nt, Artificial Sequence; identical to SEQ ID NO: 194741
  derived and/or modified CDS sequence (opt5) from hemagglutinin__InfluenzaA__AFN17401

SEQ ID NO: 201251 - RNA, 1701 nt, Artificial Sequence; identical to SEQ ID NO: 194741
  derived and/or modified CDS sequence (opt5) from hemagglutinin__InfluenzaA__AFN17411

SEQ ID NO: 201252 - RNA, 1701 nt, Artificial Sequence; identical to SEQ ID NO: 194741
  derived and/or modified CDS sequence (opt5) from hemagglutinin__InfluenzaA__AFN17421

SEQ ID NO: 201253 - RNA, 1701 nt, Artificial Sequence; identical to SEQ ID NO: 194832
  derived and/or modified CDS sequence (opt5) from hemagglutinin__InfluenzaA__AFN17431

SEQ ID NO: 201254 - RNA, 1701 nt, Artificial Sequence
  derived and/or modified CDS sequence (opt5) from hemagglutinin__InfluenzaA__AFN17441
augaaggccauccuggugguccuccuguacaccuucgcuacagccaacgcggacacgcuuugcauuggcuaucacgcuaauaacagcaccgauacaguugacaccgugcuggagaaaaaugugacagucacccauuccgugaaccuccuggaagauaagcacaaugggaaacuuuguaagcugagaggaguugcgccccuccaucugggcaaaugcaacaucgccggguggauucugggaaauccugagugugaaucucucagcaaggcuuccucuuggagcuacaucguggagacauccucuagcgacaacgggaccugcuauccgggcgauuuuauugacuacgaagaacugcgggagcagcuuuccagcgucucuuccuucgaacgcuuugagaucuuccccaagacgagcucuuggccuaaucacgauuccaacaaaggagugaccgccgcuuguccccaugccggcgccaagagcuuuuauaaaaaucugaucuggcucguuaagaaaggcaacucuuacccuaagcuguccaagagcuauauuaaugacaaagggaaggaagugcuuguccuguggggaauccaccaccccuccacaucugccgaucaacagagccucuaccagaacgcugacgccuacguguucgugggcaccuccagauauagcaaaaaguuuaaaccugagauugcuauccggccgaagguccgcgaucaggaggggagaaugaauuacuauuggacacugguugaacccggagacaaaauuaccuucgaggccacgggcaaccugguggugccucgguacgcguuugccauggaacgcaacgcugggucuggaaucauuaucuccgauacacccguccaugacugcaauaccacaugucaaaccccuaagggcgccaucaacaccagccuccccuuccagaauauucacccgaucacaauuggcaagugcccuaaauaugugaagucuacgaaacugagacuugcuaccgggcugcggaacguucccagcauccagucccgcggacucuuuggcgccauugccggguucaucgagggaggcuggacagggaugguggacggaugguacggcuaucaucaccagaaugaacaaggcucuggguacgcugcggaucuuaagagcacccagaacgccaucgacgagauuacaaauaaagucaacuccgugaucgagaagaugaauacccaguuuacggcuguuggaaaggaguucaaccaccuggagaaaagaauugaaaaucugaacaagaaaguggaugacggcuuccucgauaucuggacauacaaugccgagcugcugguccuccuggaaaacgagcggacccuugacuaucaugauagcaaugugaagaaccuguacgagaaaguccgcucucagcucaagaacaaugccaaggaaauugggaacggauguuuugaguucuaucacaaaugcgacaauaccuguauggaauccgugaagaacggcacauacgauuauccuaaauacagcgaggaagcuaagcugaauagagaggagaucgacgggguuaaacuugaaucuacccggaucuaucaaauucuggccaucuacuccacaguggcgagcucccucguccuggugguuucucugggcgcuauuagcuuuuggaugugcuccaacggaucucuccagugccgcaucuguauuuga

SEQ ID NO: 201255 - RNA, 1701 nt, Artificial Sequence; identical to SEQ ID NO: 197296
  derived and/or modified CDS sequence (opt5) from hemagglutinin__InfluenzaA__AFN17451

SEQ ID NO: 201256 - RNA, 1701 nt, Artificial Sequence; identical to SEQ ID NO: 195583
  derived and/or modified CDS sequence (opt5) from hemagglutinin__InfluenzaA__AFN17467

SEQ ID NO: 201257 - RNA, 1701 nt, Artificial Sequence; identical to SEQ ID NO: 194741
  derived and/or modified CDS sequence (opt5) from hemagglutinin__InfluenzaA__AFN17477

SEQ ID NO: 201258 - RNA, 1701 nt, Artificial Sequence; identical to SEQ ID NO: 195602
  derived and/or modified CDS sequence (opt5) from hemagglutinin__InfluenzaA__AFN17487

SEQ ID NO: 201259 - RNA, 1701 nt, Artificial Sequence; identical to SEQ ID NO: 194741
  derived and/or modified CDS sequence (opt5) from hemagglutinin__InfluenzaA__AFN17497

SEQ ID NO: 201260 - RNA, 1701 nt, Artificial Sequence; identical to SEQ ID NO: 194741
  derived and/or modified CDS sequence (opt5) from hemagglutinin__InfluenzaA__AFN17507

SEQ ID NO: 201261 - RNA, 1701 nt, Artificial Sequence; identical to SEQ ID NO: 195583
  derived and/or modified CDS sequence (opt5) from hemagglutinin__InfluenzaA__AFN17517

SEQ ID NO: 201262 - RNA, 1701 nt, Artificial Sequence; identical to SEQ ID NO: 195602
  derived and/or modified CDS sequence (opt5) from hemagglutinin__InfluenzaA__AFN17527

SEQ ID NO: 201263 - RNA, 1701 nt, Artificial Sequence; identical to SEQ ID NO: 194741
  derived and/or modified CDS sequence (opt5) from hemagglutinin__InfluenzaA__AFN17537

SEQ ID NO: 201264 - RNA, 1701 nt, Artificial Sequence; identical to SEQ ID NO: 194983
  derived and/or modified CDS sequence (opt5) from hemagglutinin__InfluenzaA__AFN17547

SEQ ID NO: 201265 - RNA, 1701 nt, Artificial Sequence; identical to SEQ ID NO: 196272
  derived and/or modified CDS sequence (opt5) from hemagglutinin__InfluenzaA__AFN17557

SEQ ID NO: 201266 - RNA, 1701 nt, Artificial Sequence; identical to SEQ ID NO: 195583
  derived and/or modified CDS sequence (opt5) from hemagglutinin__InfluenzaA__AFN17567

SEQ ID NO: 201267 - RNA, 1701 nt, Artificial Sequence; identical to SEQ ID NO: 194983
  derived and/or modified CDS sequence (opt5) from hemagglutinin__InfluenzaA__AFN17574

SEQ ID NO: 201268 - RNA, 1701 nt, Artificial Sequence; identical to SEQ ID NO: 194741
  derived and/or modified CDS sequence (opt5) from hemagglutinin__InfluenzaA__AFN17580

SEQ ID NO: 201269 - RNA, 1701 nt, Artificial Sequence; identical to SEQ ID NO: 194741
  derived and/or modified CDS sequence (opt5) from hemagglutinin__InfluenzaA__AFN17586

SEQ ID NO: 201270 - RNA, 1701 nt, Artificial Sequence; identical to SEQ ID NO: 195602
  derived and/or modified CDS sequence (opt5) from hemagglutinin__InfluenzaA__AFN17595

SEQ ID NO: 201271 - RNA, 1701 nt, Artificial Sequence; identical to SEQ ID NO: 194741
  derived and/or modified CDS sequence (opt5) from hemagglutinin__InfluenzaA__AFN17605

SEQ ID NO: 201272 - RNA, 1701 nt, Artificial Sequence; identical to SEQ ID NO: 194741
  derived and/or modified CDS sequence (opt5) from hemagglutinin__InfluenzaA__AFN17615

SEQ ID NO: 201273 - RNA, 1701 nt, Artificial Sequence; identical to SEQ ID NO: 194741
  derived and/or modified CDS sequence (opt5) from hemagglutinin__InfluenzaA__AFN17625

SEQ ID NO: 201274 - RNA, 1701 nt, Artificial Sequence; identical to SEQ ID NO: 194741
  derived and/or modified CDS sequence (opt5) from hemagglutinin__InfluenzaA__AFN17635

SEQ ID NO: 201275 - RNA, 1701 nt, Artificial Sequence
  derived and/or modified CDS sequence (opt5) from hemagglutinin__InfluenzaA__AFN17645
augaaggccauccuggugguccuccuguacaccuucgcuacagccaacgcggacacgcuuugcauuggcuaucacgcuaauaacagcaccgauacaguugacaccgugcuggagaagaaugugacagucacccauuccgugaaccuccuggaagauaagcacaaugggaaacuuuguaagcugagaggaguugcuccccuccaucugggcaaaugcaacaucgccggguggauucugggaaauccugagugugaaucucucagcacagccuccucuuggagcuacaucguggagaccuccucuagcgacaacggcacgugcuauccgggggauuuuauugacuacgaggaacugcgggagcagcuuuccagcgucucuuccuucgaacgcguggagaucuuucccaagaccagcucuuggccuaaucacgauuccaacaagggaguuacagccgcuuguccccaugccggcgcgaaaucuuucuauaagaaucugaucuggcucgugaaaaagggcaacagcuacccuaaacuguccaagagcuauauuaaugacaaggggaaagaaguccuugugcuguggggaauccaccaccccuccaccucugccgaucaacagagccucuaccagaacgcugacgccuacguguuugucggcacauccagauauagcaagaaauucaagccugagauugcuauccggccgaaaguucgcgaucaggaggggagaaugaauuacuauuggacccugguggaacccggagacaagauuacguuugaggccacaggcaaccugguggucccucgguacgcguucgccauggaacgcaacgcugggucuggaaucauuaucuccgauacccccgugcaugacugcaauacaaccugucaaaccccuaaaggcgccaucaacacaagccuccccuuucagaauauucacccgaucacgauuggcaagugcccuaaguauguuaaaucuaccaagcugagacuugcuacagggcugcggaacgugcccagcauccagucccgcggacucuucggcgccauugccggguuuaucgagggaggcuggaccgggauggucgacggaugguacggcuaucaucaccagaaugaacaaggcucuggguacgcugcggaucugaaaagcacacagaacgccaucgacgagauuaccaauaaggugaacuccguuaucgagaaaaugaauacgcaguucacagcugugggaaaggaauuuaaccaccuugagaagagaauugaaaaucugaacaaaaaggucgaugacggcuuccucgauaucuggaccuacaaugccgagcugcuggugcuccuggaaaacgagcggacccuugacuaucaugauagcaaugucaaaaaccuguacgagaaggugcgcucucagcucaaaaacaaugccaaggaaauugggaacggauguuucgaguuuuaucacaagugcgacaauacauguauggaauccguuaaaaacggcaccuacgauuauccuaaguacagcgaggaagcuaaacugaauagagaggagaucgacggggugaaacuugaaucuacacggaucuaucaaauucuggccaucuacuccacggucgcgagcucccucgugcugguugugucucugggcgcuauuagcuucuggaugugcuccaacggaucucuccagugccgcaucuguauuuga

SEQ ID NO: 201276 - RNA, 1701 nt, Artificial Sequence; identical to SEQ ID NO: 195602
  derived and/or modified CDS sequence (opt5) from hemagglutinin__InfluenzaA__AFN17655

SEQ ID NO: 201277 - RNA, 1701 nt, Artificial Sequence; identical to SEQ ID NO: 195602
  derived and/or modified CDS sequence (opt5) from hemagglutinin__InfluenzaA__AFN17665

SEQ ID NO: 201278 - RNA, 1701 nt, Artificial Sequence
  derived and/or modified CDS sequence (opt5) from hemagglutinin__InfluenzaA__AFN17675
augaaggccauccugauugugcuccuguacaccuucgcuacagccaacgcggacacgcuuugcaucggcuaucacgcuaauaacagcaccgauacagucgacaccguucuggagaaaaaugugacagugacccauuccgucaaccuccuggaagauaagcacaaugggaaacuuuguaagcugagaggaguggcuccccuccaucugggcaaaugcaacauugccggguggauccugggaaauccugagugugaaucucucagcacagccuccucuuggagcuacauuguugagaccuccucuagcgacaacggcacgugcuauccgggggauuuuaucgacuacgaagaacugcgggagcagcuuuccagcgugucuuccuucgaacgcuuugagaucuuccccaagaccagcucuuggccuaaucacgauuccaacaagggagucacagccgcuuguccccaugccggcgcgaaaucuuuuuauaagaaucugauuuggcucgugaaaaagggcaacagcuacccuaaacuguccgaaagcuauaucaaugacaaggggaaggagguucuugugcuguggggcauucaccaccccuccaccucugccgaucaacagagccucuaccagaacgcugacgccuacgucuucgugggaacauccagauauagcaaaaaguuuaaaccugagaucgcuauucggccgaaggugcgcgaucaggaagggagaaugaauuacuauuggacccuggucgagcccggagacaaaaucacguucgaagccacaggcaaccugguugugccucgguacgcguuugccauggagcgcaacgcugggucuggaauuaucaucuccgauacccccgugcaugacugcaauacaaccugucaaaccccuaagggcgccauuaacacaagccuccccuuccagaauauccacccgauuacgaucggcaaaugcccuaaguaugucaagucuaccaaacugagacuugcuacagggcugcggaacgugcccagcauucagucccgcggacucuuuggcgccaucgccggguucaucgaaggaggcuggaccgggaugguugacggaugguacggcuaucaucaccagaaugagcaaggcucuggguacgcugcggaucuuaagagcacacagaacgccauugacgagaucaccaauaaagugaacuccgucauugaaaagaugaauacgcaguuuacagcugugggaaaagaguucaaccaccuggaaaagagaaucgagaaucugaacaagaaaguugaugacggcuuccucgauauuuggaccuacaaugccgaacugcuggugcuccuggagaacgagcggacccuugacuaucaugauagcaaugucaagaaccuguacgaaaaagugcgcucucagcucaagaacaaugccaaagagaucgggaacggauguuuugaguucuaucacaagugcgacaauacauguauggaguccgucaagaacggcaccuacgauuauccuaaauacagcgaagaggcuaagcugaauagagaggaaaucgacggggugaaacuugagucuacacggauuuaucaaauccuggccauuuacuccacgguugcgagcucccucgugcuggucgugucucugggcgcuaucagcuuuuggaugugcuccaacggaucucuccagugccgcauuuguaucuga

SEQ ID NO: 201279 - RNA, 1701 nt, Artificial Sequence
  derived and/or modified CDS sequence (opt5) from hemagglutinin__InfluenzaA__AFN17685
augaaggccauccuggugguccuccuguacaccuucgcuacagccaacgcggacacgcuuugcauuggcuaucacgcuaauaacagcaccgauacaguugacaccauccuggagaagaaugugacagugacccauuccgucaaccuccuggaagauaagcacaaugggaaacuuuguaagcugagaggaguggcuccccuccaucugggcaaaugcaacauugccggguggauccugggaaauccugagugugaaucucucagcacagccuccucuuggagcuacauuguugagaccuccucuagcgacaacggcacgugcuauccgggggauuuuaucgacuacgaagaacugcgggagcagcuuuccagcgugucuuccuucgaacgcuuugagaucuuccccaagaccagcucuuggccuaaucacgauuccaacaagggagucacagccgcuuguccccaugccggcgcgaaaucuuuuuauaagaaucugauuuggcucgugaaaaagggcaacagcuacccuaaacuguccaagagcuauaucaaugacaaggggaaagaaguucuugugcugugggggauucaccaccccuccaccucugccgaucaacagagccucuaccagaacgcugacgccuacgucuucgugggcacauccagauauagcaagaaauuuaagccugagaucgcuauucggccgaaagugcgcgaucaggaggggagaaugaauuacuauuggacccuggucgaaccccgggacaagaucacguucgaggccacaggaaaccugguugugccucgcuacgcguuugccauggaaagaaacgcuggcucugggauuaucaucuccgauacccccgugcaugacugcaauacaaccugucaaaccccuaaaggagccauuaacacaagccuccccuuccagaauauccacccgauuacgaucggcaagugcccuaaguaugucaaaucuaccaagcugcggcuugcuacaggccugcgcaacgugcccagcauucaguccagagggcucuuuggagccaucgccggcuucaucgagggaggauggaccggcaugguugacgggugguacggauaucaucaccagaaugaacaaggcucuggcuacgcugcggaucugaaaagcacacagaacgccauugacgagaucaccaauaaggugaacuccgucauugagaaaaugaauacgcaguuuacagcuguggggaaggaguucaaccaccuugagaagcggaucgaaaaucugaacaaaaagguugaugacggauuccucgauauuuggaccuacaaugccgagcugcuggugcuccuggaaaacgagcgcacccuugacuaucaugauagcaaugucaaaaaccuguacgagaaggugagaucucagcucaaaaacaaugccaaggaaaucggcaacggguguuuugaguucuaucacaagugcgacaauacauguauggaauccgucaaaaacggaaccuacgauuauccuaaguacagcgaggaagcuaaacugaaucgggaggagaucgacggcgugaaacuugaaucuacacgcauuuaucaaauccuggccauuuacuccacgguugcgagcucccucgugcuggucgugucucugggggcuaucagcuuuuggaugugcuccaacggcucucuccagugcagaauuuguaucuga

SEQ ID NO: 201280 - RNA, 1701 nt, Artificial Sequence; identical to SEQ ID NO: 194741
  derived and/or modified CDS sequence (opt5) from hemagglutinin__InfluenzaA__AFN17695

SEQ ID NO: 201281 - RNA, 1701 nt, Artificial Sequence; identical to SEQ ID NO: 194741
  derived and/or modified CDS sequence (opt5) from hemagglutinin__InfluenzaA__AFN17705

SEQ ID NO: 201282 - RNA, 1701 nt, Artificial Sequence; identical to SEQ ID NO: 195370
  derived and/or modified CDS sequence (opt5) from hemagglutinin__InfluenzaA__AFN17715

SEQ ID NO: 201283 - RNA, 1701 nt, Artificial Sequence
  derived and/or modified CDS sequence (opt5) from hemagglutinin__InfluenzaA__AFN17725
augaaggccauccuggugguccuccuguacaccuucgcuacagccaacgcggacacgcuuugcauuggcuaucacgcuaauaacagcaccgauacaguugacaccgugcuggagaaaaaugugacagucacccauuccgugaaccuccuggaagauaagcacaaugggaaacuuuguaagcugagaggaguugcuccccuccaucugggcaaaugcaacaucgccggguggauucugggaaauccugagugugaaucucucagcacagccuccucuuggagcuacaucguggagaccuccucuagcgacaacggcacgugcuauccgggggauuuuauugacuacgaagaacugcgggagcagcuuuccagcgucucuuccuucgaacgcuuugagaucuuccccaagaccagcucuuggccuaaucacgauuccaacaagggagugacagccgcuuguccccaugccggcgcgaaaucuuuuuauaagaaucugaucuggcucguuaaaaagggcaacagcuacccuaaacuguccaagagcuauauuaaugacaaggggaaagaagugcuuguccuguggggaauccaccaccccuccaccucugccgaucaacagagccucuaccagaacgcugacgccuacguguucgugggcacauccagauauagcaagaaauuuaagccugagauugcuauccggccgcagguccgcgaucaagaggggagaaugaauuacuauuggacccugguugaacccggagacaaaauuacguucgaggccacaggcaaccugguggugccucgguacgcguuugccauggaacgcaacgcugggucuggaaucauuaucuccgauacccccguccaugacugcaauacaaccugucagaccccuaagggcgccaucaacacaagccuccccuuccagaauauucacccgaucacgauuggcaaaugcccuaaguaugugaagucuaccaaacugagacuugcuacagggcugcggaacguucccagcauccagucccgcggacucuuuggcgccauugccggguucaucgagggaggcuggaccgggaugguggacggaugguacggcuaucaucaccaaaaugaacagggcucuggguacgcugcggaucuuaagagcacacagaacgccaucgacgagauuaccaauaaagucaacuccgugaucgagaagaugaauacgcaguuuacagcuguuggaaaagaguucaaccaccuggagaagagaauugaaaaucugaacaagaaaguggaugacggcuuccucgauaucuggaccuacaaugccgagcugcugguccuccuggaaaacgagcggacccuugacuaucaugauagcaaugugaagaaccuguacgagaaaguccgcucucaacucaagaacaaugccaaagaaauugggaacggauguuuugaguucuaucacaagugcgacaauacauguauggaauccgugaagaacggcaccuacgauuauccuaaauacagcgaggaagcuaagcugaauagagaggagaucgacgggguuaaacuugaaucuacacggaucuaucagauucuggccaucuacuccacgguggcgagcucccucguccuggugguuucucugggcgcuauuagcuuuuggaugugcuccaacggaucucuccagugccgcaucuguauuuga

SEQ ID NO: 201284 - RNA, 1701 nt, Artificial Sequence; identical to SEQ ID NO: 194741
  derived and/or modified CDS sequence (opt5) from hemagglutinin__InfluenzaA__AFN17735

SEQ ID NO: 201285 - RNA, 1701 nt, Artificial Sequence; identical to SEQ ID NO: 194741
  derived and/or modified CDS sequence (opt5) from hemagglutinin__InfluenzaA__AFN17742

SEQ ID NO: 201286 - RNA, 1701 nt, Artificial Sequence; identical to SEQ ID NO: 194741
  derived and/or modified CDS sequence (opt5) from hemagglutinin__InfluenzaA__AFN17748

SEQ ID NO: 201287 - RNA, 1701 nt, Artificial Sequence; identical to SEQ ID NO: 194741
  derived and/or modified CDS sequence (opt5) from hemagglutinin__InfluenzaA__AFN17757

SEQ ID NO: 201288 - RNA, 1701 nt, Artificial Sequence; identical to SEQ ID NO: 195370
  derived and/or modified CDS sequence (opt5) from hemagglutinin__InfluenzaA__AFN17767

SEQ ID NO: 201289 - RNA, 1701 nt, Artificial Sequence; identical to SEQ ID NO: 199751
  derived and/or modified CDS sequence (opt5) from hemagglutinin__InfluenzaA__AFN17774

SEQ ID NO: 201290 - RNA, 1701 nt, Artificial Sequence; identical to SEQ ID NO: 194741
  derived and/or modified CDS sequence (opt5) from hemagglutinin__InfluenzaA__AFN17783

SEQ ID NO: 201291 - RNA, 1701 nt, Artificial Sequence; identical to SEQ ID NO: 195370
  derived and/or modified CDS sequence (opt5) from hemagglutinin__InfluenzaA__AFN17793

SEQ ID NO: 201292 - RNA, 1701 nt, Artificial Sequence; identical to SEQ ID NO: 194741
  derived and/or modified CDS sequence (opt5) from hemagglutinin__InfluenzaA__AFN17803

SEQ ID NO: 201293 - RNA, 1701 nt, Artificial Sequence; identical to SEQ ID NO: 194741
  derived and/or modified CDS sequence (opt5) from hemagglutinin__InfluenzaA__AFN17813

SEQ ID NO: 201294 - RNA, 1701 nt, Artificial Sequence
  derived and/or modified CDS sequence (opt5) from hemagglutinin__InfluenzaA__AFN17823
augaaggccauccuggugguccuccuguacaccuucgcuacagccaacgcggacacgcuuugcauuggcuaucacgcuaauaacagcaccgauacaguugacaccgugcuggagaaaaaugugacagucacccauuccgugaaccuccuggaagauaagcacaaugggaaacuuuguaagcugagaggaguugcuccccuccaucugggcaaaugcaacaucgccggguggauucugggaaauccugagugugaaucucucagcacagccuccucuuggagcuacaucguggagaccuccucuagcgacaacggcacgugcuauccgggggauuuuauugacuacgaagaacugcgggagcagcuuuccagcgucucuuccuucgaacgcuuugagaucuuccccaagaccagcucuuggccuaaucacgauuccaacaagggagugacagccgcuuguccccaugccggcgcgaaaucuuuuuauaagaaucugaucuggcucguuaaaaagggcaacagcuacccuaaacuguccgaaagcuauauuaaugacaaggggaaggaggugcuuguccuguggggaauccaccaccccuccaccucugccgaucaacagagccucuaccagaacgcugacgccuacguguucgugggcacauccagauauagcaaaaaguuuaaaccugagauugcuauccggccgaagguccgcgaucaggaagggagaaugaauuacuauuggacccugguugagcccggagacaaaauuacguucgaagccacaggcaaccugguggugccucgguacgcguuugccauggagcgcaacgcugggucuggaaucauuaucuccgauacccccguccaugacugcaauacaaccugucaaaccccuaagggcgccaucaacacaagccuccccuuccagaauauucacccgaucacgauuggcaaaugcccuaaguaugugaagucuaccaaacugagacuugcuacagggcugcggaacguucccagcauccagucccgcggacucuuuggcgccauugccggguucaucgaaggaggcuggaccgggaugguggacggaugguacggcuaucaucaccagaaugagcaaggcucuggguacgcugcggaucuuaagagcacacagaacgccaucgacgagauuaccaauaaagucaacuccgugaucgaaaagaugaauacgcaguuuacagcuguuggaaaagaguucaaccaccuggaaaagagaauugagaaucugaacaagaaaguggaugacggcuuccucgauaucuggaccuacaaugccgaacugcugguccuccuggagaacgagcggacccuugacuaucaugauagcaaugugaagaaccuguacgaaaaaguccgcucucagcucaagaacaaugccaaagagauugggaacggauguuuugaguucuaucacaagugcgacaauacauguauggaguccgugaagaacggcaccuacgauuauccuaaauacagcgaagaggcuaagcugaauagagaggaaaucgacgggguuaaacuugagucuacacggaucuaucaaauucuggccaucuacuccacgguggcgagcucccucguccuggugguuucucugggcgcuauuagcuuuuggaugugcuccaacggaucucuccagugccgcaucuguauuuga

SEQ ID NO: 201295 - RNA, 1701 nt, Artificial Sequence
  derived and/or modified CDS sequence (opt5) from hemagglutinin__InfluenzaA__AFN17833
augaaggccauccuggugguccuccuguacaccuucgcuacagccaacgcggacacgcuuugcauuggcuaucacgcuaauaacagcaccgauacaguugacaccgugcuggagaagaaugugacagucacccauuccgugaaccuccuggaagauaagcacaaugggaaacuuuguaagcugagaggaguugcuccccuccaucugggcaaaugcaacaucgccggguggauucugggaaauccugagugugaaucucucagcacagccuccucuuggagcuacaucguggagaccuccucuagcgacaacggcacgugcuauccgggggauuuuauugacuacgaagaacugcgggagcagcuuuccagcgucucuuccuucgaacgcuuugagaucuuccccaagaccagcucuuggccuaaucacgauuccaacaagggagugacagccgcuugucccaaugccggcgcgaaaucuuuuuauaagaaccugaucuggcucguuaaaaagggcaauagcuacccuaaacuguccaagagcuauauuaacgacaaggggaaagaagugcuuguccuguggggaauccaucaccccuccaccucugccgaucaacagagccucuaccagaaugcugacgccuacguguucgugggcacauccagauauagcaagaaauuuaagccugagauugcuauccggccgaaaguccgcgaucaggaggggagaaugaacuacuauuggacccugguugaacccggagacaagauuacguucgaggccacaggcaaccugguggugccucgguacgcguuugccauggaacgcaaugcugggucuggaaucauuaucuccgauacccccguccacgacugcaacacaaccugucaaaccccuaaaggcgccaucaauacaagccuccccuuccagaacauucauccgaucacgauuggcaagugcccuaaguaugugaaaucuaccaagcugagacuugcuacagggcugcggaauguucccagcauccagucccgcggacucuuuggcgccauugccggguucaucgagggaggcuggaccgggaugguggacggaugguacggcuaucaccaucagaacgaacaaggcucuggguacgcugcggaucugaaaagcacacagaaugccaucgacgagauuaccaacaaggucaauuccgugaucgagaaaaugaacacgcaguuuacagcuguuggaaaggaguucaaucaccuugagaagagaauugaaaaccugaauaaaaagguggaugacggcuuccucgauaucuggaccuacaacgccgagcugcugguccuccuggaaaaugagcggacccuugacuaucacgauagcaacgugaaaaaccuguacgagaagguccgcucucagcucaaaaauaacgccaaggaaauugggaauggauguuuugaguucuaucauaagugcgacaacacauguauggaauccgugaaaaauggcaccuacgauuauccuaaguacagcgaggaagcuaaacugaacagagaggagaucgacgggguuaaacuugaaucuacacggaucuaucaaauucuggccaucuacuccacgguggcgagcucccucguccuggugguuucucugggcgcuauuagcuuuuggaugugcuccaauggaucucuccagugccgcaucuguauuuga

SEQ ID NO: 201296 - RNA, 1701 nt, Artificial Sequence; identical to SEQ ID NO: 199250
  derived and/or modified CDS sequence (opt5) from hemagglutinin__InfluenzaA__AFN17843

SEQ ID NO: 201297 - RNA, 1701 nt, Artificial Sequence; identical to SEQ ID NO: 194741
  derived and/or modified CDS sequence (opt5) from hemagglutinin__InfluenzaA__AFN17853

SEQ ID NO: 201298 - RNA, 1701 nt, Artificial Sequence; identical to SEQ ID NO: 194983
  derived and/or modified CDS sequence (opt5) from hemagglutinin__InfluenzaA__AFN17863

SEQ ID NO: 201299 - RNA, 1701 nt, Artificial Sequence
  derived and/or modified CDS sequence (opt5) from hemagglutinin__InfluenzaA__AFN17873
augaaggccauccuggugguccuccuguacaccuucgcuacagccaacgcggacacgcuuugcauuggcuaucacgcuaauaacagcaccgauacaguugacaccgugcuggagaaaaaugugacagucacccauuccgugaaccuccuggaagauaagcacaaugggaaacuuuguaagcugagaggaguugcuccccuccaucugggcaaaugcaacaucgccggguggauucugggaaauccugagugugaaucucucagcacagccggcuccuggucuuacaucguggagaccagcuccucugacaacgggacgugcuauccgggagauuuuauugacuacgaagaacugcgggagcagcuuagcuccgucagcucuuucgaacgcuuugagaucuuccccaagaccuccagcuggccuaaucacgaucugaacaagggcgugacagccgcuuguccccaugccggcgcgaaaucuuuuuauaagaaucucaucuggcugguuaaaaaggggaacuccuacccuaaacuuagcaagucuuauauuaaugacaagggaaaagaagugcugguccucuggggcauccaccaccccuccaccagcgccgaucaacagucccuguaccagaacgcugacgccuacguguucguggggacaucuagauauagcaagaaauuuaagccugagauugcuauccggccgaaaguccgcgaucaggagggaagaaugaauuacuauuggacccugguugaacccggcgacaagauuacguucgaggccacagggaaccucguggugccucgguacgcguuugccauggaacgcaacgcuggauccggcaucauuaucagcgauacccccguccaugacugcaauacaaccugucaaaccccuaaaggcgccaucaacacaucucugcccuuccagaauauucacccgaucacgauugggaagugcccuaaguaugugaaauccaccaaacuuagacuggcuacaggacuccggaacguucccagcauccagucucgcggccuguuuggggccauugccggauucaucgagggcggguggaccggaaugguggacggcugguacggcuaucaucaccagaaugaacaagggagcggauacgcugcggaucuuaaguccacacagaacgccaucgacgagauuaccaauaaggucaacucugugaucgagaaaaugaauacgcaguuuacagcuguuggcaaggaguucaaccaccuggagaagagaauugaaaaucucaacaaaaagguggaugacggguuccuggauaucuggaccuacaaugccgagcugcucguccugcuugaaaacgagcggacccuggacuaucaugauagcaaugugaaaaaccucuacgagaagguccgcucccagcugaaaaacaaugccaaggaaauuggaaacggcuguuuugaguucuaucacaagugcgacaauacauguauggaaagcgugaaaaacgggaccuacgauuauccuaaguacucugaggaagcuaaacuuaauagagaggagaucgacggcguuaagcuggaauccacacggaucuaucaaauucucgccaucuacagcacgguggcgucuucccugguccuggugguuagccucggagcuauuuccuuuuggaugugcucuaacggcagccugcagugccgcaucuguauuuga

SEQ ID NO: 201300 - RNA, 1701 nt, Artificial Sequence
  derived and/or modified CDS sequence (opt5) from hemagglutinin__InfluenzaA__AFN17883
augaaggccauccuggugguccuccuguacaccuucgcuacagccaacgcggacacgcuuugcauuggcuaucacgcuaauaacagcaccgauacaguugacaccgugcuggagaaaaaugugacagucacccauuccgugaaccuccuggaagauaagcacaaugggaaacuuuguaagcugagaggaguugcuccccuccaucugggcaaaugcaacaucgccggguggauucugggaaauccugagugugaaucucucagcacagccuccucuuggagcuacaucguggagaccuccucuagcgacaacggcacgugcuauccgggggauuuuauugacuacgaagaacugcgggagcagcuuuccagcgucucuuccuucgaacgcuuugagaucuuccccaagaccagcucuuggccuaaucacgauuccaacaagggagugacagccgcuuguccccaugccggcgcgaaaucuuuuuauaagaaucugaucuggcucguuaaaaagggcaacagcuacccuaaacuguccaagagcuauauuaaugacaaggggaaagaagugcuuguccuguggggaauccaccaccccuccaccucugccgaucaacagagccucuaccagaacgcugacgccuacguguucgugggcacauccagauauagcaagaaauuuaagccugagauugcuauccggccgaaaguccgcgaucaggaggggagaaugaauuacuauuggacccugguugaacccggagacaagauuacguucgaggccacaggcaaccugguggugccucgguacgcguuugccauggaacgcaacgcugggucuggaaucauuaucuccgauacccccguccaugacugcaauacaaccugucaaacccucaaaggcgccaucaacacaagccugccuuuccagaauauucaccccaucacgauuggcaagugcccgaaguaugugaaaucuaccaaacuuagacuggcuacagggcuccggaacguuccuagcauccagucccgcggacuguuuggcgccauugccggguucaucgagggaggcuggaccgggaugguggacggaugguacggcuaucaucaccagaaugaacaaggcucuggguacgcugcggaucuuaagagcacacagaacgccaucgacgagauuaccaauaaggucaacuccgugaucgagaaaaugaauacgcaguuuacagcuguuggaaaggaguucaaccaccuggagaagagaauugaaaaucucaacaaaaagguggaugacggcuuccuggauaucuggaccuacaaugccgagcugcucguccugcuugaaaacgagcggacccuggacuaucaugauagcaaugugaaaaaccucuacgagaagguccgcucucagcugaaaaacaaugccaaggaaauugggaacggauguuuugaguucuaucacaagugcgacaauacauguauggaauccgugaaaaacggcaccuacgauuaucccaaguacagcgaggaagcuaaacuuaauagagaggagaucgacgggguuaagcuggaaucuacacggaucuaucaaauucucgccaucuacuccacgguggcgagcucccugguccuggugguuucucucggcgcuauuagcuuuuggaugugcuccaacggaucucugcagugccgcaucuguauuuga

SEQ ID NO: 201301 - RNA, 1701 nt, Artificial Sequence; identical to SEQ ID NO: 194741
  derived and/or modified CDS sequence (opt5) from hemagglutinin__InfluenzaA__AFN17893

SEQ ID NO: 201302 - RNA, 1701 nt, Artificial Sequence
  derived and/or modified CDS sequence (opt5) from hemagglutinin__InfluenzaA__AFN17903
augaaggccauccuggugguccuccuguacaccuucgcuacagccaacgcggacacgcuuugcauuggcuaucacgcuaauaacagcaccgauacaguugacaccgugcuggagaaaaaugugacagucacccauuccgugaaccuccuggaagauaagcacaaugggaaacuuuguaagcugagaggaguugcuccccuccaucugggcaaaugcaacaucgccggguggauucugggaaauccugagugugaaucucucagcacagccuccucuuggagcuacaucguggagaccuccucuagcgacaacggcacgugcuauccgggggauuuuauugacuacgaagaacugcgggagcagcuuuccagcgucucuuccuucgaacgcuuugagaucuuccccaagaccagcucuuggccuaaucacgaauccaacaagggagugacagccgcuuguccccaugccggcgcgaaaucuuuuuauaagaaucugaucuggcucguuaaaaagggcaacagcuacccuaaacuguccaagagcuaugugaaugauaaggggaaagagguccuugugcuguggggcauucaccaccccuccaccucugccgaccaacagagccucuaccagaacgcugaugccuacguguucgucggaacauccagauauagcaagaaauuuaagccugagaucgcuauucggccgaaaguucgcgaccaggaagggagaaugaauuacuauuggacccugguggagcccggagauaagaucacguucgaagccacaggcaaccugguggucccucgguacgcguuugccauggagcgcaacgcugggucuggaauuaucauuuccgacacccccgugcaugauugcaauacaaccugucaaaccccuaaaggcgccaucaacacaagccuccccuuccagaauauccacccgauuacgaucggcaagugcccuaaguauguuaaaucuaccaagcugagacuugcuacagggcugcggaacgugcccagcauucagucccgcggacucuuuggcgccaucgccggguucauugaaggaggcuggaccgggauggucgacggaugguacggcuaucaucaccagaaugagcaaggcucuggguacgcugcggaccugaaaagcacacagaacgccaucgaugagaucaccaauaaggugaacuccguuauugaaaagaugaauacgcaguuuacagcugugggaaaggaguucaaccaccuugaaaagagaaucgagaaucugaacaaaaaggucgacgauggcuuccucgacauuuggaccuacaaugccgaacugcuggugcuccuggagaacgagcggacccuugauuaucaugacagcaaugucaaaaaccuguacgaaaaggugcgcucucagcucaaaaacaaugccaaggagaucgggaacggauguuuugaguucuaucacaagugcgauaauacauguauggaguccguuaaaaacggcaccuacgacuauccuaaguacagcgaagaggcuaaacugaauagagaggaaauugauggggugaaacuugagucuacacggaucuaucaaauccuggccauuuacuccacggucgcgagcucccucgugcugguugugucucugggcgcuaucagcuuuuggaugugcuccaacggaucucuccagugccgcauuuguaucuga

SEQ ID NO: 201303 - RNA, 1701 nt, Artificial Sequence; identical to SEQ ID NO: 195094
  derived and/or modified CDS sequence (opt5) from hemagglutinin__InfluenzaA__AFN17919

SEQ ID NO: 201304 - RNA, 1701 nt, Artificial Sequence; identical to SEQ ID NO: 194983
  derived and/or modified CDS sequence (opt5) from hemagglutinin__InfluenzaA__AFN17929

SEQ ID NO: 201305 - RNA, 1701 nt, Artificial Sequence; identical to SEQ ID NO: 200999
  derived and/or modified CDS sequence (opt5) from hemagglutinin__InfluenzaA__AFN17939

SEQ ID NO: 201306 - RNA, 1701 nt, Artificial Sequence; identical to SEQ ID NO: 195602
  derived and/or modified CDS sequence (opt5) from hemagglutinin__InfluenzaA__AFN17949

SEQ ID NO: 201307 - RNA, 1701 nt, Artificial Sequence
  derived and/or modified CDS sequence (opt5) from hemagglutinin__InfluenzaA__AFN17959
augaaggccauccuggugguccuccuguacaccuucgcuacagccaacgcggacacgcuuugcauuggcuaucacgcuaauaacagcaccgauacaguugacaccgugcuggagaagaaugugacagucacccauuccgugaaccuccuggaagauaagcacaaugggaaacuuuguaagcugagaggaguugcuccccuccaucugggcaaaugcaacaucgccggguggauucugggaaauccugagugugaaucucucagcacagccuccucuuggagcuacaucguggagaccuccucuagcgacaacggcacgugcuauccgggggauuuuauugacuacgaagaacugcgggagcagcuuuccagcgucucuuccuucgaacgcuuugagaucuuccccaagaccagcucuuggccuaaucacgauuccaacaagggagugacagccgcuuguccccaugccggcgcgaaaucuuuuuauaagaaucugaucuggcucguuaaaaagggcaacagcuacccuaaacuguccaagagcuaugugaaugacaaggggaaagaaguccuugugcuguggggcauucaccaccccuccaccucugccgaucaacagagccucuaccagaacgcugacgccuacguguucgucggaacauccagauauagcaagaaauuuaagccugagaucgcuauucggccgaaaguucgcgaucaggaggggagaaugaauuacuauuggacccugguggaacccggagacaagaucacguucgaggccacaggcaaccugguggucccucgguacgcguuugccauggaacgcaacgcugggucuggaauuaucauuuccgauacccccgugcaugacugcaauacaaccugucaaaccccuaaaggcgccaucaacacaagccuccccuuccagaauauccacccgauuacgaucggcaagugcccuaaguauguuaaaucuaccaagcugagacuugcuacagggcugcggaacgugcccagcauucagucccgcggacucuuuggcgccaucgccggguucauugagggaggcuggaccgggauggucgacggaugguacggcuaucaucaccagaaugaacaaggcucuggguacgcugcggaucugaaaagcacacagaacgccaucgacgagaucaccaauaaggugaacuccguuauugagaaaaugaauacgcaguuuacagcugugggaaaggaguucaaccaccuugagaagagaaucgaaaaucugaacaaaaaggucgaugacggcuuccucgauauuuggaccuacaaugccgagcugcuggugcuccuggaaaacgagcggacccuugacuaucaugauagcaaugucaaaaaccuguacgagaaggugcgcucucagcucaaaaacaaugccaaggaaaucgggaacggauguuuugaguucuaucacaagugcgacaauacauguauggaauccguuaaaaacggcaccuacgauuauccuaaguacagcgaggaagcuaaacugaauagagaggagauugacggggugaaacuugaaucuacacggaucuaucaaauccuggccauuuacuccacggucgcgagcucccucgugcugguugugucucugggcgcuaucagcuuuuggaugugcuccaacggaucucuccagugccgcauuuguaucuga

SEQ ID NO: 201308 - RNA, 1701 nt, Artificial Sequence; identical to SEQ ID NO: 196423
  derived and/or modified CDS sequence (opt5) from hemagglutinin__InfluenzaA__AFN17969

SEQ ID NO: 201309 - RNA, 1701 nt, Artificial Sequence; identical to SEQ ID NO: 195602
  derived and/or modified CDS sequence (opt5) from hemagglutinin__InfluenzaA__AFN17979

SEQ ID NO: 201310 - RNA, 1701 nt, Artificial Sequence
  derived and/or modified CDS sequence (opt5) from hemagglutinin__InfluenzaA__AFN17989
augaaggccauccuggugguccuccuguacaccuucgcuacagccaacgcggacacgcuuugcauuggcuaucacgcuaauaacagcaccgauacaguugacaccgugcuggagaagaaugugacagucacccauuccgugaaccuccuggaagauaagcacaaugggaaacuuuguaagcugagaggaguugcuccccuccaucugggcaaaugcaacaucgccggguggauucugggaaauccugagugugaaucucucagcacagccuccucuuggagcuacaucguggagaccuccucuagcgacaacggcacgugcuauccgggggauuuuauugacuacgaagaacugcgggagcagcuuuccagcgucucuuccuucgaacgcuuugagaucuuccccaagaccagcucuuggccuaaucacgauuccaacaagggagugacagccgcuuguccccaugccggcgcgaaaucuuuuuauaagaaucugaucuggcucguuaaaaagggcaacagcuacccuaaacuguccaagagcuauauuaaugacaaggggaaagaagugcuuguccuguggggaauccaccaccccuccaccucugccgaucaacagagccucuaccagaacgcugacgccuacguguucgugggcacauccagauauagcaagaaauuuaagccugagauugcuauccggccgaaaguccgcgaucaggaggggagaaugaauuacuauuggacccugguugaacccggagacaagauuacguucgaggccacaggcaaccugguggugccucgguacgcguuugccauggaacgcaacgcugggucuggaaucauuaucuccgauacccccguccaugacugcaauacaaccugucaaaccccuaaaggcgccaucaacacaagccuccccuuccagaauauucacccgaucacgauuggcaagugcccuaaguaugugaaaucuaccaagcugagacuugcuacagggcugcggaacguucccagcauccagucccgcggacucuuuggcgccauugccggguucaucgagggaggcuggaccgggaugguggacggaugguacggcuaucaucaccagaaugaacaaggcucuggguacgcugcggaucugaaaagcacacagaacgccaucgacgagauuaccaauaaggucaacuccgugaucggaaaaaugaauacgcaguuuacagcuguuggcaaggaguucaaccaccuugaaaagagaauugagaaucugaacaaaaagguggaugacggguuccucgauaucuggaccuacaaugccgaacugcugguccuccuggagaacgaacggacccuugacuaucaugauagcaaugugaaaaaccuguacgagaagguccgcucucagcucaaaaacaaugccaaggagauuggaaacggcuguuuugaguucuaucacaagugcgacaauacauguauggaguccgugaaaaacgggaccuacgauuauccuaaguacagcgaagaggcuaaacugaauagagaagagaucgacggcguuaaacuugagucuacacggaucuaucaaauucuggccaucuacuccacgguggcgagcucccucguccuggugguuucucugggagcuauuagcuuuuggaugugcuccaacggcucucuccagugccgcaucuguauuuga

SEQ ID NO: 201311 - RNA, 1701 nt, Artificial Sequence; identical to SEQ ID NO: 194741
  derived and/or modified CDS sequence (opt5) from hemagglutinin__InfluenzaA__AFN17999

SEQ ID NO: 201312 - RNA, 1701 nt, Artificial Sequence
  derived and/or modified CDS sequence (opt5) from hemagglutinin__InfluenzaA__AFN18019
augaaggccauccuggugguccuccuguacaccuucgcuacagccaaagcggacacgcuuugcauuggcuaucacgcuaacaauagcaccgauacaguugacaccgugcuggagaagaacgugacagucacccauuccgugaaucuccuggaagauaaacacaacgggaagcuguguaaacugagaggaguugcgccccuccaucugggcaagugcaauaucgccggguggauucugggaaacccugagugugaaucucucagcacagcuuccucuuggagcuacaucguggagaccuccucuagcgacaauggcacgugcuauccgggggauuuuauugacuacgaagaacugcgggagcagcuuuccagcgucucuuccuucgaacgcuuugagauguuccccaagaccagcucuuggccuaaccacgauuccaauaaaggagugacagccgcuuguccccaugccggcgccaagagcuuuuauaaaaaccugaucuggcucguuaagaaaggcaauucuuacccuaagcuguccaagagcuauaucaacgacaaagggaaggaagugcuuguccuguggggcauucaccaccccuccaccucugccgaucaacagagccucuaccagaaugcugacgccuacguguucgugggaacauccagauauagcaaaaaguuuaaaccugagaucgcuauucggccgaagguccgcgaucaggaggggagaaugaacuacuauuggacccugguugaacccggagacaaaaucacguucgaggccacaggcaaucugguggugccucgguacgcguuugccauggaacgcaacgcugggucuggaauuaucauuuccgauacccccguccaugacugcaacacaaccugucaaaccccuaagggcgccaucaauacaagccuccccuuccagaacauccacccgauuacgaucggcaagugcccuaaauaugugaagucuaccaaacugagacuugcuacagggcugcggaauguucccagcauucagucccgcggacucuuuggcgccaucgccggguucauugagggaggcuggaccgggaugguggacggaugguacggcuaucaucaccagaacgaacaaggcucuggguacgcugcggaucuuaagagcacacagaaugccaucgacgagaucaccaacaaagucaauuccgugauugagaagaugaacacgcaguuuacagcuguuggaaaggaguucaaucaccuugagaaaagaaucgaaaaccugaauaagaaaguggaugacggcuuccucgauauuuggaccuacaacgccgagcugcugguccuccuggaaaaugagcggacccuugacuaucaugauagcaacgugaagaaucuguacgagaaaguccgcucucagcucaagaacaacgccaaggaaaucgggaauggauguuuugaguucuaucacaaaugcgacaacacauguauggaauccgugaagaauggcaccuacgauuauccuaaauacagcgaggaagcuaagcugaacagagaggagauugacgggguuaaacuugaaucuacacggaucuaucaaauccuggccauuuacuccacgguggcgagcucccucguccuggugguuucucugggcgcuaucagcuuuuggaugugcuccaauggaucucuccagugccgcauuuguaucuga

SEQ ID NO: 201313 - RNA, 1701 nt, Artificial Sequence; identical to SEQ ID NO: 195602
  derived and/or modified CDS sequence (opt5) from hemagglutinin__InfluenzaA__AFN18039

SEQ ID NO: 201314 - RNA, 1701 nt, Artificial Sequence; identical to SEQ ID NO: 194741
  derived and/or modified CDS sequence (opt5) from hemagglutinin__InfluenzaA__AFN18049

SEQ ID NO: 201315 - RNA, 1701 nt, Artificial Sequence
  derived and/or modified CDS sequence (opt5) from hemagglutinin__InfluenzaA__AFN18059
augaaggccauccuggugguccuccuguacaccuucgcuacagccaacgcggacacgcuuugcauuggcuaucacgcuaauaacagcaccgauacaguugacaccgugcuggagaagaaugugacagucacccauuccgugaaccuccuggaagauaagcacaaugggaaacuuuguaagcugagaggaguugcuccccuccaucugggcaaaugcaacaucgccggguggauucugggaaauccugagugugaaucucucagcacagccuccucuuggagcuacaucguggagaccuccucuagcgacaacggcacgugcuauccgggggauuuuauugacuacgaagaacugcgggagcagcuuuccagcgucucuuccuucgaacgcuuugagaucuuccccaagaccagcucuuggccuaaucacgauuccaacaagggagugacagccgcuuguccccaugccggcgcgaaaucuuuuuauaagaaucugaucuggcucguuaaaaagggcaacagcuacccuaaacuguccaagagcuauauuaaugacaaggggaaagaagugcuuguccuguggggaauccaccaccccuccaccucugccgaucaacagagccucuaccagaacgcugacgccuacguguucgugggcacauccagauauagcaagaaauuuaagccugagauugcuauccggccgaaaguccgcgaucaggaggggagaaugaauuacuauuggacccugguugaacccggagacaagauuacguucgaggccacaggcaaccugguggugccucgguacgcguuugccauggaacgcaacgcugggucuggaaucauuaucuccgauacccccguccaugacugcaauacaaccugucaaaccccuaaaggcgccaucaacacaagccuccccuuccagaauauucacccgaucacgauuggcaagugcccuaaguaugugaaaucuaccaagcugagacuugcuacagggcugcggaacguucccagcauccagucccgcggacucuuuggcgccauugccggguucaucgagggaggcuggaccgggaugguggacggaugguacggcuaucaucaccagaaugaacaaggcucuggguacgcugcggaucugaaaagcacacagaacgccaucgacgagauuaccaauaaggucaacuccgugaucgagaaaaugaauacgcaguuuacagcuguuggaaaggaguucaaccaccuugagaagagaauugaaaaucugaacaaaaagguggaugacggcuuccucgauaucuggaccuacaaugccgagcugcugguccuccuggaaaacgagcggacccuugacuaucaugauagcaaugugaaaaaccuguacgagaagguccgcucucagcucaaaaacaaugccaaggaaauugggaacggauguuuugaguucuaucacaagugcgacaaugcuuguauggaauccgugaaaaacggcacauacgauuauccuaaguacagcgaggaagccaaacugaauagagaggagaucgacgggguuaaacuugaaucuacccggaucuaucaaauucuggcgaucuacuccacaguggcuagcucccucguccuggugguuucucugggcgccauuagcuuuuggaugugcuccaacggaucucuccagugccgcaucuguauuuga

SEQ ID NO: 201316 - RNA, 1701 nt, Artificial Sequence; identical to SEQ ID NO: 194741
  derived and/or modified CDS sequence (opt5) from hemagglutinin__InfluenzaA__AFN18078

SEQ ID NO: 201317 - RNA, 1701 nt, Artificial Sequence
  derived and/or modified CDS sequence (opt5) from hemagglutinin__InfluenzaA__AFN18088
augaaggccauccuggugguccuccuguacaccuucgcuacagccaacgcggacacgcuuugcauuggcuaucacgcuaauaacagcaccgauacaguugacaccgugcuggagaagaaugugacagucacccauuccgugaaccuccuggaagauaagcacaaugggaaacuuuguaagcugagaggaguugcuccccuccaucugggcaaaugcaacaucgccggguggauucugggaaauccugagugugaaucucucagcacagccuccucuuggagcuacaucguggagaccuccucuagcgacaacggcacgugcuauccgggggauuuuauugacuacgaagaacugcgggagcagcuuuccagcgucucuuccuucgaacgcuuugagaucuuccccaagaccagcucuuggccuaaucacgauuccaacaagggagugacagccgcuuguccccaugccggcgcgaaaucuuuuuauaagaaucugaucuggcucguuaaaaagggcaacagcuacccuaaacuguccaagagcuauauuaaugacaaggggaaagaagugcuuguccuguggggaauccaccaccccuccaccucugccgaucaacagagccucuaccagaacgcugacacauacguguucgugggcaccuccagauauagcaagaaauuuaagccugagauugccauccggccgaaaguccgcgaucaggaggggagaaugaauuacuauuggacgcugguugaacccggagacaagauuacauucgaggcuaccggcaaccugguggugccucgguacgccuuugcgaugguccgcaacgccgggucuggaaucauuaucuccgauacacccgugcaugacugcaauaccaccugucaaacaccuaaaggcgcuaucaacacgagccuccccuuccagaauauucacccgaucaccauuggcaagugcccuaaguauguuaaaucuacaaagcugagacuugccaccgggcugcggaacgugcccagcauccagucccgcggacucuuuggcgcuauugccggguucaucgaaggaggcuggacagggauggucgacggaugguacggcuaucaucaccagaaugagcaaggcucuggguacgccgcugaucugaaaagcacccagaacgcgaucgacgaaauuacgaauaaggugaacuccguuaucgagaaaaugaauacacaguuuaccgccgugggaaaggaguucaaccaccuugaaaagagaauugagaaucugaacaaaaaggucgaugacggcuuccucgauaucuggaccuacaaugcugaacugcuggugcuccuggagaacgaacggacacuugacuaucaugauagcaaugucaaaaaccuguacgagaaggugcgcucucagcucaaaaacaaugccaaggagauugggaacggauguuuugaguucuaucacaagugcgacaauaccuguauggaguccguuaaaaacggcacauacgauuauccuaaguacagcgaagaggccaaacugaauagagaagagaucgacggggugaaacuugagucuacgcggaucuaucaaauucuggcuaucuacuccaccgucgccagcucccucgugcugguugugucucugggcgcgauuagcuuuuggaugugcuccaacggaucucuccagugccgcaucuguauuuga

SEQ ID NO: 201318 - RNA, 1701 nt, Artificial Sequence
  derived and/or modified CDS sequence (opt5) from hemagglutinin__InfluenzaA__AFN18098
augaaggccauccuggugguccuccuguacaccuucgcuacagccaacgcggacacgcuuugcauuggcuaucacgcuaauaacagcaccgauacaguugacaccgugcuggagaagaaugugacagucacccauuccgugaaccuccuggaagauaagcacaaugggaaacuuuguaagcugagaggaaucgcuccccuccaucugggcaaaugcaacauugccggguggauccugggaaauccugagugugaaucucucagcacagccuccucuuggagcuacauuguugagaccuccucuagcgacaacggcacgugcuauccggggaauuuuaucgauuacgaagaacugcgggagcagcuuuccagcgugucuuccuucgaacgcuuugagaucuuccccaagaccagcucuuggccuaaccacgacuccaauaagggagucacagccgcuuguccccaugccggcgcgaaaucuuuuuauaagaaccugauuuggcucgugaaaaagggcaauagcuacccuaaacuguccaagagcuauaucaacgauaaggggaaagaaguucuugugcuguggggcauucaccaccccuccaccucugccgaccaacagagccucuaccagaaugcugaugccuacgucuucgugggaacauccagauauagcaagaaauuuaagccugagaucgcuauucggccgaaagugcgcgaccaggaggggagaaugaacuacuauuggacccuggucgaacccggagauaagaucacguucgaggccacaggcaaccugguugugccucgguacgcguuugccguggaacgcaaugcugggucuggaauuaucaucuccgacacccccguccaugauugcaacacaaccugucaaaccccuaaaggcgccauuaauacaagccuccccuuccagaacauccacccgauuacgaucggcaagugcccuaaguaugugaaaucuaccaagcugagacuugcuacagggcugcggaauguucccagcauucagucccgcggacucuuuggcgccaucgccggguucaucgagggaggcuggaccgggaugguggacggaugguacggcuaucaucaccagaacgaacaaggcucuggguacgcugcggaccugaaaagcacacagaaugccauugaugagaucaccaacaaggucaauuccgugauugagaaaaugaacacgcaguuuacagcuguuggaaaggaguucaaucaccuugagaagagaaucgaaaaccugaauaaaaagguggacgauggcuuccucgacauuuggaccuacaacgccgagcugcugguccuccuggaaaaugagcggacccuugauuaucaugacagcaacgugaaaaaccuguacgagaagguccgcucucagcucaaaaauaacgccaaggaaaucgggaauggauguuuugaguucuaucacaagugcgauaacacauguauggaauccgugaaaaauggcaccuacgacuauccuaaguacagcgaggaagcuaaacugaacagagaggagaucgaugggguuaaacuugaaucuacacggauuuaucaaauccuggccauuuacuccacgguggcgagcucccucguccuggugguuucucugggcgcuaucagcuuuuggaugugcuccaauggaucucuccagugccgcauuuguaucuga

SEQ ID NO: 201319 - RNA, 1701 nt, Artificial Sequence
  derived and/or modified CDS sequence (opt5) from hemagglutinin__InfluenzaA__AFN18105
augaaggccauccugauugugcuccuguacaccuucgcuacagccaacgcggacacgcuuugcaucggcuaucacgcuaauaacagcaccgauacagucgacaccguucuggagaagaaugugacagugacccauuccgucaaccuccuggaagauaagcacaaugggaaacuuuguaagcugagaggaguggcuccccuccaucugggcaaaugcaacauugccggguggauccugggaaauccugagugugaaucucucagcacagccuccucuuggagcuacauuguugagaccuccucuagcgacaacggcacgugcuauccgggggauuuuaucgacuacgaagaacugcgggagcagcuuuccagcgugucuuccuucgaacgcuuugagaucuuccccaagaccagcucuuggccuaaucacgauuccaacaagggagucacagccgcuuguccccaugccggcgcgaaauccuuuuauaagaaucugauuuggcucgugaaaaagggcaacucuuacccuaaacuguccaagagcuauaucaaugacaaggggaaagaaguucuugugcuguggggcauucaccaccccuccaccucugccgaucaacagagccucuaccagaacgcugacgccuacgucuucgugggaacauccagauauagcaagaaauuuaagccugagaucgcuauucggccgaaagugcgcgaucaggaggggagaaugaauuacuauuggacccuggucgaacccggagacaagaucacguucgaggccacaggcaaccugguugugccucgguacgcguuugccauggaacgcaacgcugggucuggaauuaucaucuccgauacccccgugcaugacugcaauacaaacugucaaaccccuaaaggcgccauuaauaccagccuccccuuccagaacauccacccgauuacaaucggcaagugcccuaaguaugucaaaucuacgaagcugagacuugcuaccgggcugcggaaugugcccagcauucagucccgcggacucuuuggcgccaucgccggguucaucgagggaggcuggacagggaugguugacggaugguacggcuaucaucaccagaacgaacaaggcucuggguacgcugcggaucugaaaagcacccagaaugccauugacgagaucacaaacaaggugaauagcgucauugagaaaaugaacacccaguuuacggcugugggaaaggaguucaaucaccuugagaagagaaucgaaaaccugaauaaaaagguugaugacggcuuccucgauauuuggacauacaacgccgagcugcuggugcuccuggaaaaugagcggacccuugacuaucaugauagcaacgucaaaaaccuguacgagaaggugcgcucucagcucaaaaauaacgccaaggaaaucgggaauggauguuuugaguucuaucacaagugcgacaacaccuguauggaauccgucaaaaauggcacauacgauuauccuaaguacagcgaggaagcuaaacugaacagagaggagaucgacggggugaaacuugaaucuacccggauuuaucaaauccuggccauuuacuccacaguugcgagcucccucgugcuggucgugucucugggcgcuaucagcuuuuggaugugcuccaauggaucucuccagugccgcauuuguaucuga

SEQ ID NO: 201320 - RNA, 1701 nt, Artificial Sequence; identical to SEQ ID NO: 194983
  derived and/or modified CDS sequence (opt5) from hemagglutinin__InfluenzaA__AFN18107

SEQ ID NO: 201321 - RNA, 1701 nt, Artificial Sequence; identical to SEQ ID NO: 201315
  derived and/or modified CDS sequence (opt5) from hemagglutinin__InfluenzaA__AFN18117

SEQ ID NO: 201322 - RNA, 1701 nt, Artificial Sequence; identical to SEQ ID NO: 194741
  derived and/or modified CDS sequence (opt5) from hemagglutinin__InfluenzaA__AFN18119

SEQ ID NO: 201323 - RNA, 1701 nt, Artificial Sequence
  derived and/or modified CDS sequence (opt5) from hemagglutinin__InfluenzaA__AFN18121
augaaggccauccuggugguccuccuguacaccuucgcuacagccaacgcggacacgcuuugcauuggcuaucacgcuaauaacagcaccgauacaguugacaccgugcuggagaaaaaugugacagucacccauuccgugaaccuccuggaagauaagcacaaugggaaacuuuguaagcugagaggaguugcuccccuccaucugggcaaaugcaacaucgccggguggauucugggaaauccugagugugaaucucucagcacagccuccucuuggagcuacaucguggagaccuccucuagcgacaacggcacgugcuauccgggggauuuuauugacuacgaagaacugcgggagcagcuuuccagcgucucuuccuucgaacgcuuugagaucuuccccaagaccagcucuuggccuaaucacgauuccaacaagggagugacagccgcuuguccccaugccggcgcgcggagcuuuuauaaaaaucugaucuggcucguuaagaaaggcaacucuuacccuaagcuguccaaaagcuauauuaaugacaaggggaaggaagugcuuguccuguggggaauccaccaccccuccaccucugccgaucaacagagccucuaccagaacgcugacgccuacguguucgugggcacauccagauauagcaaaaaguuuaaaccugagauugcuauccgcccgaaggucagagaucaggaggggcggaugaauuacuauuggacccugguugaacccggagacaaaauuacguucgaggccacaggcaaccugguggugccucgcuacgcguuugccauggucagaaacgcugggucuggaaucauuaucuccgauacccccgugcaugacugcaauacaaccugucaaaccccuaagggcgccaucaacacaagccuccccuuccagaauauucacccgaucacgauuggcaaaugcccuaaguauguuaagucuaccaaacugcggcuugcuacagggcugcgcaacgugcccagcauccaguccagaggacucuuuggcgccauugccggguucaucgaaggaggcuggaccgggauggucgacggaugguacggcuaucaucaccagaaugagcaaggcucuggguacgcugcggaucuuaagagcacacagaacgccaucgacgaaauuaccaauaaagugaacuccguuaucgagaagaugaauacgcaguuuacagcugugggaaaagaguucaaccaccuggaaaagcggauugagaaucugaacaagaaagucgaugacggcuuccucgauaucuggaccuacaaugccgaacugcuggugcuccuggagaacgaacgcacccuugacuaucaugauagcaaugucaagaaccuguacgagaaagugagaucucagcucaagaacaaugccaaagagauugggaacggauguuuugaguucuaucacaagugcgacaauacauguauggaguccguuaagaacggcaccuacgauuauccuaaauacagcgaagaggcuaagcugaaucgggaagagaucgacggggugaaacuugagucuacacgcaucuaucaaauucuggccaucuacuccacggucgcgagcucccucgugcugguugugucucugggcgcuauuagcuuuuggaugugcuccaacggaucucuccagugcagaaucuguauuuga

SEQ ID NO: 201324 - RNA, 1701 nt, Artificial Sequence; identical to SEQ ID NO: 201315
  derived and/or modified CDS sequence (opt5) from hemagglutinin__InfluenzaA__AFN18133

SEQ ID NO: 201325 - RNA, 1701 nt, Artificial Sequence; identical to SEQ ID NO: 200999
  derived and/or modified CDS sequence (opt5) from hemagglutinin__InfluenzaA__AFN18135

SEQ ID NO: 201326 - RNA, 1701 nt, Artificial Sequence; identical to SEQ ID NO: 195583
  derived and/or modified CDS sequence (opt5) from hemagglutinin__InfluenzaA__AFN18137

SEQ ID NO: 201327 - RNA, 1701 nt, Artificial Sequence
  derived and/or modified CDS sequence (opt5) from hemagglutinin__InfluenzaA__AFN18139
auggaggccauccuggugguccuccuguacaccuucgcuacagccaacgcggacacgcuuugcauuggcuaucacgcuaauaacagcaccgauacaguugacaccgugcuggaaaagaaugugacagucacccauuccgugaaccuccuggaggauaaacacaaugggaagcuguguaaacugagaggaguugcgccccuccaucugggcaagugcaacaucgccggguggauucugggaaauccugaaugugagucucucagcacagcuuccucuuggagcuacaucguggaaaccuccucuagcgacaacggcacgugcuauccgggggauuuuauugacuacgaggagcugcgggaacagcuuuccagcgucucuuccuucgagcgcuuugaaaucuuccccaaaaccagcucuuggccuaaucacgauuccaacaagggagugacagccgcuuguccccaugccggcgccaagagcuuuuauaaaaaucugaucuggcucguuaagaaaggcaacucuuacccuaagcuguccaaaagcuauauuaaugacaaggggaaggaggugcuuguccuguggggaauccaccaccccuccaccucugccgaucaacagggccucuaccagaacgcugacgccuacguguucguggggagcuccagauauagcaaaaaguuuaaaccugagauugcuauccggccgaagguccgcgaucaggaaggaagaaugaauuacuauuggacacugguugagcccggcgacaaaauuaccuucgaagccacggggaaccugguggugccucgguacgcguuugccauggagcgcaacgcuggaucuggcaucauuaucuccgauacacccguccaugacugcaauaccacaugucaaaccccuaagggcgccaucaacaccagccuccccuuccacaauauucauccgaucacaauugggaaaugcccuaaguaugugaagucuacgaaacugagacuugcuaccggacugcggaacguucccagcauccagucccgcggccucuuuggggccauugccggauucaucgaaggcggguggacaggaaugguggacggcugguacggcuaucaccaccagaaugagcaggggucuggauacgcugcggaucuuaagagcacccaaaacgccaucgacgagauuacaaauaaagucaacuccgugaucgaaaagaugaauacccaguuuacggcuguuggcaaagaguucaaccaucuugaaaagagaauugagaaucugaacaagaaaguggaugacggguuccucgauaucuggacauacaaugccgaacugcugguccuccuggagaacgagcggacccuugacuaucacgauagcaaugugaagaaccuguacgaaaaaguccgcucucagcucaagaacaaugccaaagagauuggaaacggcuguuuugaguucuaucauaagugcgacaauaccuguauggaauccgugaagaacgggacauacgauuauccuaaauacagcgaagaggcuaagcugaauagagaggaaaucgacggcguuaaacuugagucuacccggaucuaucagauucuggccaucuacuccacaguggcgagcucccucguccuggugguuucucugggagcuauuagcuuuuggaugugcuccaacggcucucuccaaugccgcaucuguauuuga

SEQ ID NO: 201328 - RNA, 1701 nt, Artificial Sequence; identical to SEQ ID NO: 201323
  derived and/or modified CDS sequence (opt5) from hemagglutinin__InfluenzaA__AFN18141

SEQ ID NO: 201329 - RNA, 1701 nt, Artificial Sequence; identical to SEQ ID NO: 195602
  derived and/or modified CDS sequence (opt5) from hemagglutinin__InfluenzaA__AFN18148

SEQ ID NO: 201330 - RNA, 1701 nt, Artificial Sequence; identical to SEQ ID NO: 195905
  derived and/or modified CDS sequence (opt5) from hemagglutinin__InfluenzaA__AFN18155

SEQ ID NO: 201331 - RNA, 1701 nt, Artificial Sequence
  derived and/or modified CDS sequence (opt5) from hemagglutinin__InfluenzaA__AFN18157
augaaggccauccuggugguccuccuguacaccuucgcuacagccaacgcggacacgcuuugcauuggcuaucacgcuaauaacagcaccgauacaguugacaccgugcuggagaagaaugugacagucacccauuccgugaaccuccuggaagauaagcacaaugggaaacuuuguaagcugagaggaguugcuccccuccaucugggcaaaugcaacaucgccggguggauucugggaaauccugagugugaaucucucagcacagccuccucuuggagcuacaucguggagaccuccucuagcggcaacgggacgugcuauccgggagacuuuauugauuacgaagaacugcgggagcagcuuuccagcgucucuuccuucgaacgcuuugagaucuuccccaagaccagcucuuggccuaaucacgacuccaacaagggcgugacagccgcuuguccccaugccggcgcgaaaucuuuuuauaagaaucugaucuggcucguuaaaaaggggaacagcuacccuaaacuguccaagagcuauauuaaugauaagggaaaagaagugcuuguccuguggggcauccaccaccccuccaccucugccgaccaacagagccucuaccagaacgcugaugccuacgcuuucguggggacauccagauauagcaagaaauuuaagccugagauugccauccggccgaaagugcgcgaccaggagggaagaaugaauuacuauuggacccuggucgaacccggcgauaagauuacguucgaggcgacagggaaccugguugugccucgguacgccuuugcuauggaacgcaacgccggaucuggcaucauuaucuccgacacccccgugcaugauugcaauacaaccugucaaaccccuaaaggcgcuaucaacacaagccuccccuuccagaauauucacccgaucacgauugggaagugcccuaaguaugucaaaucuaccaagcugagacuugccacaggacugcggaacgugcccagcauccagucccgcggccucuuuggggccauugcuggauucaucgagggcggguggaccggaaugguugacggcugguacggcuaucaucaccagaaugaacaagggucuggauacgcggccgaccugaaaagcacacagaacgcuaucgaugagauuaccaauaaggugaacuccgucaucgagaaaaugaauacgcaguuuacagccgugggcaaggaguucaaccaccuugagaagagaauugaaaaucugaacaaaaagguugacgauggguuccucgacaucuggaccuacaaugccgagcugcuggugcuccuggaaaacgagcggacccuugauuaucaugacagcaaugucaaaaaccuguacgagaaggugcgcucucagcucaaaaacaaugcuaaggaaauuggaaacggcuguuuugaguucuaucacaagugcgauaauacauguauggaauccgucaaaaacgggaccuacgacuauccuaaguacagcgaggaagccaaacugaauagagaggagaucgauggcgugaaacuugaaucuacacggaucuaucaaauucuggcgaucuacuccacgguugcuagcucccucgugcuggucgugucucugggagccauuagcuuuuggaugugcuccaacggcucucuccagugccgcaucuguauuuga

SEQ ID NO: 201332 - RNA, 1701 nt, Artificial Sequence
  derived and/or modified CDS sequence (opt5) from hemagglutinin__InfluenzaA__AFN18159
auggaggccauccuggugguccuccuguacaccuucgcuacagccaacgcggacacgcuuugcauuggcuaucacgcuaauaacagcaccgauacaguugacaccgugcuggaaaagaaugugacagucacccauuccgugaaccuccuggaggauaaacacaaugggaagcuguguaaacugagaggaguugcuccccuccaucugggcaagugcaacaucgccggguggauucugggaaauccugaaugugagucucucagcacagccuccucuuggagcuacaucguggaaaccuccucuagcgacaacggcacgugcuauccgggggauuuuauugacuacgaggagcugcgggaacagcuuuccagcgucucuuccuucgagcgcuuugaaaucuuccccaaaaccagcucuuggccuaaucacgauuccaacaagggagugacagccgcuuguccccaugccggcagcaagucuuuuuauaaaaaucugaucuggcucguuaagaaaggcaacuccuacccuaagcugagcaaauccuauauuaaugacaaggggaaggaggugcuuguccuguggggaauccaccaccccucuaccagcgcggaucaacagucccucuaccagaacgccgacgcuuacguguucgugggcagcucuagauauuccaaaaaguuuaaaccugagauugccauccggccgaagguccgcgaucaggaagggagaaugaauuacuauuggacacugguugagcccggagacaaaauuaccuucgaagcuacgggcaaccugguggugccucgguacgccuuugcgauggagcgcaacgccgggagcggaaucauuaucucugauacacccguccaugacugcaauaccacaugucaaaccccuaagggcgcuaucaacaccagccuccccuuccacaauauucauccgaucacaauuggcaaaugcccuaaguaugugaaguccacgaaacugagacuugccaccgggcugcggaacguucccucuauccagagccgcggacucuuuggcgcuauugccggguucaucgaaggaggcuggacagggaugguggacggaugguacggcuaucaccaccagaaugagcagggcuccggguacgccgcugaucuuaagagcacccaaaacgcgaucgacgagauuacaaauaaagucaacucugugaucgaaaagaugaauacccaguuuacggccguuggaaaagaguucaaccaucuugaaaagagaauugagaaucugaacaagaaaguggaugacggcuuccucgauaucuggacauacaaugcugaacugcugguccuccuggagaacgagcggacccuugacuaucacgauuccaaugugaagaaccuguacgaaaaaguccgcaaccagcucaagaauaacgccaaagagauugggaauggauguuuugaguucuaucauaagugcgacaacaccuguauggaaagcgugaagaauggcacauacgauuauccuaaauacucugaagaggccaagcugaacagagaggaaaucgacgggguuaaacuugaguccacccggaucuaucagauucuggcuaucuacagcacaguggccuccucucucguccuggugguuagccugggcgcgauuuccuuuuggaugugcucuaauggaagccuccaaugccgcaucuguauuuga

SEQ ID NO: 201333 - RNA, 1701 nt, Artificial Sequence
  derived and/or modified CDS sequence (opt5) from hemagglutinin__InfluenzaA__AFN18164
augaaggccauccuggugguccuccuguacaccuucgcuacaacgaacgccgacacccuuugcauuggcuaucacgcgaauaacagcacagauaccguugacacagugcuggagaaaaaugugaccgucacacauuccgugaaccuccuggaagauaagcacaaugggaaacuuuguaagcugagaggaguugcuccccuccaucugggcaaaugcaacaucgccggguggauucugggaaauccugagugugaaucucucagcaccgccuccucuuggagcuacaucguggagacguccucuagcgacaacgggaccugcuauccgggcgauuuuauugacuacgaggaacugcgggagcagcuuuccagcgucucuuccuucgaacgcuuugagaucuuccccaagacaagcucuuggccuaaucacgauuccaacaagggagugaccgcugccuguccccaugcuggcgccaaauccuuuuauaagaaucugaucuggcucguuaaaaagggcaacucuuacccuaaacuguccaagagcuauauuaaugacaaggggaaagaagugcuuguccuguggggaauccaccaccccuccacaucugcggaucaacagagccucuaccagaacgccgacgcuuacguguucgugggcaccuccagauauagcaagaaauuuaagccugagauugccauccggccgaaaguccgcgaucaggaggggagaaugaauuacuauuggacgcugguugaacccggagacaagauuacauucgaggcuaccggcaaccugaucgugccucgguacgccuuugcgauggaacgcaacgccgggucuggaauuaucaucuccaauacacccgugcaugauugcaacaccaccugucaaacaccuaaaggcgcuauuaauacgagccuccccuuccagaacauccacccgauuaccaucggcaagugcccuaaguaugucaaaucuacaaagcugagacuugccaccgggcugcggaaugugcccagcauucagucccgcggacucuuuggcgcuaucgccggguucaucgagggaggcuggacagggaugguugacggaugguacggcuaucaucaccagaacgaacaaggcucuggguacgccgcugaccugaaaagcacccagaaugcgauugauaagaucacgaacaaagugaauagcgucauugagaagaugaacacacaguuuaccgccgugggaaaggagcuuaaucaccuggaaaagagaaucgagaaccucaauaagaaaguugacgauggcuuccuggacauuuggaccuacaacgcugaacugcucgugcugcuugagaaugaacggacacuggauuaucaugacagcaacgucaagaaccucuacgagaaagugcgcucucagcugaagaauaacgccaaggagaucgggaauggauguuucgaauuuuaucacaaaugcgauaacaccuguauggaguccgucaagaauggcacauacgacuauccuaaauacagcgaagaggccaaacuuaacagagaagagaucgauggggugaaacuggagucuacgcggauuuaucaaauccucgcuguuuacuccaccguggccagcucccugguccuggugguuucucucggcgcgauuagcuucuggaugugcuccaauggaucucugcagugccgcaucuguauuuga

SEQ ID NO: 201334 - RNA, 1701 nt, Artificial Sequence
  derived and/or modified CDS sequence (opt5) from hemagglutinin__InfluenzaA__AFN18171
augaaggccauccuggugguccuccuguacaccuucgcuacagccaacgcggacacgcuuugcauuggcuaucacgcuaauaacagcaccgauacaguugacaccgugcuggagaagaaugugacagucacccauuccgugaaccuccuggaagauaagcacucugggaaacuuuguaagcugagaggaguugcuccccuccaucugggcaaaugcaauaucgccggguggauucugggaaacccugagugugaaagccucuccacagccucuagcugguccuacaucguggagaccucuagcuccgacaauggcaagugcuauccgggggauuuuauugacuacgaagaacugcgggagcagcuuagcucugucuccagcuucgaacgcuuugagaucuuccccaagacgucuuccuggccuaaccacgauagcaauaaaggagugaccgccgcuuguccccaugccggcgcgaagucuuuuuauaaaaaccugaucuggcucguuaagaaaggcaauuccuacccuaagcugagcaaguccuauauuaacgacaaagggaaggaagugcuuguccuguggggaauccaccaccccucuacaagcgccgaucaacagucccucuaccagaaugcugacgccuacguguucgugggcaccagcaaauauucuaagaaauuuaagccugagauugcuaucagaccgaaaguccgggaucaggaggggcgcaugaacuacuauuggacacugguugaacccggagacaagauuaccuucgaggccacgggcaaucugguggugccuagauacgcguuugccauggaacggaacgcuggguccggaaucauuaucagcgauacacccgucaaggacugcaacaccacaugucaaaccccuaaaggcgccaucaauaccucucuccccuuccagaacauucauccgaucacaauuggcaagugcccuaaauauguuaagagcacgaaacugcgccuugcuaccgggcugagaaaugugcccuccauccagucucggggacucuuuggcgccauugccggguucaucgagggaggcuggacagggaugguggacggaugguacggcuaucaccaucagaacgaacaaggcagcggguacgcugcggaucugaaguccacccagaaugccaucgacgagauuacaaacaaggucaauagcgugaucgagaaaaugaacacccaguuuacggcuguuggaaaggaguucaaucaccuugagaaacgcauugaaaaccugaauaagaaaguggaugacggcuuccucgauaucuggacauacaacgccgagcugcugguccuccuggaaaaugagagaacccuugacuaucacgauucuaacgugaagaaucuguacgagaagguccggucccagcucaaaaacaacgccaaggaaauugggaauggauguuuugaguucuaucauaaaugcgacaacaccuguauggaaagcgugaagaauggcacauacgauuauccuaaauacucugaggaagcuaagcugaaccgcgaggagaucgacgggguuaaacuugaauccaccagaaucuaucaaauucuggccaucuacagcacaguggcguccucucucguccuggugguuagccugggcgcuauuuccuuuuggaugugcucuaauggaagccuccagugccggaucuguauuuga

SEQ ID NO: 201335 - RNA, 1701 nt, Artificial Sequence
  derived and/or modified CDS sequence (opt5) from hemagglutinin__InfluenzaA__AFN18176
augaaggccauccuggugguccuccuguacaccuucgcuacagccaacgcggacacgcuuugcauuggcuaucacgcuaauaacagcaccgauacaguugacaccgugcuggagaaaaaugugacagucacccauuccgugaaccuccuggaagauaagcacaaugggaaacuuuguaagcugagaggaguugcuccccuccaucugggcaaaugcaacaucgccggguggauucugggaaauccugagugugaaucucucagcacagccuccucuuggagcuacaucguggagaccuccucuagcgacaacggcacgugcuauccgggggauuuuauugacuacgaagaacugcgggagcagcuuuccagcgucucuuccuucgaacgcuuugagaucuuccccaagaccagcucuuggccuaaucacgauuccaacaagggagugacagccgcuuguccccaugccggcgcgaaaucuuuuuauaagaaucugaucuggcucguuaaaaagggcaacagcuacccuaaacuguccaagagcuauauuaaugacaaggggaaagaagugcuuguccuguggggaauccaccaccccuccaccucugccgaucaacagagccucuaccagaacgcugacgccuacguguucgugggcacauccagauauagcaagaaauuuaagccugagauugcuauccggccgaaaguccgcgaucaggaggggagaaugaauuacuauuggacccugguugaacccggagacaagauuacguucgaggccacaggcaaccugcucgugccucgguacgcguuugccauggaacgcaacgcugggucuggaaucauuaucuccgauacccccgugcaugacugcaauacaaccugucaaaccccuaaaggcgccaucaacacaagccugcccuuccagaauauucacccgaucacgauuggcaagugcccuaaguaugucaaaucuaccaaacuuagacuggcuacagggcuccggaacauccccagcauucagucccgcggacuguuuggcgccaucgccggguucaucgagggaggcuggaccgggaugguggacggaugguacggcuaucaucaccagaaugaacaaggcucuggguacgcugcggaucuuaagagcacacagaacgccauugacgagaucaccaauaagguuaacuccgugauugagaaaaugaauacgcaguuuacagcugucggaaaggaguucaaccaccuggagaagagaaucgaaaaucucaacaaaaagguggaugacggcuuccuggauauuuggaccuacaaugccgagcugcucguucugcuugaaaacgagcggacccuggacuaucaugauagcaaugugaaaaaccucuacgagaagguccgcucucagcugaaaaacaaugccaaggaaaucgggaacggauguuuugaguucuaucacaagugcgacaauacauguauggaauccgugaaaaacggcaccuacgauuauccuaaguacagcgaggaagcuaaacuuaauagagaggagaucgacggggucaagcuggaaucuacacggauuuaucaaauccucgccauuuacuccacgguggcgagcucccugguucugguggucucucucggcgcuaucagcuuuuggaugugcuccaacggaucucugcagugccgcauuuguaucuga

SEQ ID NO: 201336 - RNA, 1701 nt, Artificial Sequence
  derived and/or modified CDS sequence (opt5) from hemagglutinin__InfluenzaA__AFN18183
augaaggccauccuggugguccuccuguacaccuucgcuacagccaacgcggacacgcuuugcauuggcuaucacgcuaauaacagcaccgauacaguugacaccauccuggagaagaaugugacagugacccauuccgucaaccuccuggaagauaagcacaaugggaaacuuuguaagcugagaggaguggcuccccuccaucugggcaaaugcaacauugccggguggauccugggaaauccugagugugaaucucucagcacagccuccucuuggagcuacauuguugagaccuccucuagcgacaacggcacgugcuauccgggggauuuuaucgacuacgaagaacugcgggagcagcuuuccagcgugucuuccuucgaacgcuuugagaucuuccccaagaccagcucuuggccuaaucacgauuccaacaagggagucacagccgcuuguccccaugccggcgcgaaaucuuuuuauaagaaucugauuuggcucgugaaaaagggcaacagcuacccuaaacuguccaagagcuauaucaaugacaaggggaaagaaguucuugugcuguggggcauucaccaccccuccaccucugccgaucaacagagccucuaccagaacgcugacgccuacgucuucgugggaacauccagauauagcaagaaauuuaagccugagaucgcuauucggccgaaagugcgcgaucaggaggggagaaugaauuacuauuggacccuggucgaacccggagacaagaucacguucgaggccacaggcaaccugaugguuccucgguacgcguuugccauggaacgcaacgcugggucuggaauuaucaucuccgauacccccgugcaugacugcaauacaaccugucaaaccccuaaaggcgccauuaacacaagccuccccuuccagaauauccacccgauuacgaucggcaagugcccuaaguaugugaaaucuaccaagcugagacuugcuacagggcugcggaacguccccagcauucagucccgcggacucuuuggcgccaucgccggguucaucgagggaggcuggaccgggaugguggacggaugguacggcuaucaucaccagaaugaacaaggcucuggguacgcugcggaucugaaaagcacacagaacgccauugacgagaucaccaauaagguuaacuccgugauugagaaaaugaauacgcaguuuacagcugucggaaaggaguucaaccaccuugagaagagaaucgaaaaucugaacaaaaagguggaugacggcuuccucgauauuuggaccuacaaugccgagcugcugguucuccuggaaaacgagcggacccuugacuaucaugauagcaaugugaaaaaccuguacgagaagguccgcucucagcucaaaaacaaugccaaggaaaucgggaacggauguuuugaguucuaucacaagugcgacaauacauguauggaauccgugaaaaacggcaccuacgauuauccuaaguacagcgaggaagcuaaacugaauagagaggagaucgacggggucaaacuugaaucuacacggauuuaucaaauccuggccauuuacuccacgguggcgagcucccucguucugguggucucucugggcgcuaucagcuuuuggaugugcuccaacggaucucuccagugccgcauuuguaucuga

SEQ ID NO: 201337 - RNA, 1701 nt, Artificial Sequence; identical to SEQ ID NO: 196293
  derived and/or modified CDS sequence (opt5) from hemagglutinin__InfluenzaA__AFN18195

SEQ ID NO: 201338 - RNA, 1701 nt, Artificial Sequence; identical to SEQ ID NO: 194741
  derived and/or modified CDS sequence (opt5) from hemagglutinin__InfluenzaA__AFN18200

SEQ ID NO: 201339 - RNA, 1701 nt, Artificial Sequence
  derived and/or modified CDS sequence (opt5) from hemagglutinin__InfluenzaA__AFN18207
augaaggccauccuggugguccuccuguacaccuucgcuacagccaacgcggacacgcuuugcauuggcuaucacgcuaauaacagcaccgauacaguugacaccgugcuggagaaaaaugugacagucacccauuccgugaaccuccuggaagauaagcacaaugggaaacuuuguaagcugagaggaguugcuccccuccaucugggcaaaugcaacaucgccggguggauucugggaaauccugagugugaaucucucagcacagccuccucuuggagcuacaucguggagaccuccucuagcgacaacggcacgugcuauccgggggauuuuauugacuacgaagaacugcgggagcagcuuuccagcgucucuuccuucgaacgcuuugagaucuuccccaagaccagcucuuggccuaaucacgauuccaacaagggagugacagccgcuuguccccaugccggcgcgaaaucuuuuuauaagagccugaucuggcucguuaaaaagggcaauuccuacccuaaacugagcaaguccuauauuaacgacaaggggagagaagugcuuguccuguggggaauccaccaccccucuaccagcgccgaucaacagucccucuaccagaaugcugacgccuacguguucgugggcacaagccgguauucuaaaaaguuuaaaccugagauugcuauccgcccgaaggucagagaucaggaggggcggaugaacuacuauuggacccugguugaacccggagacaaaauuacguucgaggccacaggcaaucugguggugccucgcuacgcguuugccauggaaagaaacgcuggguccggaaucauuaucagcgauacccccguccaugacugcaacacaaccugucaaaccccuaagggcgccaucaauacaucucuccccuuccagaacauucacccgaucacgauuggcaaaugcccuaaguauguuaagagcaccaaacugcggcuugcuacagggcugcgcaaugugcccuccauccagucuagaggacucuuuggcgccauugccggguucaucgagggaggcuggaccgggaugguggacggaugguacggcuaucaucaccagaacgaacaaggcagcggguacgcugcggaucugaaguccacacagaaugccaucgacgagauuaccaacaaagucaauagcgugaucgagaagaugaacacgcaguuuacagcuguuggaaaagaguucaaucaccuugagaagcggauugaaaaccugaauaagaaaguggaugacggcuuccucgauaucuggaccuacaacgccgagcugcugguccuccuggaaaaugagcgcacccuugacuaucaugauucuaacgugaagaaucuguacgagaaagucagaucccagcucaagaacaacgccaaagaaauugggaauggauguuuugaguucuaucacaagugcgacaacacauguauggaaagcgugaagaauggcaccuacgauuauccuaaauacucugaggaagcuaagcugaaccgggaggagaucgacgggguuaaacuugaauccacacgcaucuaucaaauucuggccaucuacagcacgguggcguccucucucguccuggugguuagccugggcgcuauuuccuuuuggaugugcucuaauggaagccuccagugcagaaucuguauuuga

SEQ ID NO: 201340 - RNA, 1701 nt, Artificial Sequence
  derived and/or modified CDS sequence (opt5) from hemagglutinin__InfluenzaA__AFN18214
augaaggccauccuggugguccuccuguacaccuucgcuacagccaacgcggacacgcuuugcauuggcuaucacgcuaauaacagcaccgauacaguugacaccgugcuggagaaaaaugugacagucacccauuccgugaacauccucgaagauaagcacaaugggaaacuguguaaacuuagaggaguugcuccccugcaucucggcaagugcaacauugccggguggauccugggaaauccugagugugaaucucugagcacagccuccucuuggagcuacauuguggagaccuccucuagcgacaacggcacgugcuauccgggggauuuuaucaauuacgaagaacuccgggagcagcuguccagcgucucuuccuucgaacgcuuugagaucuuccccaagaccagcucuuggccuaaccacgacuccaauaagggagugacagccgcuuguccccaugccggcgcgaaaucuuuuuauaagaaccuuauuuggcugguuaaaaagggcaauagcuacccuaaacucuccaagagcuauaucaacgauaaggggaaagaagugcugguccuuuggggcauucaccaccccuccaccucugccgaccaacagagccuguaccagaaugcugaugccuacguguucgugggauccagcagauauucuaagaaauuuaagccugagaucgcuauucggccgaaaguccgcgaccaggaggggagaaugaacuacuauuggacacucguugaacccggagauaagaucaccuucgaggccacgggcaaccugguggugccucgguacgcguuugccauggaacgcaaugcuggguccggaauuaucaucagcgacacacccguccaugauugcaacaccacaugucaaaccccuaaaggcgccauuaauaccucucugcccuuccagaacauccacccgauuacaaucggcaagugcccuaaguaugugaaaagcacgaagcucagacuggcuaccgggcuucggaauguucccuccauucagucucgcggacuguuuggcgccaucgccggguucaucgagggaggcuggacagggaugguggacggaugguacggcuaucaucaccagaacgaacaaggcagcggguacgcugcggaccucaaauccacccagaaugccauugaugagaucacaaacaaggucaauagcgugauugagaaaaugaacacccaguuuacggcuguuggaaaggaguucaaucaccuggagaagagaaucgaaaaccuuaauaaaaagguggacgauggcuuccuggacauuuggacauacaacgccgagcuccugguccugcucgaaaaugagcggacccuggauuaucaugacucuaacgugaaaaaccuuuacgagaagguccgcucccagcugaaaaauaacgccaaggaaguggggaauggauguuuugaguucuaucacaagugcgauaacaccuguauggaaagcguuaaaaauggcacauacgacuauccuaaguacucugaggaagcuaaacucaacagagaggagaucgauggggugaagcuggaauccacccggaucuaucaaauucuugccaucuacagcacagcggcuuccucucugguccucgugguuagccugggcgccauuuccuuuuggaugugcucuaauggaagccugcagugccgcaucuguauuuga

SEQ ID NO: 201341 - RNA, 1701 nt, Artificial Sequence; identical to SEQ ID NO: 197296
  derived and/or modified CDS sequence (opt5) from hemagglutinin__InfluenzaA__AFN18224

SEQ ID NO: 201342 - RNA, 1701 nt, Artificial Sequence; identical to SEQ ID NO: 196293
  derived and/or modified CDS sequence (opt5) from hemagglutinin__InfluenzaA__AFN18231

SEQ ID NO: 201343 - RNA, 1701 nt, Artificial Sequence
  derived and/or modified CDS sequence (opt5) from hemagglutinin__InfluenzaA__AFN18233
augaaggccauccuggugguccuccuguacaccuucgcuacagccaacgcggacacgcuuugcauuggcuaucacgcuaauaacagcaccgauacaguugacaccgugcuggagaagaaugugacagucacccauuccgugaaccuccuggaagauaagcacaaugggaaacuuuguaagcugagaggaguugcuccccuccaucugggcaaaugcaacaucgccggguggauucugggaaauccugagugugaaucucucagcacagccuccucuuggagcuacaucguggagaccuccucuagcgacaacggcacgugcuauccgggggauuuuauugacuacgaagaacugcgggagcagcuuuccagcgucucuuccuucgaacgcuuugagaucuuccccaagaccagcucuuggccuaaucacgaucccaacaagggagugacagccgcuuguccucaugccggcgcgaaauccuuuuauaagaaucugaucuggcucguuaaaaagggcaacagcuaccccaaacugucuaaguccuauauuaaugacaaggggaaagaagugcuuguccuguggggaauccaccacccuagcaccuccgccgaucaacagucucucuaccagaacgcugacgccuacguguucgugggcacaagcagauauucccggaaguuuaaaccggagauugcuauccgccccaaggucagagaucaggaggggcggaugaauuacuauuggacccugguugaaccuggagacaaaauuacguucgaggccacaggcaaccugguggugccccgcuacgcguuugccauggaaagaaacgcugggagcggaaucauuaucucugauaccccuguccaugacugcaauacaaccugucaaacccccaagggcgccaucaacacaucccucccguuccagaauauucacccuaucacgauuggcaaaugccccaaguauguuaagagcaccaaacugcggcuugcuacagggcugcgcaacgugccuucuauccagagcagaggacucuuuggcgccauugccggguucaucgagggaggcuggaccgggaugguggacggaugguacggcuaucaucaccagaaugaacaaggcuccggguacgcugcggaucugaagucuacacagaacgccaucgacgagauuaccaauaaagucaacagcgugaucgagaagaugaauacgcaguuuacagcuguuggaaaagaguucaaccaccuugagaagcggauugaaaaucugaacaagaaaguggaugacggcuuccucgauaucuggaccuacaaugccgagcugcugguccuccuggaaaacgagcgcacccuugacuaucaugauuccaaugugaagaaacuguacgagaaggucagaagccagcucaaaaacaacgccaaggaaauugggaauggauguuuugaguucuaucacaagugcgacaacacauguauggaaucugugaaaaauggcaccuacgauuaucccaaguacuccgaggaagcuaaacugaaccgggaggagaucgacgggguuaaacuugaaagcacacgcaucuaucaaauucuggccaucuacucuacgguggcguccagccucguccuggugguuucccugggcgcuauuucuuuuuggaugugcagcaauggaucccuccagugcagaaucuguauuuga

SEQ ID NO: 201344 - RNA, 1701 nt, Artificial Sequence
  derived and/or modified CDS sequence (opt5) from hemagglutinin__InfluenzaA__AFN18243
augaaggccauccuggugguccuccuguacaccuucgcuacagccaacgcggacacgcuuugcauuggcuaucacgcuaauaacagcaccgauacaguugacaccgugcuggagaagaaugugacagucacccauuccgugaaccuccuggaagauaagcacaaugggaaacuuuguaagcugagaggaguugcuccccuccaucugggcaaaugcaacaucgccggguggauucugggaaauccugagugugaaucucucagcacagccuccucuuggagcuacaucguggagaccuccucuagcgacaacggcacgugcuauccgggggauuuuauugacuacgaagaacugcgggagcagcuuuccagcgucucuuccuucgaacgcuuugagaucuuccccaagaccagcucuuggccuaaucacgauuccaacaagggagugacagccgcuuguccccaugccggcgcgaaaucuuuuuauaagaaucugaucuggcucguuaaaaagggcaacagcuacccuaaacuguccaagagcuauauuaaugacaaggggaaagaagugcuuguccuguggggaauccaccaccccuccaccucugccgaucaacagagccucuaccagaacgcugacacauacguguucgugggcaccuccagauauagcaagaaauuuaagccugagauugccauccggccgaaaguccgcgaucaggaggggagaaugaauuacuauuggacgcugguugaacccggagacaagauuacauucgaggcuaccggcaaccugguggugccucgguacgccuuugcgauggaacgcaacgccgggucuggaaucauuaucuccgauacacccguccaugacugcaauaccaccugucaaacaccuaaaggcgcuaucaacacgagccuccccuuccagaauauucacccgaucaccauuggcaagugcccuaaguaugugaaaucuacaaagcugagacuugccaccgggcugcggaacguucccagcauccagucccgcggacucuuuggcgcuauugccggguucaucgagggaggcuggacagggaugguggacggaugguacggcuaucaucaccagaaugaacaaggcucuggguacgccgcugaucugaaaagcacccagaacgcgaucgacgagauuacgaauaaggucaacuccgugaucgagaaaaugaauacacaguuuaccgccguuggaaaggaguucaaccaccuugagaagagaauugaaaaucugaacaaaaagguggaugacggcuuccucgauaucuggaccuacaaugcugagcugcugguccuccuggaaaacgagcggacacuugacuaucaugauagcaaugugaaaaaccuguacgagaagguccgcucucagcucaaaaacaaugccaaggaaauugggaacggauguuuugaguucuaucacaagugcgacaauaccuguauggaauccgugaaaaacggcacauacgauuauccuaaguacagcgaggaagccaaacugaauagagaggagaucgacgggguuaaacuugaaucuacgcggaucuaucaaauucuggcuaucuacuccaccguggccagcucccucguccuggugguuucucugggcgcgauuagcuuuuggaugugcuccaacggaucucuccagugccgcaucuguauuuga

SEQ ID NO: 201345 - RNA, 1701 nt, Artificial Sequence; identical to SEQ ID NO: 200830
  derived and/or modified CDS sequence (opt5) from hemagglutinin__InfluenzaA__AFN18245

SEQ ID NO: 201346 - RNA, 1701 nt, Artificial Sequence; identical to SEQ ID NO: 197296
  derived and/or modified CDS sequence (opt5) from hemagglutinin__InfluenzaA__AFN18255

SEQ ID NO: 201347 - RNA, 1701 nt, Artificial Sequence; identical to SEQ ID NO: 201344
  derived and/or modified CDS sequence (opt5) from hemagglutinin__InfluenzaA__AFN18260

SEQ ID NO: 201348 - RNA, 1701 nt, Artificial Sequence; identical to SEQ ID NO: 201344
  derived and/or modified CDS sequence (opt5) from hemagglutinin__InfluenzaA__AFN18267

SEQ ID NO: 201349 - RNA, 1701 nt, Artificial Sequence
  derived and/or modified CDS sequence (opt5) from hemagglutinin__InfluenzaA__AFN18269
augaaggccauccuggugguccuccuguacaccuucgcuacagccaacgcggacacgcuuugcauuggcuaucacgcuaauaacagcaccgauacaguugacaccgugcuggagaaaaaugugacagucacccauuccgugaaccuccuggaagauaagcacaaugggaaacuuuguaagcugagaggaguugcgccccuccaucugggcaaaugcaacaucgccggguggauucugggaaauccugagugugaaucucucagcacagcuuccucuuggagcuacaucguggagaccuccucuagcgacaacggcacgugcuauccgggggauuuuauugacuacgaagaacugcgggagcagcuuuccagcgucucuuccuucgaaaaguuugagaucuuccccaagaccagcucuuggccuaaucacgauuccaacaaaggagugacagccgcuuguccccaugccggcgccaagagcuuuuauaaaaaucugaucuggcucguuaagaaaggcaacucuuacccuaagcuguccaagagcuauauuaaugacaaagggaaggaagugcuuguccuguggggaauccaccaccccuccaccucugccgaucaacagagccucuaccagaacgcugacgccuacguguucgugggcacaucccgcuauagcaaaaaguuuaaaccugagauugcuaucagaccgaagguccgggaucaggaggggcgcaugaauuacuauuggacccugguugaacccggagacaaaauuacguucgaggccacaggcaaccugguggugccuagauacgcguuugccauggaacggaacgcugggucuggaaucauuaucuccgauacccccguccaugacugcaauacaaccugucaaaccccuaagggcgccaucaacacaagccuccccuuccagaauauucacccgaucacgauuggcaagugcccuaaauaugugaagucuaccaaacugcgccuugcuacagggcugagaaacguucccagcauccagucccggggacucuuuggcgccauugccggguucaucgagggaggcuggaccgggaugguggacggaugguacggcuaucaucaccagaaugaacaaggcucuggguacgcugcggaucuuaagagcacacagaacgccaucgacgagauuaccaauaaagucaacuccgugaucgagaagaugaauacgcaguuuacagcuguuggaaaggaguucaaccaccuggagaaacgcauugaaaaucugaacaagaaaguggaugacggcuuccucgauaucuggaccuacaaugccgagcugcugguccuccuggaaaacgagagaacccuugacuaucaugauagcaaugugaagaaccuguacgagaaaguccggucucagcucaagaacaaugccaaggaaauugggaacggauguuuugaguucuaucacaaaugcgacaauacauguauggaauccgugaagaacggcaccuacgauuauccuaaauacagcgaggaagcuaagcugaaucgcgaggagaucgacgggguuaaacuugaaucuacaagaaucuaucaaauucuggccaucuacuccacgguggcgagcucccucguccuggugguuucucugggcgcuauuagcuuuuggaugugcuccaacggaucucuccagugccggaucuguauuuga

SEQ ID NO: 201350 - RNA, 1701 nt, Artificial Sequence; identical to SEQ ID NO: 195905
  derived and/or modified CDS sequence (opt5) from hemagglutinin__InfluenzaA__AFN18271

SEQ ID NO: 201351 - RNA, 1701 nt, Artificial Sequence; identical to SEQ ID NO: 196293
  derived and/or modified CDS sequence (opt5) from hemagglutinin__InfluenzaA__AFN18273

SEQ ID NO: 201352 - RNA, 1701 nt, Artificial Sequence; identical to SEQ ID NO: 195905
  derived and/or modified CDS sequence (opt5) from hemagglutinin__InfluenzaA__AFN18280

SEQ ID NO: 201353 - RNA, 1701 nt, Artificial Sequence; identical to SEQ ID NO: 195539
  derived and/or modified CDS sequence (opt5) from hemagglutinin__InfluenzaA__AFN18303

SEQ ID NO: 201354 - RNA, 1701 nt, Artificial Sequence
  derived and/or modified CDS sequence (opt5) from hemagglutinin__InfluenzaA__AFN18305
augaaggccauccuggugguccuccuguacaccuucgcuacagccaacgcggacacgcuuugcauuggcuaucacgcuaauaacagcaccgauacaguugacaccgugcuggagaaaaaugugacagucacccauuccgccaaccuccuggaagauaagcacaaugggaaacuuuguaagcugagaggaguggcuccccuccaucugggcaaaugcaacaucgccggguggauucugggaaauccugagugugaaucucucagcacagccuccucuuggagcuacaucguugagaccuccucuagcgacaacggcacgugcuauccgggggauuuuauugacuacgaggaacugcgggagcagcuuuccagcgugucuuccuucgaacgcuuugagaucuuccccaagaccagcucuuggccuaaucacgauuccaacaagggagucacagcugccuguccccaugcgggcgccaagagcuuuuauaaaaaucugaucuggcucgugaaaaagggcaacucuuacccuaaacuguccaagagcuauauuaaugacaaggggaaagaaguucuugugcuguggggaauccaccaccccuccaccucugcugaucaacagagccucuaccagaacgccgacgcuuacgucuucgugggcacauccagauauagcaagaaauuuaagccugagauugccauccggccgaaagugcgcgaucaggaggggagaaugaauuacuauuggacccuggucgaacccggagacaagauuacguucgaggcgacaggcaaccugguugugccucgguacgccuuugcuauggaacgcaacgccgggucuggaaucauuaucuccgauacccccgugcaugacugcaauacaaccugucaaaccccuaaaggcgcuaucaacacaagccuccccuuccagaauauucacccgaucacgauuggcaagugcccuaaguaugucaaaucuaccaagcugagacuugccacagggcugcggaacgugcccagcauccagucccgcggacucuuuggcgccauugcuggguucaucgagggaggcuggaccgggaugguugacggaugguacggcuaucaucaccagaaugaacaaggcucuggguacgcggccgaucugaaaagcacacagaacgcuaucgacaagauuaccaauaaagugaacuccgucaucgagaagaugaauacgcaguuuacagccgugggaaaggaguucaaccaccuuggcaaaagaauugaaaaucugaacaagaaaguugaugacggguuccucgauaucuggaccuacaaugccgagcugcuggugcuccuggaaaacgagcggacccuugacuaucaugauagcaaugucaagaaccuguacgaaaaagugcgcucucagcucaagaacaaugcuaaggagauuggaaacggcuguuuugaguucuaucacaaaugcgacaauacauguauggaauccgucaagaacgggaccuacgauuauccuaaauacagcgaggaagccaagcugaauagagaggaaaucgacggcgugaaacuugagucuacacggaucuaucaaauucuggcgaucuacuccacgguugcuagcucccucgugcuggucgugucucugggagccauuagcuuuuggaugugcuccaacggcucucuccagugccgcaucuguauuuga

SEQ ID NO: 201355 - RNA, 1701 nt, Artificial Sequence
  derived and/or modified CDS sequence (opt5) from hemagglutinin__InfluenzaA__AFN18307
augaaggccauccuggugguccuccuguacaccuucgcugccgcgaacgcugacacacuuugcauuggcuaucacgccaauaacagcacggauaccguugacacagugcuggagaaaaaugugaccgucacacauuccgugaaccuccuggaagauaagcacaaugggaaacuuuguaagcugagaggaguugcuccccuccaucugggcaaaugcaacaucgccggguggauucugggaaauccugagugugaaucucucagcaccgccuccucuuggagcuacaucguggagacauccucuagcgacaacgggaccugcuauccgggcgauuuuauugacuacgaagaacugcgggagcagcuuuccagcgucucuuccuucgaacgcuuugagaucuuccccaagacgagcucuuggccuaaucacgauuccaacaagggagugaccgcugccuguccccaugcgggcgccaagagcuuuuauaaaaaucugaucuggcucguuaaaaagggcaacucuuacccuaaacuguccaagagcuauauuaaugacaaggggaaagaagugcuuguccuguggggaauccaccaccccuccacaucugcugaucaacagagccucuaccagaacgccgacgcuuacguguucgugggcaccuccagauauagcaagaaauuuaagccugagauugccauccggccgaaaguccgcgaucaggaggggagaaugaauuacuauuggacacugguugaacccggagacaagauuaccuucgaggcgacgggcaaccugguggugccucgguacgccuuugcuauggaacgcaacacagggucuggaaucauuaucuccgauacccccguccaugacugcaauacaaccugucaaaccccuaaaggcgccaucaacacaagccuccccuuccagaauauucacccgaucacgauuggcaagugcccuaaguaugugaaaucuaccaagcugagacuugcuacagggcugcggaacguucccagcauccagucccgcggacucuuuggcgccauugccggguucaucgagggaggcuggaccgggaugguggacggaugguacggcuaucaucaccagaaugaacaaggcucuggguacgcugcggaucugaaaagcacacagaacgccaucgacaagauuaccaauaaagucaacuccgugaucgagaagaugaauacgcaguuuacagcuguuggaaaggaguucaaccaccuugagaaaagaauugagaaucugaacaagaaaguggaugacggcuuccucgauaucuggaccuacaaugccgaacugcugguccuccuggagaacgaacggacccuugacuaucaugauagcaaugugaagaaccuguacgagaaaguccgcucucagcucaagaacaaugccaaggagauugggaacggauguuuugaguucuaucacaaaugcgacaauacauguauggaauccgugaagaacggcaccuacgauuauccuaaauacagcgaagaggcuaagcugaauagagaagagaucgacgggguuaaacuugagucuacacggaucuaucaaauucuggccaucuacuccacgguggcgagcucccucguccuggugguuucucugggcgcuauuagcuuuuggaugugcuccaacggaucucuccagugccgcaucuguauuuga

SEQ ID NO: 201356 - RNA, 1701 nt, Artificial Sequence
  derived and/or modified CDS sequence (opt5) from hemagglutinin__InfluenzaA__AFN18312
augaaggccauccuggugguccuccuguacaccuucgcuacagccaacgcggacacgcuuugcauuggcuaucacgcuaauaacagcaccgauacaguugacaccgugcuggagaaaaaugugacagucacccauuccgugaaccuccuggaagauaagcacaaugggaaacuuuguaagcugagaggaguugcuccccuccaucugggcaaaugcaacaucgccggguggauucugggaaauccugagugugaaucucucagcacagccuccucuuggagcuacaucguggagaccuccucuagcgacaacggcacgugcuauccgggggauuuuauugacuacgaagaacugcgggagcagcuuuccagcgucucuuccuucgaacgcuuugagaucuuccccaagaccagcucuuggccuaaucacgauuccaacaagggaaucacagccgcuuguccccaugccggcgcgaaaucuuuuuauaagaaucugauuuggcucgugaaaaagggcaacagcuacccuaaacuguccaagagcuauaucaaugacaaggggaaagaaguucuugugcuguggggcauucaccaccccuccaccucugccgaucaacagagccucuaccagaacgcugacgccuacgucuucgugggaacauccagauauagcaagaaauuuaagccugagaucgcuauucggccgaaagugcgcgaucaggaggggagaaugaauuacuauuggacccuggucgaacccggagacaagaucacguucgaggccacaggcaaccugguugugccucgguacgcguuugccauggaacgcaacgcugggucuggaauuaucaucuccgauacccccgugcaugacugcaauacaaccugucaaaccccuaaaggcgccauuaacacaagccuccccuuccagaauauccacccgauuacgaucggcaagugcccuaaguaugucaaaucuaccaagcugagacuugcuacagggcugcggaacgugcccagcauucagucccgcggacucuuuggcgccaucgccggguucaucgagggaggcuggaccgggaugguugacggaugguacggcuaucaucaccagaaugaacaaggcucuggguacgcugcggaucugaaaagcacacagaacgccauugacaagaucaccaauaaagugaacuccgucauugagaagaugaauacgcaguuuacagcugugggaaaggaguucaaccaccuugagaaaagaaucgagaaucugaacaagaaaguugaugacggcuuccucgauauuuggaccuacaaugccgaacugcuggugcuccuggagaacgaacggacccuugacuaucaugauagcaaugucaagaaccuguacgagaaagugcgcucucagcucaagaacaaugccaaggagaucgggaacggauguuuugaguucuaucacaaaugcgacaauacauguauggaauccgucaagaacggcaccuacgauuauccuaaauacagcgaagaggcuaagcugaauagagaagagaucgacggggugaaacuugagucuacacggauuuaucaaauccuggccauuuacuccacgguugcgagcucccucgugcuggucaucucucugggcgcuauuagcuuuuggaugugcuccaacggaucucuccagugccgcaucuguauuuga

SEQ ID NO: 201357 - RNA, 1701 nt, Artificial Sequence; identical to SEQ ID NO: 197106
  derived and/or modified CDS sequence (opt5) from hemagglutinin__InfluenzaA__AFN18319

SEQ ID NO: 201358 - RNA, 1701 nt, Artificial Sequence; identical to SEQ ID NO: 199203
  derived and/or modified CDS sequence (opt5) from hemagglutinin__InfluenzaA__AFN18324

SEQ ID NO: 201359 - RNA, 1701 nt, Artificial Sequence; identical to SEQ ID NO: 195094
  derived and/or modified CDS sequence (opt5) from hemagglutinin__InfluenzaA__AFN18334

SEQ ID NO: 201360 - RNA, 1701 nt, Artificial Sequence; identical to SEQ ID NO: 196857
  derived and/or modified CDS sequence (opt5) from hemagglutinin__InfluenzaA__AFN18344

SEQ ID NO: 201361 - RNA, 1701 nt, Artificial Sequence; identical to SEQ ID NO: 194741
  derived and/or modified CDS sequence (opt5) from hemagglutinin__InfluenzaA__AFN18354

SEQ ID NO: 201362 - RNA, 1701 nt, Artificial Sequence
  derived and/or modified CDS sequence (opt5) from hemagglutinin__InfluenzaA__AFN18364
augaaggccauccuggugguccuccuguacaccuucgcuacagccaacgcggacacgcuuugcauuggcuaucacgcuaauaacagcaccgauacaguugacaccgugcuggagaaaaaugugacagucacccauuccgugaaccuccuggaagauaagcacaaugggaaacuuuguaagcugagaggaguugcuccccuccaucugggcaaaugcaacaucgccggguggauucugggaaauccugagugugaaucucucagcacagccuccucuuggagcuacaucguggagaccuccucuagcgacaacggcacgugcuauccgggggauuuuauugacuacgaagaacugcgggagcagcuuuccagcgucucuuccuucgaacgcuuugagaucuuccccaagaccagcucuuggccuaaucacgaucugaacaagggagugacagccgcuuguccccaugccggcgcgaaauccuuuuauaagaaucucaucuggcugguuaaaaagggcaacagcuacccuaaacuuucuaaguccuauauuaaugacaaggggaaagaagugcugguccucuggggaauccaccaccccagcaccuccgccgaucaacagucucuguaccagaacgcugacgccuacguguucgugggcacaagcagauauuccaagaaauuuaagccugagauugcuauccggccgaaaguccgcgaucaggaggggagaaugaauuacuauuggacccugguugaacccggagacaagauuacguucgaggccacaggcaaccucguggugccucgguacgcguuugccauggaacgcaacgcugggagcggaaucauuaucucugauacccccguccaugacugcaauacaaccugucaaaccccuaaaggcgccaucaacacaucccugcccuuccagaauauucacccgaucacgauuggcaagugcccuaaguaugugaaaagcaccaaacuuagacuggcuacagggcuccggaacguucccucuauccagagccgcggacuguuuggcgccauugccggguucaucgagggaggcuggaccgggaugguggacggaugguacggcuaucaucaccagaaugaacaaggcuccggguacgcugcggaucuuaagucuacacagaacgccaucgacgagauuaccaauaaggucaacagcgugaucgagaaaaugaauacgcaguuuacagcuguuggaaaggaguucaaccaccuggagaagagaauugaaaaucucaacaaaaagaucgaugacggcuuccuggauauuuggaccuacaaugccgagcugcucgugcugcuugaaaacgagcggacccuggacuaucaugauuccaaugucaaaaaccucuacgagaaggugcgcagccagcugaaaaacaaugccaaggaaaucgggaacggauguuuugaguucuaucacaagugcgacaauacauguauggaaucugucaaaaacggcaccuacgauuauccuaaguacuccgaggaagcuaaacuuaauagagaggagaucgacggggugaagcuggaaagcacacggauuuaucaaauccucgccauuuacucuacgguugcguccagccuggugcuggucgugucccucggcgcuaucucuuuuuggaugugcagcaacggaucccugcagugccgcauuuguaucuga

SEQ ID NO: 201363 - RNA, 1701 nt, Artificial Sequence; identical to SEQ ID NO: 194741
  derived and/or modified CDS sequence (opt5) from hemagglutinin__InfluenzaA__AFN18374

SEQ ID NO: 201364 - RNA, 1701 nt, Artificial Sequence
  derived and/or modified CDS sequence (opt5) from hemagglutinin__InfluenzaA__AFN18381
augaaggccauccuggugguccuccuguacaccuucgcuacagccaacgcggacacgcuuugcauuggcuaucacgcuaauaacagcaccgauacaguugacaccgugcuggagaagaaugugacagucacccauuccgugaaccuccuggaagauaagcacaaugggaaacuuuguaagcugagaggaguugcuccccuccaucugggcaaaugcaacaucgccggguggauucugggaaauccugagugugaaucucucagcacagccuccucuuggagcuacaucguggagaccuccucuagcgacaacggcacgugcuauccgggggauuuuauugacuacgaagaacugcgggagcagcuuuccagcgucucuuccuucgaacgcuuugagaucuuccccaagaccagcucuuggccuaaucacgauuccaacaagggagugacagccgcuuguccccaugccggcgcgaaaucuuuuuauaagaaucugaucuggcucguuaaaaagggcaacagcuacccuaaacuguccaagagcuauauuaaugacaaggggaaagaagugcuuguccuguggggaauccaccaccccuccaccucugccgaucaacagagccucuaccagaacgcugacgccuacguguucgugggcacauccaaguauagcaaaaaguuuaaaccugagauugcuaucagaccgaagguccgggaucaggaggggcgcaugaauuacuauuggacccugguuaaacccggagacaagauuacguucgaagccacaggcaaccugguggugccuagauacgcguuugccauggagcggaacgcugggucuggaaucauuaucuccgauacccccguccaagacugcaauacaaccugucagaccccuaagggcgccaucaacacaagccuccccuuccagaauauucauccgaucacgauuggcaaaugcccuaaguaugugaaaucuaccaagcugcgccuugcuacagggcugagaaacguucccagcauccagucccggggacucuuuggcgccauugccggguucaucgaaggaggcuggaccgggaugguggacggaugguacggcuaucaccaucaaaaugagcagggcucuggguacgcugcggaucugaaaagcacacagaacgccaucgacgaaauuaccaauaaggucaacuccgugaucgagaagaugaauacgcaguuuacagcuguuggaaaagaguucaaccaccuugaaaagcgcauugagaaucugaacaaaaagguggaugacggcuuccucgauaucuggaccuacaaugccgaacugcugguccuccuggagaacgaaagaacccuugacuaucacgauagcaaugugaaaaaccuguacgagaagguccggucucaacucaagaacaaugccaaagagauugggaacggauguuuugaguucuaucauaagugcgacaauacauguauggaguccgugaaaaacggcaccuacgauuauccuaaguacagcgaagaggcuaaacugaaucgcgaagagaucgacgggguuaaacuugagucuacaagaaucuaucagauucuggccaucuacuccacgguggcgagcucccucguccuggugguuucucugggcgcuauuagcuuuuggaugugcuccaacggaucucuccagugccggaucuguauuuga

SEQ ID NO: 201365 - RNA, 1701 nt, Artificial Sequence
  derived and/or modified CDS sequence (opt5) from hemagglutinin__InfluenzaA__AFN18390
augaaggccauccuggugguccuccuguacaccuucgcuacagccaacgcggacacgcuuugcauuggcuaucacgcuaauaacagcaccgauacaguugacaccgugcuggagaagaaugugacagucacccauuccgugaaccuccuggaagauaagcacaaugggaaacuuuguaagcugagaggaguugcuccccuccaucugggcaaaugcaacaucgccggguggauucugggaaauccugagugugaaucucucagcacagccuccucuuggagcuacaucguggagaccuccucuagcgacaacggcacgugcuauccgggggauuuuauugacuacgaagaacugcgggagcagcuuuccagcgucucuuccuucgaacgcuuugagaucuuccccaagaccagcucuuggccuaaucacgauuccaacaagggagugacagccgcuuguccccaugccggcgcgaaaucuuuuuauaagaaucugaucuggcucguuaaaaagggcaacagcuacccuaaacuguccaagagcuauauuaaugacaaggggaaagaagugcuuguccuguggggaauccaccaccccuccaccucugccgaucaacagagccucuaccagaacgcugacgccuacguguucgugggcacauccagauauagcaagaaauuuaagccugagauugcuauccggccgaaaguccgcgaucaggaggggagaaugaauuacuauuggacccugguugaacccggagacaagauuacguucgaggccacaggcaaccugguggugccucgguacgcguuugccauggaacgcaacgcugggucuggaaucauuaucuccgauacccccguccaugacugcaauacaaccugucaaaccccuaaaggcgccaucaacacaagccuccccuuccagaauauucacccgaucacgauuggcaagugcccuaaguaugugaaaucuaccaagcugagacuugcuacagggcugcggaacguucccagcauccagucccgcggacucuuuggcgccauugccggguucaucgagggaggcuggaccgggaugguggacggaugguacggcuaucaucaccagaaugaacaaggcucuggguacgcugcggaucugaaaagcacacagaacgccaucgacgagauuaccaauaaggucaacuccgugaucgagaaaaugaauacgcaguuuacagcuguuggaaaggaguucaaccaccuugagaagagaauugaaaaucugaacaaaaagguggaugacggcuuccucgauaucuggaccuacaaugccgagcugcugguccuccuggaaaacgagcggacccuugacuaucaugauagcaaugugaaaaaccuguacgagaagauucgcucucagcucaaaaacaaugccaaggaaaucgggaacggauguuuugaguucuaucacaagugcgacaauacauguauggaauccgucaaaaacggcaccuacgauuauccuaaguacagcgaggaagcuaaacugaauagagaggagaucgacggggugaaacuugaaucuacacggauuuaucaaauccuggccauuuacuccacgguugcgagcucccucgugcuggucgugucucugggcgcuaucagcuuuuggaugugcuccaacggaucucuccagugccgcauuuguaucuga

SEQ ID NO: 201366 - RNA, 1701 nt, Artificial Sequence
  derived and/or modified CDS sequence (opt5) from hemagglutinin__InfluenzaA__AFN18400
augaaggccauccuggugguccuccuguacaccuucgcuacagccaacgcggacacgcuuugcauuggcuaucacgcuaauaacagcaccgauacaguugacaccgugcuggagaaaaaugugacagucacccauuccgugaaccuccuggaagauaagcacaaugggaaacuuuguaagcugagaggaguuacaccccuccaucugggcaaaugcaacaucgccggguggauucugggaaauccugagugugaaucucucagcaaggccuccucuuggagcuacaucguggagaccuccucuagcgacaacggcacgugcuauccgggggauuuuauugacuacgaagaacugcgggagcagcuuuccagcgucucuuccuucgaacgcuuugagaucuuccccaagaccagcucuuggccuaaucacgauuccaacaaaggagugacagcugccuguccccaugcuggcgccaagagcuuuuauaaaaaucugaucuggcucguuaagaaaggcaacucuuacccuaagcuguccaagagcuauauuaaugacaaagggaaggaagugcuuguccuguggggaauccaccaccccuccaccucugcggaucaacagagccucuaccagaacgccgacgcuuacguguucgugggcacauccagauauagcaaaaaguuuaaaccugagauugccauccggccgaagguccgcgaucaggaggggagaaugaauuacuauuggacccugguugaacccggagacaaaauuacguucgaggcuacaggcaaccugguggugccucgguacgccuuugcgauggaacgcaacgucgggucuggaaucauuaucuccgauacccccgugcaugacugcaauacaaccugucaaaccccuaagggcgccaucaacacaagccuccccuuccagaauauucacccgaucacgauuggcaagugcccuaaauauguuaagucuaccaaacugagacuugcuacagggcugcggaacgugcccagcauccagucccgcggacucuuuggcgccauugcuggguucaucgagggaggcuggaccgggauggucgacggaugguacggcuaucaucaccagaaugaacaaggcucuggguacgccgccgaucuuaagagcacacagaacgcuaucgacgagauuaccaauaaagugaacuccguuaucgagaagaugaauacgcaguuuacagcggugggaaaggaguucaaccaccuggagaaaagaauugaaaaucugaacaagaaagucgaugacggcuuccucgauaucuggaccuacaaugccgagcugcuggugcuccuggaaaacgagcggacccuugacuaucaugauagcaaugucaagaaccuguacgagaaagugcgcucucagcucaagaacaaugcuaaggaaauugggaacggauguuuugaguucuaucacaaaugcgacaauacauguauggaauccguuaagaacggcaccuacgauuauccuaaauacagcgaggaagccaagcugaauagagaggagaucgacggggugaaacuugaaucuacacggaucuaucaaauucuggccaucuacuccacggucgcuagcucccucgugcugguugugucucugggcgccauuagcuuuuggaugugcuccaacggaucucuccagugccgcaucuguauuuga

SEQ ID NO: 201367 - RNA, 1701 nt, Artificial Sequence; identical to SEQ ID NO: 194832
  derived and/or modified CDS sequence (opt5) from hemagglutinin__InfluenzaA__AFN18410

SEQ ID NO: 201368 - RNA, 1701 nt, Artificial Sequence; identical to SEQ ID NO: 194741
  derived and/or modified CDS sequence (opt5) from hemagglutinin__InfluenzaA__AFN18420

SEQ ID NO: 201369 - RNA, 1701 nt, Artificial Sequence
  derived and/or modified CDS sequence (opt5) from hemagglutinin__InfluenzaA__AFN18430
augaaggccauccuggugguccuccuguacaccuucgcuacagccaacgcggacacgcuuugcauuggcuaucacgcuaauaacagcaccgauacaguugacaccgugcuggagaagaaugugacagucacccauuccgugaaccuccuggaaaauaagcacaacgggaaacuuuguaagcugagaggaguugcuccccuccaucugggcaaaugcaauaucgccggguggauucugggaaacccugagugugaaucucucagcacagccuccucuuggagcuacaucguggagaccuccucuagcgauaauggcacgugcuauccgggggacuuuauugauuacgaagaacugcgggagcagcuuuccagcgucucuuccuucgaacgcuuugagaucuuccccaagaccagcucuuggccuaaccacgacuccaauaagggagugacagccgcuuguccccaugccggcgcgaaauccuuuuauaagaaccugaucuggcucguuaaaaagggcaauucuuacccuaaacuguccaagagcuauauuaacgauaaggggaaagaagugcuuguccuguggggaauccaccaccccuccaccucugccgaccaacagagccucuaccagaaugcugaugccuacguguucgugggcacauccagauauagcaagaaauuuaagccugagauugcuauccggccgaaaguccgcgaccaggaggggagaaugaacuacuauuggacccugguugaacccggagauaagauuacguucgaggccacaggcaaccugguggugccucgguacgcguuugccaugguccgcaaugcugggucuggaaucauuaucuccgacacccccgugcaugauugcaacacaaccugucaaaccccuaaaggcgccaucaauacaagccuccccuuccagaacauucacccgaucacgauuggcaagugcccuaaguauguuaaaucuaccaagcugagacuugcuacagggcugcggaaugugcccagcauccagucccgcggacucuuuggcgccauugccggguucaucgaaggaggcuggaccgggauggucgacggaugguacggcuaucaucaccagaacgagcaaggcucuggguacgcugcggaccugaaaagcacacagaaugccaucgaugaaauuaccaacaaggugaauagcguuaucgagaaaaugaacacgcaguuuacagcugugggaaaggaguucaaucaccuugaaaagagaauugagaaccugaauaaaaaggucgacgauggcuuccucgacaucuggaccuacaacgccgaacugcuggugcuccuggagaaugaacggacccuugauuaucaugacagcaacgucaaaaaccuguacgagaaggugcgcucucagcucaaaaauaacgccaaggagauugggaauggauguuuugaguucuaucacaagugcgauaacacauguauggaguccguuaaaaauggcaccuacgacuauccuaaguacagcgaagaggcuaaacugaacagagaagagaucgauggggugaaacuugagucuacacggaucuaucaaauucuggccaucuacuccacggucgcgagcucccucgugcugguugugucucugggcgcuauuagcuuuuggaugugcuccaauggaucucuccagugccgcaucuguauuuga

SEQ ID NO: 201370 - RNA, 1701 nt, Artificial Sequence; identical to SEQ ID NO: 194741
  derived and/or modified CDS sequence (opt5) from hemagglutinin__InfluenzaA__AFN18440

SEQ ID NO: 201371 - RNA, 1701 nt, Artificial Sequence; identical to SEQ ID NO: 194741
  derived and/or modified CDS sequence (opt5) from hemagglutinin__InfluenzaA__AFN18450

SEQ ID NO: 201372 - RNA, 1701 nt, Artificial Sequence; identical to SEQ ID NO: 197296
  derived and/or modified CDS sequence (opt5) from hemagglutinin__InfluenzaA__AFN18460

SEQ ID NO: 201373 - RNA, 1701 nt, Artificial Sequence; identical to SEQ ID NO: 195602
  derived and/or modified CDS sequence (opt5) from hemagglutinin__InfluenzaA__AFN18470

SEQ ID NO: 201374 - RNA, 1701 nt, Artificial Sequence; identical to SEQ ID NO: 194832
  derived and/or modified CDS sequence (opt5) from hemagglutinin__InfluenzaA__AFN18480

SEQ ID NO: 201375 - RNA, 1701 nt, Artificial Sequence; identical to SEQ ID NO: 195602
  derived and/or modified CDS sequence (opt5) from hemagglutinin__InfluenzaA__AFN18490

SEQ ID NO: 201376 - RNA, 1701 nt, Artificial Sequence; identical to SEQ ID NO: 194741
  derived and/or modified CDS sequence (opt5) from hemagglutinin__InfluenzaA__AFN18497

SEQ ID NO: 201377 - RNA, 1701 nt, Artificial Sequence; identical to SEQ ID NO: 194741
  derived and/or modified CDS sequence (opt5) from hemagglutinin__InfluenzaA__AFN18512

SEQ ID NO: 201378 - RNA, 1701 nt, Artificial Sequence
  derived and/or modified CDS sequence (opt5) from hemagglutinin__InfluenzaA__AFN18519
augaaggccauccuggugguccuccuguacaccuucgcuacagccaacgcggacacgcuuugcauuggcuaucacgcuaauaacagcaccgauacaguugacaccgugcuggagaaaaaugugacagucacccauuccgugaaccuccuggaagauaagcacaaugggaaacuuuguaagcugagaggaguugcuccccuccaucugggcaaaugcaacaucgccggguggauucugggaaauccugagugugaaucucucagcacagccuccucuuggagcuacaucguggagaccuccucuagcgacaacggcacgugcuauccgggggauuuuauugacuacgaagaacugcgggagcagcuuuccagcgucucuuccuucgaacgcuuugagaucuuccccaagaccagcucuuggccuaaucacgauuccaacaagggagugacagccgcuuguccccaugccggcgcgaaaucuuuuuauaagaaucugaucuggcucguuaaaaaggaaaacagcuacccuaaacuguccaagagcuauauuaaugacaagggcaaagaggugcuuguccugugggggauccaccaccccuccaccucugccgaucaacagagccucuaccagaacgcugacgccuacguguucgugggaacauccagauauagcaagaaauuuaagccugagauugcuauccggccgaaaguccgcgaucaggaaggcagaaugaauuacuauuggacccugguugagcccggggacaagauuacguucgaagccacaggaaaccugguggugccucgguacgcguuugccauggagcgcaacgcuggcucugggaucauuaucuccgauacccccguccaugacugcaauacaaccugucaaaccccuaaaggagccaucaacacaagccuccccuuccagaauauucacccgaucacgauuggcaagugcccuaaguaugugaaaucuaccaagcugagacuugcuacaggccugcggaacguucccagcauccagucccgcgggcucuuuggagccauugccggcuucaucgaagggggauggaccggcaugguggacgggugguacggauaucaucaccagaaugagcaaggcucuggcuacgcugcggaucugaaaagcacacagaacgccaucgacgagauuaccaauaaggucaacuccgugaucgaaaagaugaauacgcaguuuacagcuguugggaaggaguucaaccaccuugaaaagagaauugagaaucugaacaaaaagguggaugacggauuccucgauaucuggaccuacaaugccgaacugcugguccuccuggagaacgagcggacccuugacuaucaugauagcaaugugaaaaaccuguacgaaaagguccgcucucagcucaaaaacaaugccaaggagauuggcaacggguguuuugaguucuaucacaagugcgacaauacauguauggaguccgugaaaaacggaaccuacgauuauccuaaguacagcgaagaggcuaaacugaauagagaggaaaucgacggcguuaaacuugagucuacacggaucuaucaaauucuggccaucuacuccacgguggcgagcucccucguccuggugguuucucugggggcuauuagcuuuuggaugugcuccaacggcucucuccagugccgcaucuguauuuga

SEQ ID NO: 201379 - RNA, 1701 nt, Artificial Sequence
  derived and/or modified CDS sequence (opt5) from hemagglutinin__InfluenzaA__AFN18521
augaaggccauccuggugguccuccuguacaccuucgcuacagccaacgcggacacgcuuugcauuggcuaucacgcuaauaacagcaccgauacaguugacaccgugcuggagaagaaugugacagucacccauuccgugaaccuccuggaagauaagcacaaugggaaacuuuguaagcugagaggaguugcuccccuccaucugggcaaaugcaacaucgccggguggauucugggaaauccugagugugaaucucucagcacagccuccucuuggagcuacaucguggagaccuccucuagcgacaacggcacgugcuauccgggggauuuuauugacuacgaagaacugcgggagcagcuuuccagcgucucuuccuucgaacgcuuugagaucuuccccaagaccagcucuuggccuaaucacgauuccaacaagggagugacagccgcuuguccccaugccggcgcgaaaucuuuuuauaagaaucugaucuggcucguuaaaaagggcaacagcuacccuaaacuguccaagagcuauauuaaugacaaggggaaagaagugcuuguccuguggggaauccaccaccccuccaccucugccgaucaacagagccucuaccagaacgcugacgccuacguguucgugggcacauccagauauagcaagaaauuuaagccugagauugcuauccggccgaaaguccgcgaucaggaggggagaaugaauuacuauuggacccugguugaacccggagacaagauuacguucgaggccacaggcaaccugguggugccucgguacgcguuugccaugguccgcaacgcugggucuggaaucauuaucuccgauacccccgugcaugacugcaauacaaccugucaaaccccuaaaggcgccaucaacacaagccuccccuuccagaauauucacccgaucacgauuggcaagugcccuaaguauguuaaaucuaccaagcugagacuugcuacagggcugcggaacgugcccagcauccagucccgcggacucuuuggcgccauugccggguucaucgaaggaggcuggaccgggauggucgacggaugguacggcuaucaucaccagaaugagcaaggcucuggguacgcugcggaucugaaaagcacacagaacgccaucgacgaaauuaccaauaaggugaacuccguuaucgagaaaaugaauacgcaguuuacagcugugggaaaggaguucaaccaccuugaaaagagaauugagaaucugaacaaaaaggucgaugacggcuuccucgauaucuggaccuacaaugccgaacugcuggugcuccuggagaacgaacggacccuugacuaucaugauagcaaugucaaaaaccuguacgagaaggugcgcucucagcucaaaaacaaugccaaggagauugggaacggauguuuugaguucuaucacaagugcgacaauacauguauggaguccguuaaaaacggcaccuacgauuauccuaaguacagcggggaagcuaaacugaauagagaggaaaucgacggcgugaaacuugagucuacacggaucuaucaaauucuggccaucuacuccacggucgcgagcucccucgugcugguugugucucugggagcuauuagcuuuuggaugugcuccaacggcucucuccagugccgcaucuguauuuga

SEQ ID NO: 201380 - RNA, 1701 nt, Artificial Sequence; identical to SEQ ID NO: 194741
  derived and/or modified CDS sequence (opt5) from hemagglutinin__InfluenzaA__AFN18528

SEQ ID NO: 201381 - RNA, 1701 nt, Artificial Sequence; identical to SEQ ID NO: 194741
  derived and/or modified CDS sequence (opt5) from hemagglutinin__InfluenzaA__AFN18531

SEQ ID NO: 201382 - RNA, 1701 nt, Artificial Sequence; identical to SEQ ID NO: 197338
  derived and/or modified CDS sequence (opt5) from hemagglutinin__InfluenzaA__AFN18543

SEQ ID NO: 201383 - RNA, 1701 nt, Artificial Sequence; identical to SEQ ID NO: 199623
  derived and/or modified CDS sequence (opt5) from hemagglutinin__InfluenzaA__AFN18545

SEQ ID NO: 201384 - RNA, 1701 nt, Artificial Sequence; identical to SEQ ID NO: 195602
  derived and/or modified CDS sequence (opt5) from hemagglutinin__InfluenzaA__AFN18550

SEQ ID NO: 201385 - RNA, 1701 nt, Artificial Sequence
  derived and/or modified CDS sequence (opt5) from hemagglutinin__InfluenzaA__AFN18557
augaaggccauccuggugguccuccuguacaccuucgcuacagccaacgcggacacgcuuugcauuggcuaucacgcuaauaacagcaccgauacaguugacaccgugcuggagaagaaugugacagucacccauuccgugaaccuccuggaagauaagcacaaugggaaacuuuguaagcugagaggaguugcuccccuccaucugggcaaaugcaacaucgccggguggauucugggaaauccugagugugaaucucucagcacagccuccucuuggagcuacaucguggagaccuccucuagcgacaacggcacgugcuauccgggggauuuuauugacuacgaagaacugcgggagcagcuuuccagcgucucuuccuucgaacgcuuugagaucuuccccaagaccagcucuuggccuaaucacgauuccaacaagggagugacagccgcuuguccccaugccggcgcgaaaucuuuuuauaagaaucugaucuggcucguuaaaaagggcaacagcuacccuaaacuguccaagagcuauauuaaugacaaggggaaagaagugcuuguccuguggggaauccaccaccccuccaccucugccgaucaacagagccucuaccagaacgcugacgccuacguguucgugggcacauccagauauagcaagaaauuuaagccugagauugcuauccggccgaaaguccgcgaucaggaggggagaaugaauuacuauuggacccugguugaacccggagacaagauuacguucgaggccacaggcaaccugguggugccucgguacgcguuugccauggaacgcaacgcugggucuggaaucauuaucuccgauacccccgcccaugacugcaauacaaccugucaaaccccuaaaggcgcuaucaacacaagccuccccuuccagaauauucacccgaucacgauuggcaagugcccuaaguaugucaaaucuaccaagcugagacuugccacagggcugcggaacgugcccagcauccagucccgcggacucuuuggcgccauugcuggguucaucgagggaggcuggaccgggaugguugacggaugguacggcuaucaucaccagaaugaacaaggcucuggguacgcggccgaucugaaaagcacacagaacgcuaucgacgagauuaccaauaaggugaacuccgucaucgagaaaaugaauacgcaguuuacagccgugggaaaggaguucaaccaccuugagaagagaauugaaaaucugaacaaaaagguugaugacggcuuccucgauaucuggaccuacaaugccgagcugcuggugcuccuggaaaacgagcggacccuugacuaucaugauagcaaugucaaaaaccuguacgagaaggugcgcucucagcucaaaaacaaugcuaaggaaauugggaacggauguuuugaguucuaucacaagugcgacaauacauguauggaauccgucaaaaacggcaccuacgauuauccuaaguacagcgaggaagccaaacugaauagagaggagaucgacggggugaaacuugaaucuacacggaucuaucaaauucuggcgaucuacuccacgguugcuagcucccucgugcuggucgugucucugggcgccauuagcuuuuggaugugcuccaacggaucucuccagugccgcaucuguauuuga

SEQ ID NO: 201386 - RNA, 1701 nt, Artificial Sequence
  derived and/or modified CDS sequence (opt5) from hemagglutinin__InfluenzaA__AFN18559
augaaggccauccuggugguccuccuguacaccuucgcuacagccaacgcggacacgcuuugcauuggcuaucacgcuaauaacagcaccgauacaguugacaccgugcuggagaagaaugugacagucacccauuccgugaaccuccuggaagauaagcacaaugggaaacuuuguaagcugagaggaguugcuccccuccaucugggcaaaugcaacaucgccggguggauucugggaaauccugagugugaaucucucagcacagccuccucuuggagcuacaucguggagaccuccucuagcgacaacggcacgugcuauccgggggauuuuauugacuacgaagaacugcgggagcagcuuuccagcgucucuuccuucgaacgcuuugagaucuuccccaagaccagcucuuggccuaaucacgauuccaacaagggagugacagccgcuuguccccaugccggcgcgaaaucuuuuuauaagaaucugaucuggcucguuaaaaagggcaacagcuacccuaaacuguccaagagcuauauuaaugacaaggggaaagaagugcuuguccuguggggaauccaccaccccuccaccucugccgaucaacagaaccucuaccagaaugcugacgccuacguguucgugggcacaagcagauauuccaagaaauuuaagccugagauugcuauccggccgaaaguccgcgaucaggaggggagaaugaacuacuauuggacccugguugaacccggagacaagauuacguucgaggccacaggcaaccugguggugccucgguacgcguuugccauggaacgcaaugcugggagcggaaucauuaucucugauacccccguccaugacugcaacacaaccugucaaaccccuaaaggcgccaucaauacaucccuccccuuccagaacauucacccgaucacgauuggcaagugcccuaaguaugugaaaagcaccaagcugagacuugcuacagggcugcggaauguucccucuauccagagccgcggacucuuuggcgccauugccggguucaucgagggaggcuggaccgggaugguggacggaugguacggcuaucaucaccagaacgaacaaggcuccggguacgcugcggaucugaaaucuacacagaaugccaucgacgagauuaccaacaaggucaauagcgugaucgagaaaaugaacacgcaguuuacagcuguuggaaaggaguucaaucaccuugagaagagaauugaaaaccugaauaaaaagguggaugacggcuuccucgauaucuggaccuacaacgccgagcugcugguccuccuggaaaaugagcggacccuugacuaucaugauuccaacgugaaaaaccuguacgagaagguccgcagccagcucaaaaauaacgccaaggaaauugggaauggauguuuugaguucuaucacaagugcgacaacacauguauggaaucugugaaaaauggcaccuacgauuauccuaaguacuccgaggaagcuaaacugaacagagaggagaucgacgggguuaaacuugaaagcacacggaucuaucaaauucuggccaucuacucuacgguggcguccagccucguccuggugguuucccugggcgcuauuucuuuuuggaugugcagcaauggaucccuccagugccgcaucuguauuuga

SEQ ID NO: 201387 - RNA, 1701 nt, Artificial Sequence; identical to SEQ ID NO: 195607
  derived and/or modified CDS sequence (opt5) from hemagglutinin__InfluenzaA__AFN18561

SEQ ID NO: 201388 - RNA, 1701 nt, Artificial Sequence; identical to SEQ ID NO: 195843
  derived and/or modified CDS sequence (opt5) from hemagglutinin__InfluenzaA__AFN18563

SEQ ID NO: 201389 - RNA, 1701 nt, Artificial Sequence
  derived and/or modified CDS sequence (opt5) from hemagglutinin__InfluenzaA__AFN18565
augaaggccauccuggugguccuccuguacaccuucgcuacagccaacgcggacacgcuuugcauuggcuaucacgcuaauaacagcaccgauacaguugacaccgugcuggagaagaaugugacagucacccauuccgugaaccuccuggaagauaagcacaaugggaaacuuuguaagcugagaggaguugcuccccuccaucugggcaaaugcaacaucgccggguggauucugggaaauccugagugugaaucucucagcacagccuccucuuggagcuacaucguggagaccuccucuagcgacaacggcacgugcuauccgggggauuuuauugacuacgaagaacugcgggagcagcuuuccagcgucucuuccuucgaacgcuuugagaucuuccccaagaccagcucuuggccuaaucacgauuccaacaagggagugacagccgcuuguccccaugccggcgcgaaaucuuuuuauaagaaucugaucuggcucguuaaaaagggcaacagcuacccuaaacuguccaagagcuauauuaaugacaaggggaaagaagugcuuguccuguggggaauccaccaccccuccaccucugccgaucaacagagccucuaccagaacgcugacgccuacguguucgugggcacauccagauauagcaagaaauuuaagccugagauugcuauccggccgaaaguccgcgaucaggaggggagaaugaauuacuauuggacccugguugaacccggagacaagauuacguucgaggccacaggcaaccugguggugccucgguacgcguuugccaugguccgcaacgcugggucuggaaucauuaucuccgauacccccgugcaugacugcaauacaaccugucaaaccccuaaaggcgccaucaacacaagccuccccuuccagaauauucacccgaucacgauuggcaagugcccuaaguauguuaaaucuaccaagcugagacuugcuacagggcugcggaacgugcccagcauccagucccgcggacucuuuggcgccauugccggguucaucgaaggaggcuggaccgggauggucgacggaugguacggcuaucaucaccagaaugagcaaggcucuggguacgcugcggaucugaaaagcacacagaacgccaucgacgaaauuaccaauaaggugaacuccguuaucgagaaaaugaauacgcaguuuacagcugugggaaaggaguucaaccaccuugaaaagagaauggagaaucugaacaaaaaggucgaugacggcuuccucgauauuuggaccuacaaugccgaacugcuggugcuccuggagaacgaacggacccuugacuaucaugauagcaaugucaaaaaccuguacgagaaggugcgcucucagcucaaaaacaaugccaaggagaucgggaacggauguuuugaguucuaucacaagugcgacaauacauguauggaguccguuaaaaacggcaccuacgauuauccuaaguacagcgaagaggcuaaacugaauagagaagagauugacggggugaaacuugagucuacacggaucuaucaaauccuggccauuuacuccacggucgcgagcucccucgugcugguugugucucugggcgcuaucagcuuuuggaugugcuccaacggaucucuccagugccgcauuuguaucuga

SEQ ID NO: 201390 - RNA, 1701 nt, Artificial Sequence
  derived and/or modified CDS sequence (opt5) from hemagglutinin__InfluenzaA__AFN18570
augaaggccauccuggugguccuccuguacaccuucgcuacagccaacgcggacacgcuuugcauuggcuaucacgcuaauaacagcaccgauacaguugacaccgugcuggagaaaaaugugacagucacccauuccgugaaccuccuggaagauaagcacaaugggaaacuuuguaagcugagaggaguugcuccccuccaucugggcaaaugcaacaucgccggguggauucugggaaauccugagugugaaucucucagcacaguguccucuuggagcuacaucgucgagaccuccucuagcgacaacggcacgugcuauccgggggauuuuauugacuacgaagaacugcgggagcagcuuuccagcgugucuuccuucgaacgcuuugagaucuuccccaagaccagcucuuggccuaaucacgauuccaacaagggaguuacagccgccuguccccaugcuggcgccaagagcuuuuauaagaaucugaucuggcucgugaaaaagggcaacucuuacccuaaacuguccaagagcuauauuaaugacaaggggaaagaaguccuugugcuguggggaauccaccaccccuccaccucugcggaucaacagagccucuaccagaacgccgacgcuuacguguucgucggcacauccagauauagcaagaaauuuaagccugagauugccauccggccgaaaguucgcgaucaggaggggagaaugaauuacuauuggacccugguggaacccggagacaagauuacguucgaggcuacaggcaaccugguggucccucgguacgccuuugcgauggaacgcaacgccgggucuggaaucauuaucuccgauacccccgugcaugacugcaauacaaccugucaaaccccuaaaggcgcuaucaacacaagccuccccuuccagaauauucacccgaucacgauuggcaagugcccuaaguauguuaaaucuaccaagcugagacuugccacagggcugcggaacgugcccagcauccagucccgcggacucuuuggcgcuauugccggguucaucgagggaggcuggaccgggauggucgacggaugguacggcuaucaucaccagaaugaacaaggcucuggguacgccgcugaucugaaaagcacacagaacgcgaucgacgagauuaccaauaaggugaacuccguuaucgagaaaaugaauacgcaguuuacagccgugggaaaggaguucaaccaccuugagaagagaauugaaaaucugaacaaaaaggucgaugacggcuuccucgauaucuggaccuacaaugcugagcugcuggugcuccuggaaaacgagcggacccuugacuaucaugauagcaaugucaaaaaccuguacgagaaggugcgcucucagcucaaaaacaaugccaaggaaauugggaacggauguuuugaguucuaucacaagugcgacaauacauguauggaauccguuaaaaacggcaccuacgauuauccuaaguacagcgaggaagccaaacugaauagagaggagaucgacggggugaaacuugaaucuacacggaucuaucaaauucuggcuaucuacuccacggucgccagcucccucgugcugguugugucucugggcgcgauuagcuuuuggaugugcuccaacggaucucuccagugccgcaucuguauuuga

SEQ ID NO: 201391 - RNA, 1701 nt, Artificial Sequence; identical to SEQ ID NO: 194741
  derived and/or modified CDS sequence (opt5) from hemagglutinin__InfluenzaA__AFN18580

SEQ ID NO: 201392 - RNA, 1701 nt, Artificial Sequence; identical to SEQ ID NO: 194983
  derived and/or modified CDS sequence (opt5) from hemagglutinin__InfluenzaA__AFN18590

SEQ ID NO: 201393 - RNA, 1701 nt, Artificial Sequence
  derived and/or modified CDS sequence (opt5) from hemagglutinin__InfluenzaA__AFN18600
augaaggccauccuggugguccuccuguacaccuucgcuacagccaacgcggacacgcuuugcauuggcuaucacgcuaauaacagcaccgauacaguugacaccgugcuggagaagaaugugacagucacccauuccgugaaccuccuggaagauaagcacaaugggaaacuuuguaagcugagaggaguugcuccccuccaucugggcaaaugcaacaucgccggguggauucugggaaauccugagugugaaucucucagcacagccuccucuuggagcuacaucguggagaccuccucuagcgacaacggcacgugcuauccgggggauuuuauugacuacgaagaacugcgggagcagcuuuccagcgucucuuccuucgaacgcuuugagaucuuccccaagaccagcucuuggccuaaucacgauuccaacaagggagugacagccgcuuguccccaugccggcgcgaaaucuuuuuauaagaaucugaucuggcucguuaaaaagggcaacagcuacccuaaacuguccaagagcuauauuaaugacaaggggaaagaagugcuuguccuguggggaauccaccaccccuccaccucugccgaucaacagaaccucuaccagaaugcugacgccuacguguucgugggcacaagcagauauuccaagaaauuuaagccugagauugcuauccggccgaaaguccgcgaucaggaggggagaaugaacuacuauuggacccugguugaacccggagacaagauuacguucgaggccacaggcaaccugguggugccucgguacgcguuugccauggaacgcaaugcugggagcggaaucauuaucucugauacccccguccaugacugcaacacaaccugucaaaccccuaaaggcgccaucaauacaucccuccccuuccagaacauucacccgaucacgauuggcaagugcccuaaguaugugaaaagcaccaagcugagacuugcuacagggcugcggaauguucccucuauccagagccgcggacucuuuggcgccauugccggguucaucgagggaggcuggaccgggaugguggacggaugguacggcuaucaucaccagaacgaacaaggcuccggguacgcugcggaucugaaaucuacacagaaugccaucgacgagauuaccaacaaggucaauagcgugaucgagaaaaugaacacgcaguuuacagcuguuggaaaggaguucaaucaccuugagaagagaauugaaaaccugaauaaaaagguggaugacggcuuccucgauaucuggaccuacaacgccgagcugcugguccuccuggaaaaugagcggacccuugacuaucaugauuccaacgugaaaaaccuguacgagaagguccgcagccagcucaaaaauaacgccaaggaaauugggaauggauguuuugaguucuaucacaagugcgacaacgcuuguauggaaucugugaaaaauggcacauacgauuauccuaaguacuccgaggaagccaaacugaacagagaggagaucgacgggguuaaacuugaaagcacccggaucuaucaaauucuggcgaucuacucuacaguggcuuccagccucguccuggugguuucccugggcgccauuucuuuuuggaugugcagcaauggaucccuccagugccgcaucuguauuuga

SEQ ID NO: 201394 - RNA, 1701 nt, Artificial Sequence; identical to SEQ ID NO: 194741
  derived and/or modified CDS sequence (opt5) from hemagglutinin__InfluenzaA__AFN18610

SEQ ID NO: 201395 - RNA, 1701 nt, Artificial Sequence
  derived and/or modified CDS sequence (opt5) from hemagglutinin__InfluenzaA__AFN18617
augaaggccauccuggugguccuccuguacaccuucgcuacagccaacgcggacacgcuuugcauuggcuaucacgcuaauaacagcaccgauacaguugacaccgugcuggagaaaaaugugacagucacccauuccgugaaccuccuggaagauaagcacaaugggaaacuuuguaagcugagaggaguugcuccccuccaucugggcaaaugcaacaucgccggguggauucugggaaauccugagugugaaucucucagcacagccuccucuuggagcuacaucguggagaccuccucuagcgacaacggcacgugcuauccgggggauuuuauugacuacgaagaacugcgggagcagcuuuccagcgucucuuccuucgaacgcuuugagaucuuccccaagaccagcucuuggccuaaucacgauuccaacaagggagugacagccgcuuguccccaugccggcgcgaaaucuuuuuauaagaaucugaucuggcucguuaaaaagggcaacagcuacccuaaacuguccaagagcuauauuaaugacaaggggaaagaagugcuuguccuguggggaauccaccaccccuccaccucugccgaucaacagagccucuaccagaacgcugacgccuacguguucgugggcacauccagauauagcaagaaauuuaagccugagauugcuauccggccgaaaguccgcgaucaggaggggagaaugaauuacuauuggacccugguugaacccggagacaagauuacguucgaggccacaggcaaccugguggugccucgguacgcguuugccaugguccgcaacgcugggucuggaaucauuaucuccgauacccccgugcaugacugcaauacaaccugucaaaccccuaaaggcgccaucaacacaagccuccccuuccagaauauucacccgaucacgauuggcaagugcccuaaguauguuaaaucuaccaagcugagacuugcuacagggcugcggaacgugcccagcauccagucccgcggacucuuuggcgccauugccggguucaucgaaggaggcuggaccgggauggucgacggaugguacggcuaucaucaccagaaugagcaaggcucuggguacgcugcggaucugaaaagcacacaguccgccaucgacgaaauuaccaacaaggugaauagcguuaucgagaaaaugaacacgcaguuuacagcugugggaaaggaguucaaucaccuugaaaagagaauugagaaccugaauaaaaaggucgaugacggcuuccucgauaucuggaccuacaacgccgaacugcuggugcuccuggagaaugaacggacccuugacuaucaugauucuaacgucaaaaaucuguacgagaaggugcgcucccagcucaaaaacaacgccaaggagauugggaauggauguuuugaguucuaucacaagugcgacaacacauguauggagagcguuaaaaauggcaccuacgauuauccuaaguacucugaagaggcuaaacugaagagagaagagaucgacggggugaaacuugaguccacacggaucuaucaaauucuggccaucuacagcacggucgcguccucucucgugcugguugugagccugggcgcuauuuccuuuuggaugugcucuaacggaagccuccagugccgcaucuguauuuga

SEQ ID NO: 201396 - RNA, 1701 nt, Artificial Sequence; identical to SEQ ID NO: 195602
  derived and/or modified CDS sequence (opt5) from hemagglutinin__InfluenzaA__AFN18622

SEQ ID NO: 201397 - RNA, 1701 nt, Artificial Sequence; identical to SEQ ID NO: 194741
  derived and/or modified CDS sequence (opt5) from hemagglutinin__InfluenzaA__AFN18629

SEQ ID NO: 201398 - RNA, 1701 nt, Artificial Sequence; identical to SEQ ID NO: 194983
  derived and/or modified CDS sequence (opt5) from hemagglutinin__InfluenzaA__AFN18634

SEQ ID NO: 201399 - RNA, 1701 nt, Artificial Sequence
  derived and/or modified CDS sequence (opt5) from hemagglutinin__InfluenzaA__AFN18644
augaaggccauccuggugguccuccuguacaccuucgcuacagccaacgcggacacgcuuugcauuggcuaucacgcuaauaacagcaccgauacaguugacaccgugcuggagaagaaugugacagucacccauuccgugaaccuccuggaagauaagcacaaugggaaacuuuguaagcugagaggaguugcuccccuccaucugggcaaaugcaacaucgccggguggauucugggaaauccugagugugaaucucucagcacagccuccucuuggagcuacaucguggagaccuccucuagcgacaacggcacgugcuauccgggggauuuuauugacuacgaagaacugcgggagcagcuuuccagcgucucuuccuucgaacgcuuugagaucuuccccaagaccagcucuuggccuaaucacgauuccaacaagggagugacagccgcuuguccccaugccggcgcgaaaucuuuuuauaagaaucugaucuggcucguuaaaaagggcaacagcuacccuaaacuguccaagagcuauauuaaugacaaggggaaagaagugcuuguccuguggggaauccaccaccccuccaccucugccgaucaacagagccucuaccagaacgcugacgccuacguguucgugggcacauccagauauagcaagaaauuuaagccugagauugcuauccggccgaaaguccgcgaucaggaggggagaaugaauuacuauuggacccugguugaacccggagacaagauuacguucgaggccacaggcaaccugguggugccucgguacgcguuugccaugguccgcaacgcugggucuggaaucauuaucuccgauacccccgugcaugacugcaauacaaccugucaaaccccuaaaggcgccaucaacacaagccuccccuuccagaauauucacccgaucacgauuggcaagugcccuaaguauguuaaaucuaccaagcugagacuugcuacagggcugcggaacgugcccagcauccagucccgcggacucuuuggcgccauugccggguucaucgaaggaggcuggaccgggauggucgacggaugguacggcuaucaucaccagaaugagcaaggcucuggguacgcugcggaucugaaaagcacacaguccgccaucgacgaaauuaccaacaaggugaauagcguuaucgagaaagugaacacgcaguuuacagcugucggaaaggaguucaaucaccuugaaaagagaauugagaaccugaauaaaaagguggaugacggcuuccucgauaucuggaccuacaacgccgaacugcugguccuccuggagaaugaacggacccuugacuaucaugauucuaacgugaaaaaucuguacgagaagguucgcucccagcucaaaaacaacgccaaggagauugggaauggauguuuugaguucuaucacaagugcgacaacacauguauggagagcgugaaaaauggcaccuacgauuauccuaaguacucugaagaggcuaaacugaacagagaagagaucgacggggucaaacuugaguccacacggaucuaucaaauucuggccaucuacagcacgguggcguccucucucguucugguggucagccugggcgcuauuuccuuuuggaugugcucuaauggaagccuccagugccgcaucuguauuuga

SEQ ID NO: 201400 - RNA, 1701 nt, Artificial Sequence; identical to SEQ ID NO: 195602
  derived and/or modified CDS sequence (opt5) from hemagglutinin__InfluenzaA__AFN18654

SEQ ID NO: 201401 - RNA, 1701 nt, Artificial Sequence; identical to SEQ ID NO: 194741
  derived and/or modified CDS sequence (opt5) from hemagglutinin__InfluenzaA__AFN18664

SEQ ID NO: 201402 - RNA, 1701 nt, Artificial Sequence; identical to SEQ ID NO: 194983
  derived and/or modified CDS sequence (opt5) from hemagglutinin__InfluenzaA__AFN18674

SEQ ID NO: 201403 - RNA, 1701 nt, Artificial Sequence; identical to SEQ ID NO: 194741
  derived and/or modified CDS sequence (opt5) from hemagglutinin__InfluenzaA__AFN18684

SEQ ID NO: 201404 - RNA, 1701 nt, Artificial Sequence; identical to SEQ ID NO: 195602
  derived and/or modified CDS sequence (opt5) from hemagglutinin__InfluenzaA__AFN18694

SEQ ID NO: 201405 - RNA, 1701 nt, Artificial Sequence
  derived and/or modified CDS sequence (opt5) from hemagglutinin__InfluenzaA__AFN18704
augaaggccauccuggugguccuccuguacaccuucgcuacagccaacgcggacacgcuuugcauuggcuaucacgcuaauaacagcaccgauacaguugacaccgugcuggagaagaaugugacagucacccauuccgugaaccuccuggaagauaagcacaaugggaaacuuuguaagcugagaggaguugcuccccuccaucugggcaaaugcaacaucgccggguggauucugggaaauccugagugugaaucucucagcacagccuccucuuggagcuacaucguggagaccuccucuagcgacaacggcacgugcuauccgggggauuuuauugacuacgaagaacugcgggagcagcuuuccagcgucucuuccuucgaacgcuuugagaucuuccccaagaccagcucuuggccuaaucacgauuccaacaagggagugacagccgcuuguccccaugccggcgcgaaaucuuuuuauaagaaucugaucuggcucguuaaaaagggcaacagcuacccuaaacuguccaagagcuauauuaaugacaaggggaaagaagugcuuguccuguggggaauccaccaccccuccaccucugccgaucaacagagccucuaccagaacgcugacgccuacguguucgugggcacauccagauauagcaagaaauuuaagccugagauugcuauccggccgaaaguccgcgaucaggaggggagaaugaauuacuauuggacccugguugaacccggagacaagauuacguucgaggccacaggcaaccugguggugccucgguacgcguuugccaugguccgcaacgcugggucuggaaucauuaucuccgauacccccgugcaugacugcaauacaaccugucaaaccccuaaaggcgccaucaacacaagccuccccuuccagaauauucacccgaucacgauuggcaagugcccuaaguauguuaaaucuaccaagcugagacuugcuacagggcugcggaacgugcccagcauccagucccgcggacucuuuggcgccauugccggguucaucgaaggaggcuggaccgggauggucgacggaugguacggcuaucaucaccagaaugagcaaggcucuggguacgcugcggaucugaaaagcacacaguccgccaucgacgaaauuaccaacaaggugaauagcguuaucgagaaaaugaacacgcaguuuacagcugugggaaaggaguucaaucaccuugaaaagagaauugagaaccugaauaaaaaggucgaugacggcuuccucgauaucuggaccuacaacgccgaacugcuggugcuccuggagaaugaacggacccuugacuaucaugauucuaacgucaaaaaucuguacgagaaggugcgcucccagcucaaaaacaacgccaaggagauugggaauggauguuuugaguucuaucacaagugcgacaacacauguauggagagcguuaaaaauggcaccuacgauuauccuaaguacucugaagaggcuaaacugaacagagaagagaucgacggggugaaacuugaguccacacggaucuaucaaauucuggccaucuacagcacggucgcguccucucucgugcugguugugagccugggcgcuauuuccuuuuggaugugcucuaauggaagccuccagugccgcaucuguauuuga

SEQ ID NO: 201406 - RNA, 1701 nt, Artificial Sequence; identical to SEQ ID NO: 196975
  derived and/or modified CDS sequence (opt5) from hemagglutinin__InfluenzaA__AFN18714

SEQ ID NO: 201407 - RNA, 1701 nt, Artificial Sequence; identical to SEQ ID NO: 194741
  derived and/or modified CDS sequence (opt5) from hemagglutinin__InfluenzaA__AFN18721

SEQ ID NO: 201408 - RNA, 1701 nt, Artificial Sequence; identical to SEQ ID NO: 197407
  derived and/or modified CDS sequence (opt5) from hemagglutinin__InfluenzaA__AFN18725

SEQ ID NO: 201409 - RNA, 1701 nt, Artificial Sequence
  derived and/or modified CDS sequence (opt5) from hemagglutinin__InfluenzaA__AFN18735
augaaggccauccuggugguccuccuguacaccuucgcuacagccaacgcggacacgcuuugcauuggcuaucacgcuaauaacagcaccgauacaguugacaccgugcuggagaagaaugugacagucacccauuccgugaaccuccuggaagauaagcacaaugggaaacuuuguaagcugagaggaguugcuccccuccaucugggcaaaugcaacaucgccggguggauucugggaaauccugagugugaaucucucagcacagccuccucuuggagcuacaucguggagaccuccucuagcgacaacggcacgugcuauccgggggauuuuauugacuacgaagaacugcgggagcagcuuuccagcgucucuuccuucgaacgcuuugagaucuuccccaagaccagcucuuggccuaaucacgauuccaacaagggagugacagccgcuuguccccaugccggcgcgaaaucuuuuuauaagacccugaucuggcucguuaaaaagggcaauagcuacccuaaacuguccaagagcuauauuaacgacaaggggaaagaagugcuuguccuguggggaauccaccaccccuccacaucugccgaucaacagagccucuaccagaaugcugacgccuacguguucgugggcaccuccagauauagcaagaaauuuaagccugagauugcuauccggccgaaaguccgcgaucaggaggggagaaugaacuacuauuggacgcugguugaacccggagacaagauuacauucgaggccaccggcaaucugguggugccucgguacgcguuugccauggaacgcaacgcugggucuggaaucauuaucuccgauacacccguccaugacugcaacaccaccugucaaacaccuaaaggcgccaucaauacgagccuccccuuccagaacauucacccgaucaccauuggcaagugcccuaaguaugugaaaucuacaaagcugagacuugcuaccgggcugcggaauguucccagcauccagucccgcggacucuuuggcgccauugccggguucaucgagggaggcuggacagggaugguggacggaugguacggcuaucaucaccagaacgaacaaggcucuggguacgcugcggaucugaaaagcacccagaaugccaucgacgagauuacgaacaaggucaauuccgugaucgagaaaaugaacacacaguuuaccgcuguuggaaaggaguucaaucaccuugagaagagaauugaaaaccugaauaaaaagguggaugacggcuuccucgauaucuggaccuacaacgccgagcugcugguccuccuggaaaaugagcggacacuugacuaucaugauagcaacgugaaaaaucuguacgagaagguccgcucucagcucaaaaacaacgccaaggaaauugggaauggauguuuugaguucuaucacaagugcgacaacaccuguauggaauccgugaaaaauggcacauacgauuauccuaaguacagcgaggaagcuaaacugaacagagaggagaucgacgggguuaaacuugaaucuacgcggaucuaucaaauucuggccaucuacuccaccguggcgagcucccucguccuggugguuucucugggcgcuauuagcuuuuggaugugcuccaauggaucucuccagugccgcaucuguauuuga

SEQ ID NO: 201410 - RNA, 1701 nt, Artificial Sequence; identical to SEQ ID NO: 194741
  derived and/or modified CDS sequence (opt5) from hemagglutinin__InfluenzaA__AFN18742

SEQ ID NO: 201411 - RNA, 1701 nt, Artificial Sequence; identical to SEQ ID NO: 195843
  derived and/or modified CDS sequence (opt5) from hemagglutinin__InfluenzaA__AFN18747

SEQ ID NO: 201412 - RNA, 1701 nt, Artificial Sequence
  derived and/or modified CDS sequence (opt5) from hemagglutinin__InfluenzaA__AFN18757
augaaggccauccuggugguccuccuguacaccuucgcuacagccaacgcggacacgcuuugcauuggcuaucacgcuaauaacagcaccgauacaguugacaccgugcuggagaagaaugugacagucacccauuccgugaaccuccuggaagauaagcacaaugggaaacuuuguaagcugagaggaguugcuccccuccaucugggcaaaugcaacaucgccggguggauucugggaaauccugagugugaaucucucagcacagccuccucuuggagcuacaucguggagaccuccucuagcgacaacggcacgugcuauccgggggauuuuauugacuacgaagaacugcgggagcagcuuuccagcgucucuuccuucgaacgcuuugagaucuuccccaagaccagcucuuggccuaaucacgauuccaacaagggagugacagccgcuuguccccaugccggcgcgaaaucuuuuuauaagaaucugaucuggcucguuaaaaagggcaacagcuacccuaaacuguccaagagcuauauuaaugacaaggggaaagaagugcuuguccuguggggaauccaccaccccuccaccucugccgaucaacagagccucuaccagaacgcugacgccuacguguucgugggcacauccagauauagcaagaaauuuaagccugagauugcuauccggccgaaaguccgcgaucaggaggggagaaugaauuacuauuggacccugguugaacccggagacaagauuacguucgaggccacaggcaaccuggcggugccucgguacgccuuugcuauggaacgcaacgccgggucuggaaucauuaucuccgauacccccgugcaugacugcaauacaaccugucaaaccccuaaaggcgcuaucaacacaagccuccccuuccagaauauucacccgaucacgauuggcaagugcccuaaguaugucaaaucuaccaagcugagacuugccacagggcugcggaacgugcccagcauccagucccgcggacucuuuggcgccauugcuggguucaucgagggaggcuggaccgggaugguugacggaugguacggcuaucaucaccagaaugaacaaggcucuggguacgcggccgaucugaaaagcacacagaacgcuaucgacgagauuaccaauaaggugaacuccgucaucgagaaaaugaauacgcaguuuacagccgugggaaaggaguucaaccaccuugagaagagaauugaaaaucugaacaaaaagguugaugacggcuuccucgauaucuggaccuacaaugccgagcugcuggugcuccuggaaaacgagcggacccuugacuaucaugauagcaaugucaaaaaccuguacgagaaggugcgcucucagcucaaaaacaaugcuaaggaaauugggaacggauguuuugaguucuaucacaagugcgacaauacauguauggaauccgucaaaaacggcaccuacgauuauccuaaguacagcgaggaagccaaacugaauagagaggagaucgacggggugaaacuugaaucuacacggaucuaucaaauucuggcgaucuacuccacgguugcuagcucccucgugcuggucgugucucugggcgccauuagcuuuuggaugugcuccaacggaucucuccagugccgcaucuguauuuga

SEQ ID NO: 201413 - RNA, 1701 nt, Artificial Sequence; identical to SEQ ID NO: 194741
  derived and/or modified CDS sequence (opt5) from hemagglutinin__InfluenzaA__AFN18767

SEQ ID NO: 201414 - RNA, 1701 nt, Artificial Sequence; identical to SEQ ID NO: 201405
  derived and/or modified CDS sequence (opt5) from hemagglutinin__InfluenzaA__AFN18774

SEQ ID NO: 201415 - RNA, 1701 nt, Artificial Sequence; identical to SEQ ID NO: 194741
  derived and/or modified CDS sequence (opt5) from hemagglutinin__InfluenzaA__AFN18776

SEQ ID NO: 201416 - RNA, 1701 nt, Artificial Sequence; identical to SEQ ID NO: 195607
  derived and/or modified CDS sequence (opt5) from hemagglutinin__InfluenzaA__AFN18778

SEQ ID NO: 201417 - RNA, 1701 nt, Artificial Sequence; identical to SEQ ID NO: 194741
  derived and/or modified CDS sequence (opt5) from hemagglutinin__InfluenzaA__AFN18784

SEQ ID NO: 201418 - RNA, 1701 nt, Artificial Sequence; identical to SEQ ID NO: 195607
  derived and/or modified CDS sequence (opt5) from hemagglutinin__InfluenzaA__AFN18789

SEQ ID NO: 201419 - RNA, 1701 nt, Artificial Sequence; identical to SEQ ID NO: 194741
  derived and/or modified CDS sequence (opt5) from hemagglutinin__InfluenzaA__AFN18799

SEQ ID NO: 201420 - RNA, 1701 nt, Artificial Sequence; identical to SEQ ID NO: 194741
  derived and/or modified CDS sequence (opt5) from hemagglutinin__InfluenzaA__AFN18809

SEQ ID NO: 201421 - RNA, 1701 nt, Artificial Sequence; identical to SEQ ID NO: 195843
  derived and/or modified CDS sequence (opt5) from hemagglutinin__InfluenzaA__AFN18816

SEQ ID NO: 201422 - RNA, 1701 nt, Artificial Sequence; identical to SEQ ID NO: 194741
  derived and/or modified CDS sequence (opt5) from hemagglutinin__InfluenzaA__AFN18818

SEQ ID NO: 201423 - RNA, 1701 nt, Artificial Sequence
  derived and/or modified CDS sequence (opt5) from hemagglutinin__InfluenzaA__AFN18820
augaaggccauccuggugguccuccuguacaccuucgcuacagccaacgcggacacgcuuugcauuggcuaucacgcuaauaacagcaccgauacaguugacaccgugcuggagaaaaaugugacagucacccauuccgugaaccuccuggaagauaagcacaaugggaaacuuuguaagcugagaggaguugcgccccuccaucugggcaacugcaauaucgccggguggauucugggaaacccugagugugaaucucucagcacagcuuccucuuggagcuacaucguggagaccuccucuagcgacaauggcacgugcuauccgggggauuuuauugacuacgaagaacugcgggagcagcuuuccagcgucucuuccuucgaacgcuuugagaucuuccccaaaaccagcucuuggccuaaccacgauuccaauaagggagugacagccgcuuguccccaugccggcgccaagagcuuuuauaaaaaccugaucuggcucguuaagaaaggcaauucuuacccuaagcuguccaaaagcuauauuaacgacaaggggaaggaagugcuuguccuguggggaauccaccaccccuccaccucugccgaucaacagagccucuaccagaaugcugacgccuacguguucgugggcacauccagauauagcaaaaaguuuaaaccugagauugcuauccggccgaagguccgcgaucaggaggggagaaugaacuacuauuggacccugguugaacccggagacaaaauuacguucgaggccacaggcaaccugguggugccucgguacgcguuugccauggaacgcaaugcugggucuggaaucauuaucuccgauacccccguccaugacugcaacacaaccugucaaaccccuaagggcgccaucaauacaagccuccccuuccagaacauucacccgaucacgauuggcaaaugcccuaaguaugugaagucuaccaaacugagacuugcuacagggcugcggaauguucccagcauccagucccgcggacucuuuggcgccauugccggguucaucgagggaggcuggaccgggaugguggacggaugguacggcuaucaucaccagaacgaacaaggcucuggguacgcugcggaucuuaagagcacacagaaugccaucgacgagauuaccaacaaagucaauuccgugaucgagaagaugaacacgcaguuuacagcuguuggaaaagaguucaaucaccuggagaagagaauugaaaaccugaauaagaaaguggaugacggcuuccucgauaucuggaccuacaacgccgagcugcugguccuccuggaaaaugagcggacccuugacuaucaugauagcaacgugaagaaccuguacgagaaaguccgcucucagcucaagaauaacgccaaagaaauugggaauggauguuuugaguucuaucacaagugcgacaacacauguauggaauccgugaagaauggcaccuacgauuauccuaaauacagcgaggaagcuaagcugaacagagaggagaucgacgggguuaaacuugaaucuacacggaucuaucaaauucuggccaucuacuccacgguggcgagcucccucguccuggugguuucucugggcgcuauuagcuuuuggaugugcuccaauggaucucuccagugccgcaucuguauuuga

SEQ ID NO: 201424 - RNA, 1701 nt, Artificial Sequence; identical to SEQ ID NO: 194741
  derived and/or modified CDS sequence (opt5) from hemagglutinin__InfluenzaA__AFN18822

SEQ ID NO: 201425 - RNA, 1701 nt, Artificial Sequence
  derived and/or modified CDS sequence (opt5) from hemagglutinin__InfluenzaA__AFN18824
augaaggccauccuggugguccuccuguacaccuucgcuacagccaacgcggacacgcuuugcauuggcuaucacgcuaauaacagcaccgauacaguugacaccgugcuggagaaaaaugugacagucacccauuccgugaaccuccuggaagauaagcacaaugggaaacuuuguaagcugagaggaguugcuccccuccaucugggcaaaugcaacaucgccggguggauucugggaaauccugagugugaaucucucagcacagccuccucuuggagcuacaucguggagaccuccucuagcgacaacggcacgugcuauccgggggauuuuauugacuacgaagaacugcgggagcagcuuuccagcgucucuuccuucgaacgcuuugagaucuuccccaagaccagcucuuggccuaaucacgauuccaacaagggagugacagccgcuuguccccaugccggcgcgaaaucuuuuuauaagaaucugaucuggcucguuaaaaagggcaacagcuacccuaaacuguccaagagcuauauuaaugacaaggggaaagaagugcuuguccuguggggaauccaccaccccuccaccucugccgaucaacagagccucuaccagaacgcugacgccuacguguucgugggcacauccagauauagcaagaaauuuaagccugagauugcuauccggccgaaaguccgcgaucaggaggggagaaugaauuacuauuggacccugguugaacccggagacaagauuacguucgaggccacaggcaaccugguggugccucgguacgcguuugccauggaacgcaacgcugggucuggaaucauuaucuccgauacccccguccaugacugcaauacaaccugucaaaccccuaaaggcgccaucaacacaagccuccccuuccagaauauucacccgaucacgauuggcaagugcccuaaguaugugaaaucuaccaagcugagacuugcuacagggcugcggaacguucccagcauccagucccgcggacucuuuggcgccauugccggguucaucgagggaggcuggaccgggaugguggacggaugguacggcuaucaucaccagaaugaacaaggcucuggguacgcugcggaucugaaaagcacacagaacgccaucgacgagauuaccaauaaggucaacuccgugaucgagaaaaugaauacgcaguuuacagcuguuggaaaggaguucaaccaccuugagaagagaauugaaaaucugaacaaaaagguggaugacggcuuccucgauaucuggaccuacaaugccgagcugcugguccuccuggaaaacgagcggacccuugacuaucaugauagcaaugugaaaaaccuguacgagaagguccgcucucagcucaaaaacaaugccaaggaaauugggaacggauguuuugaguucuaucacaagugcgacaauacauguauggaauccgugaaaaacggcaccuacgauuauccuaaguacagcgaggaagcuaaacugaauagagaggagaucgacgggguucggcuugaaucuacacgcaucuaucaaauucuggccaucuacuccacgguggcgagcucccucguccuggugguuucucugggcgcuauuagcuuuuggaugugcuccaacggaucucuccagugcagaaucuguauuuga

SEQ ID NO: 201426 - RNA, 1701 nt, Artificial Sequence; identical to SEQ ID NO: 201349
  derived and/or modified CDS sequence (opt5) from hemagglutinin__InfluenzaA__AFN18826

SEQ ID NO: 201427 - RNA, 1701 nt, Artificial Sequence
  derived and/or modified CDS sequence (opt5) from hemagglutinin__InfluenzaA__AFN18828
augaaggccauccuggugguccuccuguacaccuucgcuacagccaacgcggacacgcuuugcauuggcuaucacgcuaauaacagcaccgauacaguugacaccgugcuggagaagaaugugacagucacccauuccgugaaccuccuggaagauaagcacaaugggaaacuuuguaagcugagaggaguugcuccccuccaucugggcaaaugcaacaucgccggguggauucugggaaauccugagugugaaucucucagcacagccuccucuuggagcuacaucguggagaccuccucuagcgacaacggcacgugcuauccgggggauuuuauugacuacgaagaacugcgggagcagcuuuccagcgucucuuccuucgaacgcuuugagaucuuccccaagaccagcucuuggccuaaucacgauuccaacaagggagugacagccgcuuguccccaugccggcgcgaaaucuuuuuauaagaaucugaucuggcucguuaaaaagggcaacagcuacccuaaacuguccaagagcuauauuaaugacaaggggaaagaagugcuuguccuguggggaauccaccaccccuccaccucugccgaucaacagagccucuaccagaacgcugacgccuacguguucgugggcacauccagauauagcaagaaauuuaagccugagauugcuauccggccgaaaguccgcgaucaggaggggagaaugaauuacuauuggacccugguugaacccggagacaagauuacguucgaggccacaggcaaccugguggugccucgguacgcguuugccauggaacgcaacgcugggucuggaaucauuaucuccgauacccccguccaugacugcaauacaaccugucaaaccccuaaaggcgccaucaacacaagccuccccuuccagaauauucacccgaucacgauuggcaagugcccuaaguaugugaaaucuaucaagcugagacuugcuaccgggcugcggaacguucccagcauucagucccgcggacucuuuggcgccaucgccggguucaucgagggaggcuggacagggaugguggacggaugguacggcuaucaucaccagaaugaacaaggcucuggguacgcugcggaucugaaaagcacccagaacgccauugacgagaucacaaauaaggucaacuccgugauugagaaaaugaauacccaguuuacggcuguuggaaaggaguucaaccaccuugagaagagaaucgaaaaucugaacaaaaagguggaugacggcuuccucgauauuuggacauacaaugccgagcugcugguccuccuggaaaacgagcggacccuugacuaucaugauagcaaugugaaaaaccuguacgagaagguccgcucucagcucaaaaacaaugccaaggaaaucgggaacggauguuuugaguucuaucacaagugcgacaauaccuguauggaauccgugaaaaacggcacauacgauuauccuaaguacagcgaggaagcuaaacugaauagagaggagaucgacgggguuaaacuugaaucuacccggauuuaucaaauccuggccauuuacuccacaguggcgagcucccucguccuggugguuucucugggcgcuaucagcuuuuggaugugcuccaacggaucucuccagugccgcauuuguaucuga

SEQ ID NO: 201428 - RNA, 1701 nt, Artificial Sequence; identical to SEQ ID NO: 201412
  derived and/or modified CDS sequence (opt5) from hemagglutinin__InfluenzaA__AFN18830

SEQ ID NO: 201429 - RNA, 1701 nt, Artificial Sequence; identical to SEQ ID NO: 194741
  derived and/or modified CDS sequence (opt5) from hemagglutinin__InfluenzaA__AFN18832

SEQ ID NO: 201430 - RNA, 1701 nt, Artificial Sequence; identical to SEQ ID NO: 195607
  derived and/or modified CDS sequence (opt5) from hemagglutinin__InfluenzaA__AFN18834

SEQ ID NO: 201431 - RNA, 1701 nt, Artificial Sequence
  derived and/or modified CDS sequence (opt5) from hemagglutinin__InfluenzaA__AFN18849
augaaggccauccuggugguccuccuguacaccuucgcuacagccaacgcggacacgcuuugcauuggcuaucacgcuaauaacagcaccgauacaguugacaccgugcuggagaagaaugugacagucacccauuccgugaaccuccuggaagauaagcacaaugggaaacuuuguaagcugagaggaguugcuccccuccaucugggcaaaugcaacaucgccggguggauucugggaaauccugagugugaaucucucagcacagccuccucuuggagcuacaucguggagaccuccucuagcgacaacggcacgugcuauccgggggauuuuauugacuacgaagaacugcgggagcagcuuuccagcgucucuuccuucgaacgcuuugagaucuuccccaagaccagcucuuggccuaaucacgauuccaacaagggagugacagccgcuuguccccaugccggcgcgaaaucuuuuuauaagaaucugaucuggcucguuaaaaagggcaacagcuacccuaaacuguccaagagcuauauuaaugacaaggggaaagaagugcuuguccuguggggaauccaccaccccuccaccucugccgaucaacagagccucuaccagaacguggacgcuuacguguucgucggcacauccagauauagcaagaaauuuaagccugagauugccauccggccgaaaguucgcgaucaggaggggagaaugaauuacuauuggacccugguggaacccggagacaagauuacguucgaggcuacaggcaaccugguggucccucgguacgccuuugcgauggaacgcaacgccgggucuggaaucauuaucuccgauacccccgugcaugacugcaauacaaccugucaaaccccuaaaggcgcuaucaacacaagccuccccuuccagaauauucacccgaucacgauuggcaagugcccuaaguauguuaaaucuaccaagcugagacuugccacagggcugcggaacgugcccagcauccagucccgcggacucuuuggcgcuauugccggguucaucgagggaggcuggaccgggauggucgacggaugguacggcuaucaucaccagaaugaacaaggcucuggguacgccgcugaucugaaaagcacacagaacgcgaucgacgagauuaccaauaaggugaacuccguuaucgagaaaaugaauacgcaguuuacagccgugggaaaggaguucaaccaccuugagaagagaauugaaaaucugaacaaaaaggucgaugacggcuuccucgauaucuggaccuacaaugcugagcugcuggugcuccuggaaaacgagcggacccuugacuaucaugauagcaaugucaaaaaccuguacgagaaggugcgcucucagcucaaaaacaaugccaaggaaauugggaacggauguuuugaguucuaucacaagugcgacaauacauguauggaauccguuaaaaacggcaccuacgauuauccuaaguacagcgaggaagccaaacugaauagagaggagaucgacggggugaaacuugaaucuacacggaucuaucaaauucuggcuaucuacuccacggucgccagcucccucgugcugguugugucucugggcgcgauuagcuuuuggaugugcuccaacggaucucuccagugccgcaucuguauuuga

SEQ ID NO: 201432 - RNA, 1701 nt, Artificial Sequence
  derived and/or modified CDS sequence (opt5) from hemagglutinin__InfluenzaA__AFN18856
augaaggccauccuggugguccuccuguacaccuucgcuacagccaacgcggacacgcuuugcauuggcuaucacgcuaauaacagcaccgauacaguugacaccgugcuggagaagaaugugacagucacccauuccgugaaccuccuggaaaauaagcacaacgggaaacuuuguaagcugagaggaguugcuccccuccaucugggcaaaugcaauaucgccggguggauucugggaaacccugagugugaaucucucagcacagccuccucuuggagcuacaucguggagaccuccucuagcgauaauggcacgugcuauccgggggacuuuauugauuacgaagaacugcgggagcagcuuuccagcgucucuuccuucgaacgcuuugagaucuuccccaagaccagcucuuggccuaaccacgacuccaauaagggagugacagccgcuuguccccaugccggcgcgaaaucuuuuuauaagaaccugaucuggcucguuaaaaagggcaauagcuacccuaaacuguccaagagcuauauuaacgauaaggggaaagaagugcuuguccuguggggaauccaccaccccuccaccucugccgaccaacagagccucuaccagaaugcugaugccuacguguucgugggcacauccagauauagcaagaaauuuaagccugagauugcuauccggccgaaaguccgcgaccaggaggggagaaugaacuacuauuggacccugguugaacccggagauaagauuacguucgaggccacaggcaaccugguggugccucgguacgcguuugccauggaacgcaaugcugggucuggaaucauuaucuccgacacccccguccaugauugcaacacaaccugucaaaccccuaaaggcgccaucaauacaagccuccccuuccagaacauucacccgaucacgauuggcaagugcccuaaguaugugaaaucuaccaagcugagacuugcuacagggcugcggaauguucccagcauccagucccgcggacucuuuggcgccauugccggguucaucgagggaggcuggaccgggaugguggacggaugguacggcuaucaucaccagaacgaacaaggcucuggguacgcugcggaccugaaaagcacacagaaugccaucgaugagauuaccaacaaggucaauuccgugaucgagaaaaugaacacgcaguuuacagcuguuggaaaggaguucaaucaccuugagaagagaauugaaaaccugaauaaaaagguggacgauggcuuccucgacaucuggaccuacaacgccgagcugcugguccuccuggaaaaugagcggacccuugauuaucaugacagcaacgugaaaaaccuguacgagaagguccgcucucagcucaaaaauaacgccaaggaaauugggaauggauguuuugaguucuaucacaagugcgauaacacauguauggaauccgugaaaaauggcaccuacgacuauccuaaguacagcgaggaagcuaaacugaacagagaggagaucgaugggguuaaacuugaaucuacacggaucuaucaaauucuggccaucuacuccacgguggcgagcucccucguccuggugguuucucugggcgcuauuagcuuuuggaugugcuccaauggaucucuccagugccgcaucuguauuuga

SEQ ID NO: 201433 - RNA, 1701 nt, Artificial Sequence; identical to SEQ ID NO: 195602
  derived and/or modified CDS sequence (opt5) from hemagglutinin__InfluenzaA__AFN18858

SEQ ID NO: 201434 - RNA, 1701 nt, Artificial Sequence
  derived and/or modified CDS sequence (opt5) from hemagglutinin__InfluenzaA__AFN18860
augaaggccauccuggugguccuccuguacaccuucgcuacagccaacgcggacacgcuuugcauuggcuaucacgcuaauaacagcaccgauacaguugacaccgugcuggagaagaaugugacagucacccauuccgugaaccuccuggaagauaagcacaaugggaaacuuuguaagcugagaggaguugcuccccuccaucugggcaaaugcaacaucgccggguggauucugggaaauccugagugugaaucucucagcacagccuccucuuggagcuacaucguggagaccuccucuagcgacaacggcacgugcuauccgggggauuuuauugacuacgaagaacugcgggagcagcuuuccagcgucucuuccuucgaacgcuuugagaucuuccccaagaccagcucuuggccuaaucacgauuccaacaagggagugacagccgcuuguagccaugccggcgcgaaaucuuuuuauaagaaucugaucuggcucguuaaaaagggcaacuccuaccccaaacugagcaaguccuauauuaaugacaaggggaaagaagugcuuguccuguggggaauccaccacccuucuaccagcgccgaucaacagucccucuaccagaacgcugacgccuacguguucgugggcacaagcagauauucuaagaaauuuaagcccgagauugcuauccggccuaaaguccgcgaucaggaggggagaauggacuacuauuggacccugguugaaccgggagauaagauuacguucgaggccacaggcaaucugguggugccccgguacgcguuugccauggaacgcaacgcuggguccggaaucauuaucagcgacaccccuguccaugacugcaacacaaccugucaaacccccaaaggcgccaucaauacaucucucccuuuccagaacauucaccccaucacgauuggcaagugcccgaaguaugugaaaagcaccaagcugagacuugcuacagggcugcggaauguuccuuccauccagucucgcggacucuuuggcgccauugccggguucaucgagggaggcuggaccgggaugguggauggaugguacggcuaucaucaccagaacgaacaaggcagcggguacgcugcggaccugaaauccacacagaaugccaucgaugagauuaccaacaaggucaauagcgugaucgagaaaaugaacacgcaguuuacagcuguuggaaaggaguucaaucaccuugagaagagaauugaaaaccugaauaaaaagguggacgauggcuuccucgacaucuggaccuacaacgccgagcugcugguccuccuggaaaaugagcggacccuugauuaucaugacucuaacgugaaaaaucuguacgagaagguccgcucccagcucaaaaacaacgccaaggaaauugggaauggauguuuugaguucuaucacaagugcgauaacacauguauggaaagcgugaaaaauggcaccuacgacuaucccaaguacucugaggaagcuaaacugaacagagaggagaucgaugggguuaaacuugaauccacacggaucuaucaaauucuggccaucuacagcacgguggcguccucucucguccuggugguuagccugggcgcuauuuccuuuuggaugugcucuaauggaagccuccagugccgcaucuguauuuga

SEQ ID NO: 201435 - RNA, 1701 nt, Artificial Sequence
  derived and/or modified CDS sequence (opt5) from hemagglutinin__InfluenzaA__AFN18865
augaaggccauccuggugguccuccuguacaccuucgcuacagccaacgcggacacgcuuugcauuggcuaucacgcuaauaacagcaccgauacaguugacaccgugcuggagaaaaaugugacagucacccauuccgugaaccuccuggaagauaagcacaaugggaaacuuuguaagcugagaggaguugcuccccuccaucugggcaaaugcaacaucgccggguggauucugggaaauccugagugugaaucucucagcacagccuccucuuggagcuacaucguggagaccuccucuagcgacaacggcacgugcuauccgggggauuuuauugacuacgaagaacugcgggagcagcuuuccagcgucucuuccuucgaacgcuuugagaucuuccccaagaccagcucuuggccuaaucacgauuccaacaagggagugacagccgcuuguccccaugccggcgcgaaaucuuuuuauaagaaucugaucuggcucguuaaaaagggcaacagcuacccuaaacuguccaagagcuauauuaaugacaaggggaaagaagugcuuguccuguggggaauccaccaccccuccaccucugccgaucaacagagccucuaccagaacgcugacgccuacguguucgugggcacauccagauauagcaagaaauuuaagccugagauugcuauccggccgaaaguccgcgaucaggaggggagaaugaauuacuauuggacccugguugaacccggagacaagauuacguucgaggccacaggcaaccugguggugccucgguacgcguuugccauggaacgcaacgcugggucuggaaucauuaucuccgauaccagcguccaugacugcaauacaaccugucaaacccccaaaggcgccaucaacacaucucucccuuuccagaauauucaccccaucacgauuggcaagugcccgaaguaugugaaaagcaccaagcugagacuugcuacagggcugcggaacguuccuuccauccagucucgcggacucuuuggcgccauugccggguucaucgagggaggcuggaccgggaugguggacggaugguacggcuaucaucaccagaaugaacaaggcagcggguacgcugcggaucugaaauccacacagaacgccaucgacaagauuaccaauaaagucaacagcgugaucgagaagaugaauacgcaguuuacagcuguuggaaaggaguucaaccaccuugagaaaagaauugagaaucugaacaagaaaguggaugacggcuuccucgauaucuggaccuacaaugccgaacugcugguccuccuggagaacgaacggacccuugacuaucaugauucuaaugugaagaaccuguacgagaaaguccgcucccagcucaagaacaaugccaaggagauugggaacggauguuuugaguucuaucacaaaugcgacaauacauguauggaaagcgugaagaacggcaccuacgauuaucccaaauacucugaagaggcuaagcugaauagagaagagaucgacgggguuaaacuugaguccacacggaucuaucaaauucuggccaucuacagcacgguggcguccucucucguccuggugguuagccugggcgcuauuuccuuuuggaugugcucuaacggaagccuccagugccgcaucuguauuuga

SEQ ID NO: 201436 - RNA, 1701 nt, Artificial Sequence
  derived and/or modified CDS sequence (opt5) from hemagglutinin__InfluenzaA__AFN18875
auggaggccauccuggugguccuccuguacaccuucgcuacagccaacgcggacacgcuuugcauuggcuaucacgcuaauaacagcaccgauacaguugacaccgugcuggaaaagaaugugacagucacccauuccgugaaccuccuggaggauaaacacaaugggaaacuuuguaagcugagaggaguugcgccccuccaucugggcaagugcaacaucgccggguggauucugggaaauccugaaugugagucucucagcacagcuuccucuuggagcuacaucguggaaaccuccucuagcgacaacggcacgugcuauccgggggauuuuauugacuacgaggagcugcgggaacagcuuuccagcgucucuuccuucgagcgcuuugaaaucuuccccaaaaccagcucuuggccuaaucacgauuccaacaagggagugacagccgcuuguccccaugccggcgccaagagcuuuuauaaaaaucugaucuggcucguuaagaaaggcaacucuuacccuaagcuguccaaaagcuauauuaaugacaaggggaaggaggugcuuguccuguggggaauccaccaccccuccaccucugccgcucaacagagccucuaccagaacgccgaugcuuacguguucgugggcuccagcagauauucuaaaaaguuuaaaccugagauugccauccggccgaagguccgcgaccaggaagggagaaugaauuacuauuggacacugguugagcccggagauaaaauuaccuucgaagcgacgggcaaccugguggugccucgguacgccuuugcuauggagcgcaacgccggguccggaaucauuaucagcgacacacccguccaugauugcaauaccacaugucaaaccccuaagggcgcuaucaacaccucucuccccuuccacaauauucauccgaucacaauuggcaaaugcccuaaguauguuaagagcacgaaacugagacuugccaccgggcugcggaacgugcccuccauccagucucgcggacucuuuggcgccauugcuggguucaucgaaggaggcuggacagggaugguggacggaugguacggcuaucaccaccagaaugagcagggcagcggguacgcggccgaccugaaguccacccaaaacgcuaucgaugagauuacaaauaaagucaacagcgugaucgaaaagaugaauacccaguuuacggccguuggaaaagaguucaaccaucuugaaaagagaauugagaaucugaacaagaaaguggacgauggcuuccucgacaucuggacauacaaugccgaacugcugguccuccuggagaacgagcggacccuugauuaucacgacucuaaugugaagaaccuguacgaaaaaguccgcucccagcucaagaacaaugcuaaagagauugggaacggauguuuugaguucuaucauaagugcgauaauaccuguauggaaagcgugaagaacggcacauacgacuauccuaaauacucugaagaggccaagcugaauagagaggaaaucgaugggguuaaacuugaguccacccggaucuaucagauucuggcgaucuacagcacaguggcuuccucucucguccuggugguuagccugggcgccauuuccuuuuggaugugcucuaacggaagccuccaaugccgcaucuguauuuga

SEQ ID NO: 201437 - RNA, 1701 nt, Artificial Sequence
  derived and/or modified CDS sequence (opt5) from hemagglutinin__InfluenzaA__AFN18885
augaaggccauccugauugugcuccuguacaccuucgcuacagccaacgcggacacgcuuugcaucggcuaucacgcuaauaacagcaccgauacagucgacaccguucuggagaaaaaugugacagugacccauuccgucaaccuccuggaagauaagcacaaugggaaacuuuguaagcugagaggaguggcuccccuccaucugggcaaaugcaacauugccggguggauccugggaaauccugagugugaaucucucagcacagccuccucuuggagcuacauuguugagaccuccucuagcgacaacggcacgugcuauccgggggauuuuaucgacuacgaagaacugcgggagcagcuuuccagcgugucuuccuucgaacgcuuugagaucuuccccaagaccagcucuuggccuaaucacgauuccaacaagggagucacagccgcuuguccccaugccggcgcgaaaucuuuuuauaagaaucugauuuggcucgugaaaaagggcaacagcuacccuaaacuguccaagagcuauaucaaugacaaggggaaagaaguucuugugcuguggggcauucaccaccccuccaccucugccgaucaacagagccucuaccagaacgcugacgccuacgucuucgugggaacauccagauauagcaagaaauuuaagccugagaucgcuauucggccgaaagugcgcgaucaggaggggagaaugaauuacuauuggacccuggucgaacccggagacaagaucacguucgaggccacaggcaaccugguugugccucgguacgcguuugccauggaacgcaacgcugggucuggaauuaucaucuccgauacccccgugcaugacugcaauacaaccugucaaaccccuaaaggcgccauuaacacaaaucuccccuuccagaacauccacccgauuacgaucggcaagugcccuaaguaugucaaaagcaccaagcugagacuugcuacagggcugcggaaugugcccucuacccagagccgcggacucuuuggcgccauugccggguucaucgagggaggcuggacagggaugguugacggaugguacggcuaucaucaccagaacgaacaaggcuccggguacgcugcggaucugaaaucuacccagaaugccaucgacgagauuacgaacaaggugaauagcgucaucgagaaaaugaacacacaguuuaccgcugugggaaaggaguucaaucaccuugagaagagaauugaaaaccugaauaaaaagguugaugacggcuuccucgauaucuggaccuacaacgccgagcugcuggugcuccuggaaaaugagcggacacuugacuaucaugauuccaacgucaaaaaccuguacgagaaggugcgcagccagcucaaaaauaacgccaaggaaauugggaauggauguuuugaguucuaucacaagugcgacaacaccuguauggaaucugucaaaaauggcacauacgauuauccuaaguacuccgaggaagcuaaacugaacagagaggagaucgacggggugaaacuugaaagcacgcggaucuaucaaauucuggccaucuacucuaccguugcguccagccucgugcuggucgugucccugggcgcuauuucuuuuuggaugugcagcaauggaucccuccagugcaagaucuguauuuga

SEQ ID NO: 201438 - RNA, 1701 nt, Artificial Sequence; identical to SEQ ID NO: 194741
  derived and/or modified CDS sequence (opt5) from hemagglutinin__InfluenzaA__AFN18892

SEQ ID NO: 201439 - RNA, 1701 nt, Artificial Sequence; identical to SEQ ID NO: 194983
  derived and/or modified CDS sequence (opt5) from hemagglutinin__InfluenzaA__AFN18894

SEQ ID NO: 201440 - RNA, 1701 nt, Artificial Sequence; identical to SEQ ID NO: 201405
  derived and/or modified CDS sequence (opt5) from hemagglutinin__InfluenzaA__AFN18903

SEQ ID NO: 201441 - RNA, 1701 nt, Artificial Sequence; identical to SEQ ID NO: 195843
  derived and/or modified CDS sequence (opt5) from hemagglutinin__InfluenzaA__AFN18910

SEQ ID NO: 201442 - RNA, 1701 nt, Artificial Sequence
  derived and/or modified CDS sequence (opt5) from hemagglutinin__InfluenzaA__AFN18912
auggaggccauccuggugguccuccuguacaccuucgcuacagccaacgcggacacgcuuugcauuggcuaucacgcuaauaacagcaccgauacaguugacaccgugcuggaaaagaaugugacagucacccauuccgugaaccuccuggaggauaaacacaaugggaagcuguguaaacugagaggaguugcgccccuccaucugggcaagugcaacaucgccggguggauucugggaaauccugaaugugagucucucagcacagcuuccucuuggagcuacaucguggaaaccuccucuagcgacaacggcacgugcuauccgggggauuuuauugacuacgaggagcugcgggaacagcuuuccagcgucucuuccuucgagcgcuuugaaaucuuccccaaaaccagcucuuggccuaaucacgauuccaacaagggagugacagccgcuuguccccaugccggcgccaagagcuuuuauaaaaaucugaucuggcucguuaagaaaggcaacucuuacccuaagcuguccaaaagcuauauuaaugacaaggggaaggaggugcuuguccuguggggaauccaccaccccuccaccucugccgaucaacagagccucuaccagaacgcugacgccuacguguucgugggcuccagcagauauucuaaaaaguuuaaaccugagauugcuauccggccgaagguccgcgaucaggaagggagaaugaauuacuauuggacacugguugagcccggagacaaaauuaccuucgaagccacgggcaaccugguggugccucgguacgcguuugccauggagcgcaacgcuggguccggaaucauuaucagcgauacaucuguccaugacugcaauaccacaugucaaacccccaagggcgccaucaacaccagccucccuuuccacaauauucaucccaucacaauuggcaaaugcccgaaguaugugaaguccacgaaacugagacuugcuaccgggcugcggaacguuccuucuauccagagccgcggacucuuuggcgccauugccggguucaucgaaggaggcuggacagggaugguggacggaugguacggcuaucaccaccagaaugagcagggcuccggguacgcugcggaucuuaagagcacccaaaacgccaucgacgagauuacaaauaaagucaacucugugaucgaaaagaugaauacccaguuuacggcuguuggaaaagaguucaaccaucuugaaaagagaauugagaaucugaacaagaaaguggaugacggcuuccucgauaucuggacauacaaugccgaacugcugguccuccuggagaacgagcggacccuugacuaucacgauuccaaugugaagaaccuguacgaaaaaguccgcagccagcucaagaacaaugccaaagagauugggaacggauguuuugaguucuaucauaagugcgacaauaccuguauggaaucugugaagaacggcacauacgauuaucccaaauacuccgaagaggcuaagcugaauagagaggaaaucgacgggguuaaacuugagagcacccggaucuaucagauucuggccaucuacuccacaguggcgucuagccucguccuggugguuucccugggcgcuauuucuuuuuggaugugcagcaacggaucccuccaaugccgcaucuguauuuga

SEQ ID NO: 201443 - RNA, 1701 nt, Artificial Sequence; identical to SEQ ID NO: 195843
  derived and/or modified CDS sequence (opt5) from hemagglutinin__InfluenzaA__AFN18917

SEQ ID NO: 201444 - RNA, 1701 nt, Artificial Sequence; identical to SEQ ID NO: 194741
  derived and/or modified CDS sequence (opt5) from hemagglutinin__InfluenzaA__AFN18927

SEQ ID NO: 201445 - RNA, 1701 nt, Artificial Sequence; identical to SEQ ID NO: 197407
  derived and/or modified CDS sequence (opt5) from hemagglutinin__InfluenzaA__AFN18937

SEQ ID NO: 201446 - RNA, 1701 nt, Artificial Sequence
  derived and/or modified CDS sequence (opt5) from hemagglutinin__InfluenzaA__AFN18952
augaaggccauccuggugguccuccuguacaccuucgcuacagccaacgcggacacgcuuugcauuggcuaucacgcuaauaacagcaccgauacaguugacaccgugcuggagaaaaaugugacagucacccauuccgugaacauccucgaagauaagcacaauagaaaacuguguaaacuucgcgggguugcuccccugcaucucggaaagugcaacauugccggcuggauccuggggaauccugagugugaaucucugagcacagccuccucuuggagcuacauuguggagaccuccucuagcgacaacggaacgugcuauccgggcgauuuuaucgacuacgaggagcuccgggagcagcuguccagcgucucuuccuucgaaagauuugagaucuuccccaagaccagcucuuggccuaaucacgauuccaacaagggggugacagccgcuuguccccaugccggagcgaaaucuuuuuauaagaaucuuauuuggcugguuaaaaagggcaacagcuacccuaaacucuccaagagcuauaucaaugacaagggcaaagaagugcugguccuuugggggauucaccaccccuccaccucugccgaucaacagagccuguaccagaacgcugacgccuacguguucgugggaacaucccgguauagcaagaaauuuaagccugagaucgcuauucgcccgaaagucagagaucaggagggccggaugaauuacuauuggacccucguugaacccggggacaagaucacguucgaggccacaggaaaccugguggugccucgcuacgcguuugccauggaaagaaacgcuggcucugggauuaucaucuccgauacccccguccaugacugcaauacaaccugucaaaccccuaaaggagccauuaacacaagccugcccuuccagaauauccacccgauuacgaucggcaagugcccuaaguaugugaaaucuaccaagcuccggcuggcuacaggccuucgcaacguucccagcauucaguccagagggcuguuuggagccaucgccggcuucaucgaagggggauggaccggcaugguggacgggugguacggauaucaucaccagaaugaacaaggcucuggcuacgcugcggaucucaaaagcacacagaacgccauugacgagaucaccaauaaggucaacuccgugauugagaaaaugaauacgcaguuuacagcuguugggaaggaguucaaccaccuggaaaagcggaucgaaaaucuuaacaaaaagguggaugacggauuccuggauauuuggaccuacaaugccgagcuccugguccugcucgaaaacgagcgcacccuggacuaucaugauagcaaugugaaaaaccuuuacgagaaggucagaucucagcugaaaaacaaugccaaggaaaucggcaacggguguuuugaguucuaucacaagugcgacaauacauguauggaauccgugaaaaacggaaccuacgauuauccuaaguacagcgaggaagcuaaacucaaucgggagaagaucgacggcguuaaacuggagucuacacgcauuuaucaaauccuugccauuuacuccacgguggcgagcucccugguccucgugguuucucugggggcuaucagcuuuuggaugugcuccaacggcucucugcagugcagaauuuguaucuga

SEQ ID NO: 201447 - RNA, 1701 nt, Artificial Sequence
  derived and/or modified CDS sequence (opt5) from hemagglutinin__InfluenzaA__AFN18957
augaaggccauccuggugguccuccuguacaccuucgcuacagccaacgcggacacgcuuugcauuggcuaucacgcuaauaacagcaccgauacaguugacaccgugcuggagaaaaaugugacagucacccauuccgugaaccuccuggaagauaaucacaacgggaagcuguguaaacugagaggaguugcgccccuccaucugggcaagugcaauaucgccggguggauucugggaaacccugagugugaaucucucagcacagcuuccucuuggagcuacaucguggagaccuccucuagcgacaauggcacgugcuauccgggggauuuuauugacuacgaagaacugcgggagcagcuuuccagcgucucuuccuucgaacgcuuugagaucuuccccaaaaccagcucuuggccuaaccacgauuccaauaagggagugacagccgcuuguccccaugccggcgccaagagcuuuuauaaaaaccugaucuggcucguuaagaaaggcaauucuuacccuaagcuguccaaaagcuauauuaacgacaaggggaaggaagugcuuguccuguggggaauccaccaccccuccaccucugccgaucaacagagccucuaccagaaugcugacgccuacguguucgugggcacauccagauauagcaaaaaguuuaaaccugagauugcuauccggccgaagguccgcgaucaggaggggagaaugaacuacuauuggacccugguugaacccggagacaaaauuacguucgaggccacaggcaaccugguggugccucgguacgcguuugccauggaacgcaaugcugggucuggaaucauuaucuccgauacccccguccaugacugcaacacaaccugucaaaccccuaagggcgccaucaauacaagccuccccuuccagaacauucacccgaucacgauuggcaaaugcccuaaguaugugaagucuaccaaacugagacuugcuacagggcugcggaauguucccagcauccagucccgcggacucuuuggcgccauugccggguucaucgagggaggcuggaccgggaugguggacggaugguacggcuaucaucaccagaacgaacaaggcucuggguacgcugcggaucuuaagagcacacagaaugccaucgacgagauuaccaacaaagucaauuccgugaucgagaagaugaacacgcaguuuacagcuguuggaaaagaguucaaucaccuugagaagagaauugaaaaccugaauaagaaaguggaugacggcuuccucgauaucuggaccuacaacgccgagcugcugguccuccuggaaaaugagcggacccuugacuaucaugauagcaacgugaagaaccuguacgagaaaguccgcucucagcucaagaauaacgccaaagaaauugggaauggauguuuugaguucuaucacaagugcgacaacacauguauggaauccgugaagaauggcaccuacgauuauccuaaauacagcgaggaagcuaagcugaacagagaggagaucgacgggguuaaacuugaaucuacacggaucuaucaaauucuggccaucuacuccacgguggcgagcucccucguccuggugguuucucugggcgcuauuagcuuuuggaugugcuccaauggaucucuccagugccgcaucuguauuuga

SEQ ID NO: 201448 - RNA, 1701 nt, Artificial Sequence; identical to SEQ ID NO: 200830
  derived and/or modified CDS sequence (opt5) from hemagglutinin__InfluenzaA__AFN18964

SEQ ID NO: 201449 - RNA, 1701 nt, Artificial Sequence
  derived and/or modified CDS sequence (opt5) from hemagglutinin__InfluenzaA__AFN18974
augaaggccauccuggugguccuccuguacaccuucgcuacagccaacgcggacacgcuuugcauuggcuaucacgcuaauaacagcaccgauacaguugacaccgugcuggagaaaaaugugacagucacccauuccgugaaccuccuggaagauaagcacaaugggaaacuuuguaagcugagaggaguugcuccccuccaucugggcaaaugcaacaucgccggguggauucugggaaauccugagugugaaucucucagcacagccuccucuuggagcuacaucguggagaccuccucuagcgacaacggcacgugcuauccgggggauuuuauugacuacgaagaacugcgggagcagcuuuccagcaugucuuccuucgaacgcuuugagaucuuccccaagaccagcucuuggccuaaucacgaucccaacaagggagucacagccgcuuguccucaugccggcgcgaaauccuuuuauaagaaucugaucuggcucgugaaaaagggcaacagcuaccccaaacugucuaaguccuauauuaaugacaaggggaaaaagguucuugugcuguggggaauccaccacccuagcaccuccgccgaucaacagucucucuaccagaacgcugacgccuacgucuucgugggcacaagcagauauuccaaaaaguuuaaaccggaaauugcuauccggcccaaggugcgcgaucaggaggggagaaugaauuacuauuggacccuggucgagccuggagacaaaauuacguucgaagccacaggcaaccugguugugccccgguacgcguuugccauggagcgcaacgcugggagcggaaucauuaucucugauaccccugugcaugacugcaauacaaccugucaaacccccaagggcgccaucaacacaucccucccguuccagaauauucacccuaucacgauuggcaagugccccaaauaugucaagagcaccaaacugagacuugcuacagggcugcggaacgugccuucuauccagagccgcggacucuuuggcgccauugccggguucaucgaaggaggcuggaccgggaugguugacggaugguacggcuaucaucaccagaaugagcaaggcuccggguacgcugcggaucugaagucuacacagaacgccaucgacgaaauuaccaauaaagugaacagcgucaucgagaagaugaauacgcaguuuacagcugugggaaaggaguucaaccaccuugagaaaagaauugagaaucugaacaagaaaguugaugacggcuuccucgauaucuggaccuacaaugccgaacugcuggugcuccuggagaacgaacggacccuugacuaucaugauuccaaugucaagaaccuguacgagaaagugcgcagccagcucaagaacaaugccaaggagauugggaacggauguuuugaguucuaucacaaaugcgacaauacauguauggaaucugucaagaacggcaccuacgauuaucccaaauacuccgacgaagcuaagcugaauagagaggaaaucgauggggugaaacuugagagcacacggaucuaucaaauucuggccaucuacucuacgguugcguccagccucgugcuggucgugucccugggcgcuauuucuuuuuggaugugcagcaacggaucccuccagugccgcaucuguauuuga

SEQ ID NO: 201450 - RNA, 1701 nt, Artificial Sequence; identical to SEQ ID NO: 196293
  derived and/or modified CDS sequence (opt5) from hemagglutinin__InfluenzaA__AFN18979

SEQ ID NO: 201451 - RNA, 1701 nt, Artificial Sequence
  derived and/or modified CDS sequence (opt5) from hemagglutinin__InfluenzaA__AFN18982
augaaggccauccuggugguccuccuguacaccuucgcuauugccaacgcggacacacuuugcaucggcuaucacgcuaauaacagcacggauaccguugacacagugcuggagaagaaugugaccgucacacauuccgugaaccuccuggaagauaagcacaaugggaaacuuuguaagcugagaggaguugcuccccuccaucugggcaaaugcaacauugccggguggauccugggaaauccugagugugaaucucucagcaccgccuccucuuggagcuacauuguggagacauccucuagcgacaacggaaccugcuauccgggggauuuuaucgacuacgaagaacugcgggagcagcuuuccagcgucucuuccuucgaacgcuuugagaucuuccccaagacgaauagcuggccuaaccacgauucuaauaagggagugaccgccgcuuguccccaugccggcgcgaaauccuuuuauaagaaccugauuuggcucguuaaaaagggcaauagcuacccuaaacugucuaaguccuauaucaacgacaaggggaaagaagugcuuguccuguggggcauucaccaccccagcacauccgccgaucaacagucucucuaccagaaugcugacgccuacguguucgugggcaccagcagauauuccaagaaauuuaagccugagaucgcuauucggccgaaaguccgcgaucaggaggggagaaugaacuacuauuggacacugguugaacccggagacaagaucaccuucgaggccacgggcaaccugguggugccucgguacgcguuugccauggaacgcaaugcugggagcggaauuaucaucucugauacacccguccaugacugcaacaccacaugucaaaccccuaaaggcgccauuaauaccucccuccccuuccagaacauccacccgauuacaaucggcaagugcccuaaguaugugaaaagcacgaagcugagacuugcuaccgggcugcggaauguucccucuauucagagccgcggacucuuuggcgccaucgccggguucaucgagggaggcuggacagggaugguggacggaugguacggcuaucaucaccagaacgaacaaggcuccggguacgcugcggaucugaaaucuacccagcacgccauugacgagaucacaaauaaggucaacagcgugauugagaaaaugaauacccaguuuacggcuguuggaaaggaguucaaccaucuugagaagagaaucgaaaaucugaacaaaaagguggaugacggcuuccucgauauuuggacauacaaugccgagcugcugguccuccuggaaaacgagcggacccuugacuaucacgauuccaaugugaaaaaccuguacgagaagguccgcagccagcucaaaaacaaugccaaggaaaucgggaacggauguuuugaguucuaucauaagugcgacaauaccuguauggaaucugugaaaaacggcacauacgauuauccuaaguacuccgaggaagcuaaacugaauagagaggagaucaacgggguuaaacuugaaagcacccggauuuaucaaauccuggccauuuacucuacaguggcguccagccucguccuggugguuucccugggcgcuaucucuuuuuggaugugcagcaauggaucccuccagugccgcauuuguaucuga

SEQ ID NO: 201452 - RNA, 1701 nt, Artificial Sequence; identical to SEQ ID NO: 201344
  derived and/or modified CDS sequence (opt5) from hemagglutinin__InfluenzaA__AFN18984

SEQ ID NO: 201453 - RNA, 1701 nt, Artificial Sequence; identical to SEQ ID NO: 194741
  derived and/or modified CDS sequence (opt5) from hemagglutinin__InfluenzaA__AFN18986

SEQ ID NO: 201454 - RNA, 1701 nt, Artificial Sequence; identical to SEQ ID NO: 194741
  derived and/or modified CDS sequence (opt5) from hemagglutinin__InfluenzaA__AFN18988

SEQ ID NO: 201455 - RNA, 1701 nt, Artificial Sequence; identical to SEQ ID NO: 195905
  derived and/or modified CDS sequence (opt5) from hemagglutinin__InfluenzaA__AFN18993

SEQ ID NO: 201456 - RNA, 1701 nt, Artificial Sequence; identical to SEQ ID NO: 195905
  derived and/or modified CDS sequence (opt5) from hemagglutinin__InfluenzaA__AFN18999

SEQ ID NO: 201457 - RNA, 1701 nt, Artificial Sequence; identical to SEQ ID NO: 195539
  derived and/or modified CDS sequence (opt5) from hemagglutinin__InfluenzaA__AFN19006

SEQ ID NO: 201458 - RNA, 1701 nt, Artificial Sequence; identical to SEQ ID NO: 194741
  derived and/or modified CDS sequence (opt5) from hemagglutinin__InfluenzaA__AFN19026

SEQ ID NO: 201459 - RNA, 1701 nt, Artificial Sequence; identical to SEQ ID NO: 195881
  derived and/or modified CDS sequence (opt5) from hemagglutinin__InfluenzaA__AFN19036

SEQ ID NO: 201460 - RNA, 1701 nt, Artificial Sequence; identical to SEQ ID NO: 194741
  derived and/or modified CDS sequence (opt5) from hemagglutinin__InfluenzaA__AFN19043

SEQ ID NO: 201461 - RNA, 1701 nt, Artificial Sequence; identical to SEQ ID NO: 194741
  derived and/or modified CDS sequence (opt5) from hemagglutinin__InfluenzaA__AFN19053

SEQ ID NO: 201462 - RNA, 1701 nt, Artificial Sequence; identical to SEQ ID NO: 194741
  derived and/or modified CDS sequence (opt5) from hemagglutinin__InfluenzaA__AFN19063

SEQ ID NO: 201463 - RNA, 1701 nt, Artificial Sequence; identical to SEQ ID NO: 194741
  derived and/or modified CDS sequence (opt5) from hemagglutinin__InfluenzaA__AFN19070

SEQ ID NO: 201464 - RNA, 1701 nt, Artificial Sequence
  derived and/or modified CDS sequence (opt5) from hemagglutinin__InfluenzaA__AFN19076
augaaggccauccuggugguccuccuguacaccuucgcuacagccaacgcggacacgcuuugcauuggcuaucacgcuaauaacagcaccgauacaguugacaccgugcuggagaaggaugugacagucacccauuccgugaaucuccuggaagacaagcacaacgggaaacuuuguaagcugagaggaguugcuccccuccaucugggcaaaugcaauaucgccggguggauucugggaaacccugagugugaaucucucagcacagccuccucuuggagcuacaucguggagaccuccucuagcgauaauggcacgugcuauccgggggacuuuauugauuacgaagaacugcgggagcagcuuuccagcgucucuuccuucgaacgcuuugagaucuuccccaagaccagcucuuggccuaaccacgacuccaauaagggagugacagccgcuuguccccaugccggcgcgaaaucuuuuuauaagaaccugaucuggcucguuaaaaagggcaauagcuacccuaaacuguccaagagcuauauuaacgauaaggggaaagaagugcuuguccuguggggaauccaccaccccuccaccucugccgaccaacagagccucuaccagaaugcugaugccuacguguucgugggcacauccagauauagcaagaaauuuaagccugagauugcuauccggccgaaaguccgcgaccaggaggggagaaugaacuacuauuggacccugguugaacccggagauaagauuacguucgaggccacaggcaaucugguggugccucgguacgcguuugccauggaacgcaacgcugggucuggaaucauuaucuccgacacccccguccaugacugcaacacaaccugucaaaccccuaaaggcgccaucaauacaagccuccccuuccagaacauucacccgaucacgauuggcaagugcccuaaguaugugaaaucuaccaagcugagacuugcuacagggcugcggaauguucccagcauccagucccgcggacucuuuggcgccauugccggguucaucgagggaggcuggaccgggaugguggauggaugguacggcuaucaucaccagaacgaacaaggcucuggguacgcugcggaccugaaaagcacacagaaugccaucgaugagauuaccaacaaggucaauuccgugaucgagaaaaugaacacgcaguuuacagcuguuggaaaggaguucaaucaccuugagaagagaauugaaaaccugaauaaaaagguggacgauggcuuccucgacaucuggaccuacaacgccgagcugcugguccuccuggaaaaugagcggacccuugauuaucaugacagcaacgugaaaaaucuguacgagaagguccgcucucagcucaaaaacaacgccaaggaaauugggaauggauguuuugaguucuaucacaagugcgauaacacauguauggaauccgugaaaaauggcaccuacgacuauccuaaguacagcgaggaagcuaaacugaacagagaggagaucgaugggguuaaacuugaaucuacacggaucuaucaaauucuggccaucuacuccacgguggcgagcucccucguccuggugguuucucugggcgcuauuagcuuuuggaugugcuccaauggaucucuccagugccgcaucuguauuuga

SEQ ID NO: 201465 - RNA, 1701 nt, Artificial Sequence; identical to SEQ ID NO: 194741
  derived and/or modified CDS sequence (opt5) from hemagglutinin__InfluenzaA__AFN19082

SEQ ID NO: 201466 - RNA, 1701 nt, Artificial Sequence; identical to SEQ ID NO: 194741
  derived and/or modified CDS sequence (opt5) from hemagglutinin__InfluenzaA__AFN19088

SEQ ID NO: 201467 - RNA, 1701 nt, Artificial Sequence; identical to SEQ ID NO: 194741
  derived and/or modified CDS sequence (opt5) from hemagglutinin__InfluenzaA__AFN19097

SEQ ID NO: 201468 - RNA, 1701 nt, Artificial Sequence; identical to SEQ ID NO: 194741
  derived and/or modified CDS sequence (opt5) from hemagglutinin__InfluenzaA__AFN19104

SEQ ID NO: 201469 - RNA, 1701 nt, Artificial Sequence; identical to SEQ ID NO: 194741
  derived and/or modified CDS sequence (opt5) from hemagglutinin__InfluenzaA__AFN19113

SEQ ID NO: 201470 - RNA, 1701 nt, Artificial Sequence; identical to SEQ ID NO: 194741
  derived and/or modified CDS sequence (opt5) from hemagglutinin__InfluenzaA__AFN19119

SEQ ID NO: 201471 - RNA, 1701 nt, Artificial Sequence; identical to SEQ ID NO: 197252
  derived and/or modified CDS sequence (opt5) from hemagglutinin__InfluenzaA__AFN19125

SEQ ID NO: 201472 - RNA, 1701 nt, Artificial Sequence; identical to SEQ ID NO: 194741
  derived and/or modified CDS sequence (opt5) from hemagglutinin__InfluenzaA__AFN19134

SEQ ID NO: 201473 - RNA, 1701 nt, Artificial Sequence; identical to SEQ ID NO: 194741
  derived and/or modified CDS sequence (opt5) from hemagglutinin__InfluenzaA__AFN19144

SEQ ID NO: 201474 - RNA, 1701 nt, Artificial Sequence; identical to SEQ ID NO: 197296
  derived and/or modified CDS sequence (opt5) from hemagglutinin__InfluenzaA__AFN19154

SEQ ID NO: 201475 - RNA, 1701 nt, Artificial Sequence; identical to SEQ ID NO: 194741
  derived and/or modified CDS sequence (opt5) from hemagglutinin__InfluenzaA__AFN19164

SEQ ID NO: 201476 - RNA, 1701 nt, Artificial Sequence; identical to SEQ ID NO: 194741
  derived and/or modified CDS sequence (opt5) from hemagglutinin__InfluenzaA__AFN19174

SEQ ID NO: 201477 - RNA, 1701 nt, Artificial Sequence; identical to SEQ ID NO: 194741
  derived and/or modified CDS sequence (opt5) from hemagglutinin__InfluenzaA__AFN19184

SEQ ID NO: 201478 - RNA, 1701 nt, Artificial Sequence; identical to SEQ ID NO: 194741
  derived and/or modified CDS sequence (opt5) from hemagglutinin__InfluenzaA__AFN19194

SEQ ID NO: 201479 - RNA, 1701 nt, Artificial Sequence; identical to SEQ ID NO: 194741
  derived and/or modified CDS sequence (opt5) from hemagglutinin__InfluenzaA__AFN19203

SEQ ID NO: 201480 - RNA, 1701 nt, Artificial Sequence; identical to SEQ ID NO: 194741
  derived and/or modified CDS sequence (opt5) from hemagglutinin__InfluenzaA__AFN19213

SEQ ID NO: 201481 - RNA, 1701 nt, Artificial Sequence; identical to SEQ ID NO: 194741
  derived and/or modified CDS sequence (opt5) from hemagglutinin__InfluenzaA__AFN19223

SEQ ID NO: 201482 - RNA, 1701 nt, Artificial Sequence; identical to SEQ ID NO: 194741
  derived and/or modified CDS sequence (opt5) from hemagglutinin__InfluenzaA__AFN19233

SEQ ID NO: 201483 - RNA, 1701 nt, Artificial Sequence
  derived and/or modified CDS sequence (opt5) from hemagglutinin__InfluenzaA__AFN19243
augaaggccauccuggugguccuccuguacaccuucgcuacagccaacgcggacacgcuuugcauuggcuaucacgcuaauaacagcaccgauacaguugacaccgugcuggagaaaaaugugacagucacccauuccgugaaccuccuggaagauaagcacaaugggaaacuuuguaagcugagaggaguugcuccccuccaucugggcaaaugcaacaucgccggguggauucugggaaauccugagugugaaucucucagcacagccuccucuuggagcuacaucguggagaccuccucuagcgacaacggcacgugcuauccgggggauuuuauugacuacgaagaacugcgggagcagcuuuccagcgucucuuccuucgaacgcuuugagaucuuccccaagaccagcucuuggccuaaucacgauuccaacaagggagugacagccgcuuguccccaugccggcgcgaaaucuuuuuauaagaaucugaucuggcucguuaaaaagggcaacagcuacccuaaacuguccaagagcuauauuaaugacaaggggaaagaagugcuuguccuguggggaauccaccaccccuccaccucugccgaucaacagagccucuaccagaacgcugacgccuacguguucgugggcacauccaaguauagcaaaaaguuuaaaccugagauugcuaucagaccgaagguccgggaucaggaggggcgcaugaauuacuauuggacccugguugaacccggagacaaaauuacguucgaggccacaggcaaccugguggugccuagauacgcguuugccauggaacggaacgcugggucuggaaucauuaucuccgauacccccguccaagacugcaauacaaccugucagaccccuaagggcgccaucaacacaagccuccccuuccagaauauucauccgaucacgauuggcaagugcccuaaauaugugaagucuaccaaacugcgccuugcuacagggcugagaaacguucccagcauccagucccggggacucuuuggcgccauugccggguucaucgagggaggcuggaccgggaugguggacggaugguacggcuaucaccaucaaaaugaacagggcucuggguacgcugcggaucuuaagagcacacagaacgccaucgacgagauuaccaauaaagucaacuccgugaucgagaagaugaauacgcaguuuacagcuguuggaaaggaguucaaccaccuggagaaacgcauugaaaaucugaacaagaaaguggaugacggcuuccucgauaucuggaccuacaaugccgagcugcugguccuccuggaaaacgagagaacccuugacuaucacgauagcaaugugaagaaccuguacgagaaaguccggucucaacucaagaacaaugccaaggaaauugggaacggauguuuugaguucuaucauaaaugcgacaauacauguauggaauccgugaagaacggcaccuacgauuauccuaaauacagcgaggaagcuaagcugaaucgcgaggagaucgacgggguuaaacuugaaucuacaagaaucuaucagauucuggccaucuacuccacgguggcgagcucccucguccuggugguuucucugggcgcuauuagcuuuuggaugugcuccaacggaucucuccagugccggaucuguauuuga

SEQ ID NO: 201484 - RNA, 1701 nt, Artificial Sequence; identical to SEQ ID NO: 196857
  derived and/or modified CDS sequence (opt5) from hemagglutinin__InfluenzaA__AFN19250

SEQ ID NO: 201485 - RNA, 1701 nt, Artificial Sequence; identical to SEQ ID NO: 194741
  derived and/or modified CDS sequence (opt5) from hemagglutinin__InfluenzaA__AFN19259

SEQ ID NO: 201486 - RNA, 1701 nt, Artificial Sequence; identical to SEQ ID NO: 194741
  derived and/or modified CDS sequence (opt5) from hemagglutinin__InfluenzaA__AFN19269

SEQ ID NO: 201487 - RNA, 1701 nt, Artificial Sequence; identical to SEQ ID NO: 194741
  derived and/or modified CDS sequence (opt5) from hemagglutinin__InfluenzaA__AFN19279

SEQ ID NO: 201488 - RNA, 1701 nt, Artificial Sequence; identical to SEQ ID NO: 195602
  derived and/or modified CDS sequence (opt5) from hemagglutinin__InfluenzaA__AFN19286

SEQ ID NO: 201489 - RNA, 1701 nt, Artificial Sequence; identical to SEQ ID NO: 194741
  derived and/or modified CDS sequence (opt5) from hemagglutinin__InfluenzaA__AFN19295

SEQ ID NO: 201490 - RNA, 1701 nt, Artificial Sequence; identical to SEQ ID NO: 194741
  derived and/or modified CDS sequence (opt5) from hemagglutinin__InfluenzaA__AFN19305

SEQ ID NO: 201491 - RNA, 1701 nt, Artificial Sequence; identical to SEQ ID NO: 195607
  derived and/or modified CDS sequence (opt5) from hemagglutinin__InfluenzaA__AFN19315

SEQ ID NO: 201492 - RNA, 1701 nt, Artificial Sequence; identical to SEQ ID NO: 194741
  derived and/or modified CDS sequence (opt5) from hemagglutinin__InfluenzaA__AFN19325

SEQ ID NO: 201493 - RNA, 1701 nt, Artificial Sequence; identical to SEQ ID NO: 194741
  derived and/or modified CDS sequence (opt5) from hemagglutinin__InfluenzaA__AFN19335

SEQ ID NO: 201494 - RNA, 1701 nt, Artificial Sequence; identical to SEQ ID NO: 194741
  derived and/or modified CDS sequence (opt5) from hemagglutinin__InfluenzaA__AFN19344

SEQ ID NO: 201495 - RNA, 1701 nt, Artificial Sequence
  derived and/or modified CDS sequence (opt5) from hemagglutinin__InfluenzaA__AFN19351
augaagaccaucauugcccugagcuacauccucugccugguguucgcucagaaacuucccggcaacgacaauuccauggccacacugugucucgggcaccaugcggucccuaacggaacgauuguuaagaccaucacaaaugaucaaauugaggugaccaacgcuacagaacuggugcaaaauucuagcaucggcgagaucugcgacuccccgcaccagauucuugauggggaaaacuguacccugaucgacgcccuccugggagauccccagugcgacggcuuucagaauaaaaagugggaucuguucgucgagagaucuaaagccuauagcaacuguuacccuuaugacgugcccgauuacgcuucccuccggucucugguugccagcuccgggacacuugaauuuaauaacgagagcuucaauuggaccggagugacgcagaacggcaccucuuccgcuugcauucgcagaagcaauaacuccuuuuucucucggcugaauuggcucacacaucugaacuuuaaguauccugcccuuaacgucaccaugcccaauaacgagcaguucgacaagcuguacaucuggggcgugcaccauccugggacagauaaagaccagauuuuucucuaugcgcaaagcucuggacgcaucaccguuuccacgaagagaagccagcaggccgugauuccgaauaucggcucccggccccgcaucagaaacauuccuucucggaucagcauuuacuggacaaucgucaaacccggggauauucugcugaucaauuccaccggaaaccucaucgcuccucgcggcuacuucaagauuagaagcgggaaaucuuccaucaugcggagcgacgcccccauuggaaaguguaauucugaaugcaucacaccgaacggcagcauuccuaaugacaagcccuuucagaacgugaaucgcaucaccuauggcgcuuguccuagauacgugaaacaauccacccugaagcuggccacagggaugcggaacguccccgagaaacagacgcgcggaaucuucggcgcgauugccggguuuaucgaaaauggaugggagggcaugguugaugggugguauggauucagacaccagaacucugagggccggggccaagcugccgaccuuaagagcacccaggcugccauugaucagaucaaugggaaacucaacagacugauuggaaagacaaacgaaaaauuccaccagaucgagaaggaauuuuccgagguggaaggccgcauucaagaccuugagaaguacguggaggauaccaaaaucgaccuguggagcuauaaugccgaacuccuggucgcucuggagaaccagcauacaaucgaucucaccgacucugaaaugaauaagcuguucgagaaaacgaagaaacagcuucgggaaaacgcggaggauauggggaauggaugcuuuaagauuuaccacaagugugacaacgccugcaucggcuccauuagaaaugggacauaugaucaugacguguaccgcgacgaggcucugaacaaucgguuccagaucaaaggcguugaacucaagagcggauacaaagauuggauucuguggaucucuuuugccaucuccugcuuccuucuguguguggcccuccugggcuuuauuaugugggcuugccaaaaggggaacgucagauguaauaucugcauuuga

SEQ ID NO: 201496 - RNA, 1701 nt, Artificial Sequence; identical to SEQ ID NO: 201146
  derived and/or modified CDS sequence (opt5) from hemagglutinin__InfluenzaA__AFN19355

SEQ ID NO: 201497 - RNA, 1701 nt, Artificial Sequence; identical to SEQ ID NO: 201146
  derived and/or modified CDS sequence (opt5) from hemagglutinin__InfluenzaA__AFN19357

SEQ ID NO: 201498 - RNA, 1701 nt, Artificial Sequence; identical to SEQ ID NO: 201146
  derived and/or modified CDS sequence (opt5) from hemagglutinin__InfluenzaA__AFN19361

SEQ ID NO: 201499 - RNA, 1701 nt, Artificial Sequence
  derived and/or modified CDS sequence (opt5) from hemagglutinin__InfluenzaA__AFN19363
augaagaccaucauugcccugagcuacauccucugccugguguucgcucagaaacuucccggcaacgacaauuccacagccacgcugugucucgggcaccaugcggucccuaacggaaccauuguuaagacaaucaccaaugaucaaauugaggugacaaacgcuaccgaacuggugcagaucucuagcacaggcgagaucugcgacuccccgcaccagauucuugauggggaaaauuguacccugaucgacgcccuccugggagauccccagugcgacggcuuucaaaacaaaaagugggaucuguucgucgagagaucuaaagccuauagcaauuguuacccuuaugacgugcccgauuacgcuucccuccggucucugguugccagcuccgggacgcuugaauuuaacaaugagagcuucaacuggaccggagugacacagaauggcaccucuuccgcuugcauucgcagaagcaacucuuccuuuuucagccggcugaauuggcucacacaucugaacuuuaaguauccugcccuuaaugucaccaugcccaacaacgagcaguucgacaagcuguacaucuggggcgugcaccauccugggacggauaaagaccagauuuuucucuaugcgcaaucuuccggacgcaucacaguuagcaccaagagaucccagcaggccgugauuccgaauaucggcucucggccccgcaucagaaacauuccuagccggaucuccauuuacuggacaaucgucaaacccggggauauucugcugaucaauagcaccggaaaccucaucgcuccucgcggcuacuucaagauuagaucugggaaauccagcaucaugcggucugacgcccccauuggaaaguguaauagcgaaugcaucaccccgaacggcuccauuccuaaugacaagcccuuucagaacgugaaucgcaucacauauggcgcuuguccuagauacgugaaacaaucuacgcugaaacuugccaccgggaugcggaacguccccgagaagcagacacgcggaaucuucggcgcgauugccggguuuaucgaaaauggaugggagggcaugguugaugggugguauggauucagacaccagaacagcgagggccggggccaagcugccgaccugaaguccacccaggcugccauugaucagaucaaugggaaacucaacagacugauuggaaagacaaaugaaaaauuccaccagaucgagaaggaauuuagcgagguggaaggccgcauucaagaccuugagaaguacguggaggauaccaaaaucgaccuguggucuuauaacgccgaacuccuggucgcucuggagaaccagcauacgaucgaucucacagacuccgaaaugaauaagcuguucgagaaaaccaagaaacagcuucgggaaaacgcggaggauauggggaauggaugcuuuaagauuuaccacaagugugacaacgccugcaucggcagcauuagaaaugggaccuauaaccaugauguguaccgcgacgaggcucugaauaaccgguuccagaucaaaggcguugaacucaagucuggauacaaagacuggauucuguggaucuccuuugccaucagcugcuuccuucuguguguggcccuccugggcuuuauuaugugggcuugccaaaaggggaauaucagauguaacauuugcaucuga

SEQ ID NO: 201500 - RNA, 1701 nt, Artificial Sequence; identical to SEQ ID NO: 199054
  derived and/or modified CDS sequence (opt5) from hemagglutinin__InfluenzaA__AFN19365

SEQ ID NO: 201501 - RNA, 1701 nt, Artificial Sequence
  derived and/or modified CDS sequence (opt5) from hemagglutinin__InfluenzaA__AFN19367
augaagaccaucauugcccugagcuacauccucugccugguguucgcucagaaacuucccgagaacgacaauuccacagccacgcugugucucggccaccaugcggucccuaacgggaccauuguuaagacaaucaccaaugaucaaauugaagugacaaacgcuaccgagcuggugcagucuagcuccacaggagaaaucugcgacucuccgcaccagauccuugauggcgucaauuguacccugauugacgcccuccugggggauccccagugcgacggauuucaaaacaaaaagugggaucuguucguggagagaagcaaagccuauuccaauuguuacccuuaugacguucccgauuacgcuucucuccggagccugguggccuccagcggcacgcuugaauuuaacaaugagucuuucaacuggaccggggucacacagaauggaaccuccagcgcuugcauccgcagaucuaacuccagcuuuuucucucggcugaauuggcucacacaucugaacuuuaaguauccugcccuuaaugugaccaugcccaacaacgagcaguucgacaagcuguacauuuggggcguucaccauccuggcacggauaaagaccagaucuuucucuaugcgcaauccagcgggcgcauuacaguguccaccaagagaucucagcaggccgucaucccgaauauuggaagccggccccgcaucagaaacaucccuucccggauuagcaucuacuggacaauugugaaacccggcgauauccugcugauuaauucuaccgggaaccucaucgcuccucgcggauacuucaagauccaguccggcaaaagcucuauuaugagaagcgacgcccccaucgggaaguguaauuccgaaugcauuaccccgaacggaucuaucccuaaugacaagcccuuucaaaacgugaaucggauuacauauggcgcuuguccucgcuacgucaaacagagcacgcugaagcuggccaccggcaugagaaacguucccgagaaacagacacgggggaucuucggagcgaucgccggcuuuauugaaaaugggugggagggaaugguggauggcugguauggguuccgccaccaaaacuccgagggaagaggccaggcugccgaccuuaagagcacccaggcugccaucgaucagauuaauggcaaacucaaccggcugaucgggaagacaaaugaaaaauuccaccaaauugagaaggaauuuucugagguggaaggaagaauccaggaccuugagaaguacgucgaggauaccaaaauugaccugugguccuauaacgccgaacuccugguggcucuggagaaccagcauacgaucgaucucacagacagcgaaaugaauaagcuguucgagaaaaccaagaaacagcuucgcgaaaacgcggaggauaugggcaaugggugcuuuaagaucuaccacaagugugacaacgccugcauuggaucuauccggaauggcaccuauaaccaugauguuuacagagacgaggcucugaauaaccgcuuccaaauuaaagggguggaacucaaguccggcuacaaagacuggauccuguggauuagcuuugccaucuccugcuuccuucugugugucgcccuccugggauuuaucaugugggcuugccagaagggcaauauucgguguaacaucugcauuuga

SEQ ID NO: 201502 - RNA, 1701 nt, Artificial Sequence
  derived and/or modified CDS sequence (opt5) from hemagglutinin__InfluenzaA__AFN19369
augaagaccaucauugcccugagcuacauccucugccugguguucgcucagaaacuucccgagaacgacaauuccacagccacgcugugucucggccaccaugcggucccuaacgggaccauuguuaagacaaucaccaaugaucaaauugaagugacaaacgcuaccgagcuggugcagucuagcuccacaggagaaaucugcgacucuccgcaccagauccuugauggcgucaauuguacccugauugacgcccuccugggggauccccagugcgacggauuucaaaacaaaaagugggaucuguucguggagagaagcaaagccuauuccaauuguuacccuuaugacguucccgauuacgcuucucuccggagccugguggccuccagcggcacgcuugaauuuaacaaugagucuuucaacuggaccggggucacacagaauggaaccuccagcgcuugcauccgcagaucuaacuccagcuuuuucucucggcugaauuggcucacacaucugaacuuuaaguauccugcccuuaaugugaccaugcccaacaacgagcaguucgacaagcuguacauuuggggcguucaccauccuggcacggauaaagaccagaucuuucucuaugcgcaauccagcgggcgcauuacaguguccaccaagagaucucagcaggccgucaucccgaauauuggaagccggccccgcaucagaaacaucccuucccggauuagcaucuacuggacaauugugaaacccggcgauauccugcugauuaauucuaccgggaaccucaucgcuccucgcggauacuucaagaucagauccggcaaaagcucuauuaugcggagcgacgcccccaucgggaaguguaauuccgaaugcauuaccccgaacggaucuaucccuaaugacaagcccuuucagaacgugaaucgcauuacauauggcgcuuguccuagauacgucaaacaaagcacgcugaagcuggccaccggcaugcggaacguucccgagaaacagacacgcgggaucuucggagcgaucgccggcuuuauugaaaaugggugggagggaaugguggauggcugguauggguucagacaccagaacuccgagggacggggccaagcugccgaccuuaagagcacccaggcugccaucgaucagauuaauggcaaacucaacagacugaucgggaagacaaaugaaaaauuccaccagauugagaaggaauuuucugagguggaaggacgcauccaagaccuugagaaguacgucgaggauaccaaaauugaccugugguccuauaacgccgaacuccugguggcucuggagaaccagcauacgaucgaucucacagacagcgaaaugaauaagcuguucgagaaaaccaagaaacagcuucgggaaaacgcggaggauaugggcaaugggugcuuuaagaucuaccacaagugugacaacgccugcauuggaucuaucagaaauggcaccuauaaccaugauguuuaccgcgacgaggcucugaauaaccgguuccagauuaaagggguggaacucaaguccggcuacaaagacuggauccuguggauuagcuuugccaucuccugcuuccuucugugugucgcccuccugggauuuaucaugugggcuugccaaaagggcaauauuagauguaacaucugcauuuga

SEQ ID NO: 201503 - RNA, 1701 nt, Artificial Sequence
  derived and/or modified CDS sequence (opt5) from hemagglutinin__InfluenzaA__AFN19373
augaagaccaucauugcccugagcuacauccucugccugguguucgcucagaaacuucccggcaacgacaauuccacagccacgcugugucucgggcaccaugcggucccuaacggaaccauuguuaagacaaucaccaaugaucaaauugaggugacaaacgcuaccgaacuggugcaaaauucuagcaucggcgagaucugcgacuccccgcaccagauucuugauggggaaaacuguacacugaucgacgcccuccugggagauccccagugcgacggcuuucagaauaaaaagugggaucuguucgucgagagaucuaaagccuauagcaacuguuacccuuaugacgugcccgauuacgcuucccuccggucucugguugccagcuccgggacccuugaauuuaauaacgagagcuucaauuggacgggagugacccagaacggcacaucuuccgcuugcauucgcagaagcaauaacuccuuuuucucucggcugaauuggcucacccaucugaacuuuaaguauccugcccuuaacgucacaaugcccaauaacgagcaguucgacaagcuguacaucuggggcgugcaccauccugggaccgauaaagaccagauuuuucucuaugcgcaaagcucuggacgcaucacgguuuccacaaagagaagccagcaggccgugauuccgaauaucggcucccggccccgcaucagaaacauuccuucucggaucagcauuuacuggaccaucgucaaacccggggauauucugcugaucaauuccacaggaaaccucaucgcuccucgcggcuacuucaagauuagaagcgggaaaucuuccaucaugcggagcgacgcccccauuggaaaguguaauucugaaugcaucaccccgaacggcagcauuccuaaugacaagcccuuucagaacgugaaucgcaucaccuauggcgcuuguccuagauacgugaaacaauccacacugaagcuggccacggggaugcggaacguccccgagaaacagacccgcggaaucuucggcgcgauugccggguuuaucgaaaauggaugggagggcaugguugaugggugguauggauucagacaccagaacucugagggccggggccaagcugccgaccuuaagagcacacaggcugccauugaucagaucaaugggaaacucaacagacugauuggaaagaccaacgaaaaauuccaccagaucgagaaggaauuuuccgagguggaaggccgcauucaagaccuugagaaguacguggaggauacaaaaaucgaccuguggagcuauaaugccgaacuccuggucgcucuggagaaccagcauaccaucgaucucacggacucugaaaugaauaagcuguucgagaaaacaaagaaacagcuucgggaaaacgcggaggauauggggaauggaugcuuuaagauuuaccacaagugugacaacgccugcaucggcuccauuagaaaugggaccuaugaucaugacguguaccgcgacgaggcucugaacaaucgguuccagaucaaaggcguugaacucaagagcggauacaaagauuggauucuguggaucucuuuugccaucuccugcuuccuucuguguguggcccuccugggcuuuauuaugugggcuugccaaaaggggaacaucagauguaauauuugcaucuga

SEQ ID NO: 201504 - RNA, 1701 nt, Artificial Sequence; identical to SEQ ID NO: 201146
  derived and/or modified CDS sequence (opt5) from hemagglutinin__InfluenzaA__AFN19375

SEQ ID NO: 201505 - RNA, 1701 nt, Artificial Sequence
  derived and/or modified CDS sequence (opt5) from hemagglutinin__InfluenzaA__AFN19377
augaagaccaucauugcccugagcuacauccucugccugguguucgcucagaaacuucccgagaacgacaauuccacagccacgcugugucucggccaccaugcggucccuaacgggaccauuguuaagacaaucaccaaugaucaaauugaagugacaaacgcuaccgagcuggugcagucuagcuccacaggagaaaucugcgacucuccgcaccagauccuugauggcgucaauuguacccugauugacgcccuccugggggauccccagugcgacggauuucaaaacaaaaagugggaucuguucguggagagaagcaaagccuauuccaauuguuacccuuaugacguucccgauuacgcuucucuccggagccugguggccuccagcggcacgcuugaauuuaacaaugagucuuucaacuggaccggggucacacagaauggaaccuccagcgcuugcauccgcagaucuaacuccagcuuuuucucucggcugaauuggcucacacaucugaacuuuaaguauccugcccuuaaugugaccaugcccaacaacgagcaguucgacaagcuguacauuuggggcguucaccauccuggcacggauaaagaccagaucuuucucuaugcgcaauccagcgggcgcauuacaguguccaccaagagaucucagcaggccgucaucccgaauauuggaagccggccccgcaucagaaacaucccuucccggauuagcaucuacuggacaauugugaaacccggcgauauccugcugauuaauucuaccgggaaccucaucgcuccucgcggauacuucaagaucagauccggcaaaagcucuauuaugcggagcgacgcccccaucgggaaguguaauuccgaaugcauuaccccgaacggaucuaucccuaaugacaagcccuuucagaacgugaaucgcauuacauauggcgcuuguccuagauacgucaaacaaagcacgcugaagcuggccaccggcaugcggaacguucccgagaaacagacacgcgggaucuucggagcgaucgccggcuuuauugaaaaugggugggagggaaugguggauggcugguauggguucagacaccagaacuccgagggacggggccaagcugccgaccuuaagagcacccaggcugccaucgaucagauuaauggcaaacucaacagacugaucgggaagacaaaugaaaaauuccaccagauugagaaggaauuuucugagguggaaggacgcauccaagaccuugagaaguacgucgaggauaccaaaauugaccugugguccuauaacgccgaacuccugguggcucuggagaaccagcauacgaucgaucucacagacagcgaaaugaauaagcuguucgagaaaaccaagaaacagcuucgggaaaacgcggaggauaugggcaaugggugcuuuaagaucuaccacaagugugacaacgccugcauuggaucuaucagaaauggcaccuauaaccaugauguuuaccgcgacgaggcucugaauaaccgguuccagauuaaagggguggaacucaaguccggcuacaaagacuggauccuguggauuagcuuugccaucuccugcuuccuucugugugucgcccuccugggauuuaucaugugggcuugccaaaauggcaacauuagauguaauaucugcauuuga

SEQ ID NO: 201506 - RNA, 1701 nt, Artificial Sequence; identical to SEQ ID NO: 201146
  derived and/or modified CDS sequence (opt5) from hemagglutinin__InfluenzaA__AFN19379

SEQ ID NO: 201507 - RNA, 1701 nt, Artificial Sequence; identical to SEQ ID NO: 201503
  derived and/or modified CDS sequence (opt5) from hemagglutinin__InfluenzaA__AFN19381

SEQ ID NO: 201508 - RNA, 1701 nt, Artificial Sequence; identical to SEQ ID NO: 201502
  derived and/or modified CDS sequence (opt5) from hemagglutinin__InfluenzaA__AFN19383

SEQ ID NO: 201509 - RNA, 1701 nt, Artificial Sequence
  derived and/or modified CDS sequence (opt5) from hemagglutinin__InfluenzaA__AFN19385
augaagaccaucauugcccugagcuacauccucugccugguguucgcucagaaacuucccgagaacgacaauuccacagccacgcugugucucggccaccaugcggucccuaacgggaccauuguuaagacaaucaccaaugaucaaauugaagugacaaacgcuaccgagcuggugcagucuagcuccacaggagaaaucugcgacucuccgcaccagauccuugauggcgucaauuguacccugauugacgcccuccugggggauccccagugcgacggauuucaaaacaaaaagugggaucuguucguggagagaagcaaagccuauuccaauuguuacccuuaugacguucccgauuacgcuucucuccggagccugguggccuccagcggcacgcuugaauuuaacaaugagucuuucaacuggaccggggucacacagaauggaaccuccagcgcuugcauccgcagaucuaacuccagcuuuuucucucggcugaauuggcucacacaucugaacuuuaaguauccugcccuuaaugugaccaugcccaacaacgagcaguucgacaagcuguacauuuggggcguucaccauccuggcacggauaaagaccagaucuuucucuaugcgcaauccagcgggcgcauuacaguguccaccaagagaucucagcaggccgucaucccgaauauuggaagccggccccgcaucagaaacaucccuucccggauuagcaucuacuggacaauugugaaacccggcgauauccugcugauuaauucuaccgggaaccucaucgcuccucgcggauacuucaagauccaguccggcaaaagcucuauuaugagaagcgacgcccccaucgggaaguguaauuccgaaugcauuaccccgaacggaucuaucccuaaugacaagcccuuucaaaacgugaaucggauuacauauggcgcuuguccucgcuacgucaaacagagcacgcugaagcuggccaccggcaugagaaacguucccgagaaacagacacgggggaucuucggagcgaucgccggcuuuauugaaaaugggugggagggaaugguggauggcugguauggguuccgccaccaaaacuccgagggaagaggccaggcugccgaccuuaagagcacccaggcugccaucgaucagauuaauggcaaacucaaccggcugaucgggaagacaaaugaaaaauuccaccaaauugagaaggaauuuucugagguggaaggaagaauccaggaccuugagaaguacgucgaggauaccaaaauugacaucugguccuauaacgccgaacugcucguggcucuggagaaccagcauacgaucgaucugacagacagcgaaaugaauaaacucuucgagaagaccaagaaacagcugcgcgaaaacgcggaggauaugggcaaugggugcuuuaagauuuaccacaagugugacaacgccugcaucggaucuauucggaauggcaccuauaaccaugauguuuacagagacgaggcucuuaauaaccgcuuccaaaucaaagggguggaacugaaguccggcuacaaagacuggauucucuggaucagcuuugccaucuccugcuuccugcuuugugucgcccugcucggauuuauuaugugggcuugccagaagggcaauauccgguguaacauuugcaucuga

SEQ ID NO: 201510 - RNA, 1701 nt, Artificial Sequence; identical to SEQ ID NO: 201502
  derived and/or modified CDS sequence (opt5) from hemagglutinin__InfluenzaA__AFN19387

SEQ ID NO: 201511 - RNA, 1701 nt, Artificial Sequence; identical to SEQ ID NO: 201146
  derived and/or modified CDS sequence (opt5) from hemagglutinin__InfluenzaA__AFN19389

SEQ ID NO: 201512 - RNA, 1701 nt, Artificial Sequence; identical to SEQ ID NO: 201146
  derived and/or modified CDS sequence (opt5) from hemagglutinin__InfluenzaA__AFN19391

SEQ ID NO: 201513 - RNA, 1701 nt, Artificial Sequence
  derived and/or modified CDS sequence (opt5) from hemagglutinin__InfluenzaA__AFN19393
augaagaccaucauugcccugagcuacauccucugccugguguucgcucagaaacuucccggcaacgacaauuccacagccacgcugugucucgggcaccaugcggucccuaacggaaccauuguuaagacaaucaccaaugaucaaauugaggugacaaacgcuaccgaacuggugcagucuagcuccgccggcgagaucugcgacucuccgcaccauauccuugauggggaaaauuguacacugauugacgcccuccugggagauccccagugcgacggcuuucagaacaaaaagugggaucuguucgucgagagaagccgggcuuauuccaauuguuacccuuaugacgugcccgauuacgccucucuccgcagccugguugcuuccagcgggacccuugaauuuaacaaugagucuuucaacuggacgggagugacccaaaauggcacauccagcgccugcaucagacggucuaacaauuccuuuuucagccgccugaacuggcucacccaccugaauuuuaaauauccugcgcuuaacgucacaaugcccaacaaugagcaguucgacaagcuguacauuuggggcgugcaucacccugggaccgauaaggaccagaucuuucucuaugcccaggcuucuggaagaauuacgguuuccacaaaacggagccaacaggccgugaucccgaacauuggcucccgccccagaguccggaauaucccuucucgcaucagcauuuacuggaccaucgugaagcccggggauauucugcugaucaacuccacaggaaaucucauugcuccuagaggcuacuucaaaauccggagcgggaagucuuccaucaugcgcagcgacgcccccauuggaaaauguaacucugaaugcaucaccccgaauggcagcauuccuaacgacaagcccuuucagaaugugaacagaaucaccuauggcgcguguccucgguacgucaagcaguccacacugaaacuugccacggggaugcgcaauguucccgagaagcaaaccagaggaauuuucggcgcuaucgccggguuuaucgaaaacggaugggagggcaugauggaugggugguauggauuccggcaccaaaauucugagggcagaggccaggcugccgaccugaaaagcacacaggccgcuauugaucagaucaacgggaagcucaaucgccugauuggaaaaaccaacgaaaaguuccaucagaucgagaaagaauuuuccgagguggaaggccggauucaggaccuugagaaguacguggaggauacaaagaucgaccuguggagcuauaacgcggaacuccuggucgcccuggagaaucaacacaccauugaucucacggacucugaaaugaacaaacuguucgagaagaccaaaaagcagcuuagagaaaaugcugaggauauggggaacggaugcuuuaaaaucuaccauaagugugacaaugccugcaucggcuccauucgcaacgggacauaugaucacgacguguaccgggacgaggcccugagcaauagauuccagaucaagggcguugaacucaaaucuggauacaaggauuggauucuguggaucuccuuugcuauuagcugcuuccuucuguguguggcccuccugggcuuuaucaugugggcgugccagaaagggaacauccgcuguaauauuugcaucuga

SEQ ID NO: 201514 - RNA, 1701 nt, Artificial Sequence; identical to SEQ ID NO: 201502
  derived and/or modified CDS sequence (opt5) from hemagglutinin__InfluenzaA__AFN19397

SEQ ID NO: 201515 - RNA, 1701 nt, Artificial Sequence; identical to SEQ ID NO: 201146
  derived and/or modified CDS sequence (opt5) from hemagglutinin__InfluenzaA__AFN19399

SEQ ID NO: 201516 - RNA, 1701 nt, Artificial Sequence; identical to SEQ ID NO: 201502
  derived and/or modified CDS sequence (opt5) from hemagglutinin__InfluenzaA__AFN19401

SEQ ID NO: 201517 - RNA, 1701 nt, Artificial Sequence; identical to SEQ ID NO: 201146
  derived and/or modified CDS sequence (opt5) from hemagglutinin__InfluenzaA__AFN19403

SEQ ID NO: 201518 - RNA, 1701 nt, Artificial Sequence; identical to SEQ ID NO: 201502
  derived and/or modified CDS sequence (opt5) from hemagglutinin__InfluenzaA__AFN19405

SEQ ID NO: 201519 - RNA, 1701 nt, Artificial Sequence
  derived and/or modified CDS sequence (opt5) from hemagglutinin__InfluenzaA__AFN19407
augaagaccaucauugcccugagcuacauccucugccugguguucgcucagaaacuucccggcaacgacaauuccacagccacgcugugucucgggcaccaugcggucccuaacggaaccauuguuaagacaaucaccaaugaucaaauugaggugacaaacgcuaccgaacuggugcaaaauucuagcaucggcgagaucugcgacuccccgcaccagauucuugauggggaaaacuguacacugaucgacgcccuccugggagauccccagugcgacggcuuucagaauaaaaagugggaucuguucgucgagagaucuaaagccuauagcaacuguuacccuuaugacgugcccgauuacgcuucccuccggucucugguugccagcuccgggacccuugaauuuaauaacgagagcuucaauuggucuggagugacgcagaacggcaccuccagcgcuugcaugcgcagaucuaauuccagcuuuuucucucggcugaacuggcucacacaucugaauuuuaaguauccugcccuuaacgucaccaugcccaacaaugagcaguucgacaagcuguacauuuggggcgugcaccauccugggacagauaaagaccagaucuuucucuaugcgcaauccagcggacgcauuaccguuuccacgaagagaucucagcaggccgugaucccgaacauuggcagccggccccgcaucagaaauaucccuucccggauuagcaucuacuggacaauugucaaacccggggauauccugcugauuaacucuaccggaaaucucaucgcuccucgcggcuacuucaagaucagauccgggaaaagcucuauuaugcggagcgacgcccccaucggaaaguguaacuccgaaugcauuacaccgaauggcucuaucccuaacgacaagcccuuucagaaugugaaccgcauuaccuauggcgcuuguccuagauacgugaaacaaagcacccugaagcuggccacagggaugcggaauguccccgagaaacagacgcgcggaaucuucggcgcgaucgccggguuuauugaaaacggaugggagggcaugguugaugggugguauggauucagacaccaaaauuccgagggccggggccaggcugccgaccuuaagagcacccaggcugccaucgaucagauuaacgggaaacucaauagacugaucggaaagacaaacgaaaaauuccaccagauugagaaggaauuuucugagguggaaggccgcauccaagaccuugagaaguacguggaggauaccaaaauugaccugugguccuauaacgccgaacuccuggucgcucuggagaaucagcauacaaucgaucucaccgacagcgaaaugaacaagcuguucgagaaaacgaagaaacagcuucgggaaaaugcggaggauauggggaacggaugcuuuaagaucuaccacaagugugacaaugccugcauuggcucuaucagaaacgggacauaugaucaugacguguaccgcgacgaggcucugaauaaccgguuccagauuaaaggcguugaacucaaguccggauacaaagauuggauccuguggauuagcuuugccaucuccugcuuccuucuguguguggcccuccugggcuuuaucaugugggcuugccaaaaggggaauauuagauguaacaucugcauuuga

SEQ ID NO: 201520 - RNA, 1701 nt, Artificial Sequence
  derived and/or modified CDS sequence (opt5) from hemagglutinin__InfluenzaA__AFN19409
augaagaccaucauugcccugagcuacauccucugccugguguucgcucagaaacuucccggcaacgacaauuccacagccacgcugugucucgggcaccaugcggucccuaacggaaccauuguuaagacaaucaccaaugaucaaauugaggugacaaacgcuaccgaacuggugcagucuagcuccaucggcgagaucugcgacucuccgcaccagauucuugauggggaaaauuguacacugaucgacgcccuccugggagauccccagugcgacggcuuucaaaacaaaaagugggaucuguucgucgagagaagcaaagccuauuccaauuguuacccuuaugacgugcccgauuacgcuucucuccggagccugguugccuccagcgggacccuugaauuuaacaaugagucuuucaacuggacgggagugacccagaauggcacauccagcgcuugcauucgcagaucuaacuccagcuuuuucucucggcugaauuggcucacccaucugaacuuuaaguauccugcccuuaaugucacaaugcccaacaacgagcaguucgacaagcuguacaucuggggcgugcaccauccugggaccgauaaagaccagauuuuucucuaugcgcaauccagcggacgcaucacgguuuccacaaagagaucucagcaggccgugauuccgaauaucggcagccggccccgcaucagaaacauuccuucccggaucagcauuuacuggaccaucgucaaacccggggauauucugcugaucaauucuacaggaaaccucaucgcuccucgcggcuacuucaagauuagauccgggaaaagcucuaucaugcggagcgacgcccccauuggaaaguguaauuccgaaugcaucaccccgaacggcucuauuccuaaugacaagcccuuucagaacgugaaucgcaucaccuauggcgcuuguccuagauacgugaaacaaagcacacugaagcuggccacggggaugcggaacguccccgagaaacagacccgcggaaucuucggcgcgauugccggguuuaucgaaaauggaugggagggcaugguugaugggugguauggauucagacaccagaacuccgagggccggggccaagcugccgaccuuaagagcacacaggcugccauugaucagaucaaugggaaacucaacagacugauuggaaagaccaaugaaaaauuccaccagaucgagaaggaauuuucugagguggaaggccgcauucaagaccuugagaaguacguggaggauacaaaaaucgaccugugguccuauaacgccgaacuccuggucgcucuggagaaccagcauaccaucgaucucacggacagcgaaaugaauaagcuguucgagaaaacaaagaaacagcuucgggaaaacgcggaggauauggggaauggaugcuuuaagauuuaccacaagugugacaacgccugcaucggcucuauuagaaaugggaccuauaaccaugauguguaccgcgacgaggcucugaauaaccgguuccagaucaaaggcguugaacucaaguccggauacaaagacuggauucuguggaucagcuuugccaucuccugcuuccuucuguguguggcccuccugggcuuuauuaugugggcuugccaaaaggggaauaucagauguaacauuugcaucuga

SEQ ID NO: 201521 - RNA, 1701 nt, Artificial Sequence; identical to SEQ ID NO: 201502
  derived and/or modified CDS sequence (opt5) from hemagglutinin__InfluenzaA__AFN19411

SEQ ID NO: 201522 - RNA, 1701 nt, Artificial Sequence; identical to SEQ ID NO: 201146
  derived and/or modified CDS sequence (opt5) from hemagglutinin__InfluenzaA__AFN19413

SEQ ID NO: 201523 - RNA, 1701 nt, Artificial Sequence
  derived and/or modified CDS sequence (opt5) from hemagglutinin__InfluenzaA__AFN19415
augaagaccaucauugcccugagcuacauccucugccugguguucgcucagaaacuucccggcaacgacaauuccacagccacgcugugucucgggcaccaugcggucccuaacggaaccauuguuaagacaaucaccaaugaucaaauugaggugacaaacgcuaccgaacuggugcagucuagcuccacaggcgagaucugcgacucuccgcaccagauccuugauggggaaaauuguacccugauugacgcccuccugggagauccccagugcgacggcuuucaaaacaaaaagugggaucuguucgucgagagaagcaaagccuauuccaauuguuacccuuaugacgugcccgauuacgcuucucuccggagccugguugccuccagcgggacgcuugaauuuaacaaugagucuuucaacuggaccggagugacacagaauggcaccuccagcgcuugcauccgcagaucuaacuccagcuuuuucucucggcugaauuggcucacacaucugaacuuuaaguauccugcccuuaaugucaccaugcccaacaacgagcaguucgacaagcuguacauuuggggcgugcaccauccugggacggauaaagaccagaucuuucucuaugcgcaauccagcggacgcauuacaguuuccaccaagagaucucagcaggccgugaucccgaauauuggcagccggccccgcaucagaaacaucccuucccggauuagcaucuacuggacaauugucaaacccggggauauccugcugauuaauucuaccggaaaccucaucgcuccucgcggcuacuucaagaucagauccgggaaaagcucugugaugcggagcgacgcccccauuggaaaguguaauuccgaaugcaucaccccgaacggcucuauuccuaaugacaagcccuuucagaacgugaaucgcaucacauauggcgcuuguccuagauacgucaaacaaagcacgcugaagcuggccaccgggaugcggaacguucccgagaaacagacacgcggaauuuucggcgcgaucgccggguuuaucgaaaauggaugggagggcaugguggaugggugguauggauucagacaccagaacuccgagggccggggccaagcugccgaccuuaagagcacccaggcugccauugaucagaucaaugggaaacucaacagacugauuggaaagacaaaugaaaaauuccaccagaucgagaaggaauuuucugagguggaaggccgcauucaagaccuugagaaguacgucgaggauaccaaaaucgaccugugguccuauaacgccgaacuccugguggcucuggagaaccagcauacgauugaucucacagacagcgaaaugaauaagcuguucgagaaaaccaagaaacagcuucgggaaaacgcggaggauauggggaauggaugcuuuaagaucuaccacaagugugacaacgccugcaucggcucuauuagaaaugggaccuauaaccaugauguuuaccgcgacgaggcucugaauaaccgguuccagaucaaaggcguggaacucaaguccggauacaaagacuggauucuguggaucagcuuugccauuuccugcuuccuucugugugucgcccuccugggcuuuaucaugugggcuugccaaaaggggaauaucagauguaacauuugcaucuga

SEQ ID NO: 201524 - RNA, 1701 nt, Artificial Sequence
  derived and/or modified CDS sequence (opt5) from hemagglutinin__InfluenzaA__AFN19417
augaagaccaucauugcccugagcuacauccucugccugguguucgcucagaaacuucccggcaacgacaauuccacagccacgcugugucucgggcaccaugcggucccuaacggaaccauuguuaagacaaucaccaaugaucaaauugaggugacaaacgcuaccgaacuggugcagucuagcuccacaggcgagaucugcgacucuccgcaccagauccuugauggggaaaauuguacccugauugacgcccuccugggagauccccagugcgacggcuuucaaaacaaaaagugggaucuguucgucgagagaagcaaagccuauuccaauuguuacccuuaugacgugcccgauuacgcuucucuccggagccugaucgccuccagcgggacgcuugaauuuaacaaugagucuuucaacuggaccggaguuacacagaauggcaccuccagcgcuugcauucgcagaucuaacuccagcuuuuucucucggcugaauuggcucacacaucugaacuuuaaguauccugcccuuaaugugaccaugcccaacaacgagcaguucgacaagcuguacaucuggggcguccaccauccugggacggauaaagaccagauuuuucucuaugcgcaauccagcggacgcaucacaguguccaccaagagaucucagcaggccguuauuccgaauaucggcagccggccccgcaucagaaacauuccuucccggaucagcauuuacuggacaaucgugaaacccggggauauucugcugaucaauucuaccggaaaccucaucgcuccucgcggcuacuucaagauuagauccgggaaaagcucuaucaugcggagcgacgcccccauuggaaaguguaauuccgaaugcaucaccccgaacggcucuauuccuaaugacaagcccuuucagaacgucaaucgcaucacauauggcgcuuguccuagauacgugaaacaaagcacgcugaagcuggccaccgggaugcggaacgugcccgagaaacagacacgcggaaucuucggcgcgauugccggguuuaucgaaaauggaugggagggcauggucgaugggugguauggauucagacaccagaacuccgagggccggggccaagcugccgaccuuaagagcacccaggcugccauugaucagaucaaugggaaacucaacagacugauuggaaagacaaaugaaaaauuccaccagaucgagaaggaauuuucugagguugaaggccgcauucaagaccuugagaaguacguggaggauaccaaaaucgaccugugguccuauaacgccgaacuccugguggcucuggagaaccagcauacgaucgaucucacagacagcgaaaugaauaagcuguucgagaaaaccaagaaacagcuucgggaaaacgcggaggauauggggaauggaugcuuuaagauuuaccacaagugugacaacgccugcaucggcucuauuagaaaugggaccuauaaccaugaugucuaccgcgacgaggcucugaauaaccgguuccagaucaaaggcguggaacucaaguccggauacaaagacuggauucuguggaucagcuuugccaucuccugcuuccuucuguguguugcccuccugggcuuuauuaugugggcuugccaaaaggggaauaucagauguaacauuugcaucuga

SEQ ID NO: 201525 - RNA, 1701 nt, Artificial Sequence
  derived and/or modified CDS sequence (opt5) from hemagglutinin__InfluenzaA__AFN19423
augaagaccaucauugcccugagcuacauccucugccugguguucgcucagaaacuucccggcaacgacaauuccacagccacgcugugucucgggcaccaugcggucccuaacggaaccauuguuaagacaaucaccaaugauagaauugaggugacaaacgcuaccgaacuggugcaaaauucuagcaucggcgagaucugcgacuccccgcaccagauucuugauggggaaaacuguacacugaucgacgcccuccugggagauccccagugcgacggcuuucagaauaaaaagugggaucuguucgucgagcggucuaaagccuauagcaacuguuacccuuaugacgugcccgauuacgcuucccuccgcucucugguugccagcuccgggacccuugaauuuaauaacgagagcuucaauuggacgggagugacccaaaacggcacaucuuccgcuugcauuagacggagcaauaacuccuuuuucucucgccugaauuggcucacccaucugaacuuuaaguauccugcccuuaacgucacaaugcccaauaacgagcaguucgacaagcuguacaucuggggcgugcaccauccugggaccgauaaagaccagauuuuucucuaugcgcagagcucuggaagaaucacgguuuccacaaagcggagccaacaggccgugauuccgaauaucggcucccgccccagaauccggaacauuccuucucgcaucagcauuuacuggaccaucgucaaacccggggauauucugcugaucaauuccacaggaaaccucaucgcuccuagaggcuacuucaagauucggagcgggaaaucuuccaucaugcgcagcgacgcccccauuggaaaguguaagucugaaugcaucaccccgaauggcagcauuccuaacgacaaacccuuucagaaugugaacagaaucaccuauggcgcuuguccucgguacgugaagcaguccacacugaaacuugccacggggaugcgcaauguccccgagaagcaaaccagaggaaucuucggcgcgauugccggguuuaucgaaaacggaugggagggcaugguugaugggugguauggauuccggcaccaaaauucugagggcagaggccaggcugccgaccugaaaagcacacaggcugccauugaucagaucaacgggaagcucaaucgccugauuggaaaaaccaacgaaaaguuccaccagaucgagaaggaauuuuccgagguggaaggccggauucaggaccuugagaaauacguggaggauacaaagaucgaccuguggagcuauaacgccgaacuccuggucgcucuggagaaucaacauaccaucgaucucacggacucugaaaugaacaaacuguucgagaagaccaaaaagcagcuuagagaaaaugcggaggauauggggaacggaugcuuuaagauuuaccacaaaugugacaaugccugcaucggcuccauucgcaacgggacauaugaucaugacguguaccgggacgaggcucugaauaacagauuccagaucaagggcguugaacucaaaagcggauacaaggauuggauucuguggaucucuuuugccaucuccugcuuccuucuguguguggcccuccugggcuuuauuaugugggcuugccagaaagggaauauccgcuguaacauuugcaucuga

SEQ ID NO: 201526 - RNA, 1701 nt, Artificial Sequence; identical to SEQ ID NO: 201502
  derived and/or modified CDS sequence (opt5) from hemagglutinin__InfluenzaA__AFN19425

SEQ ID NO: 201527 - RNA, 1701 nt, Artificial Sequence
  derived and/or modified CDS sequence (opt5) from hemagglutinin__InfluenzaA__AFN19437
augaagaccaucauugcccugagcuacauccucugccugguguucgcucagaaacuucccggcaacgacaauuccacagccacgcugugucucgggcaccaugcggucccuaacggaaccauuguuaagacaaucaccaaugaucaaauugaggugacaaacgcuaccgaacuggugcaaaauucuagcaucggcgagaucugcgacuccccgcaccagauucuugauggggaaaacuguacacugaucgacgcccuccugggagauccccagugcgacggcuuucagaauaaaaagugggaucuguucgucgagagaucuaaagccuauagcaacuguuacccuuaugacgugcccgauuacgcuucccuccggucucugguugccagcuccgggacccuugaauuuaauaacgagagcuucaauuggacgggagugacccagaacggcacaucuuccgcuugcauucgcagaagcaauucuuccuuuuucagccggcugaacuggcucacccaucugaauuuuaaguauccugcccuuaacgucacaaugcccaacaaugagcaguucgacaagcuguacaucuggggcgugcaccauccugggaccgauaaagaccagauuuuucucuaugcgcaaucuuccggacgcaucacgguuagcacaaagagaucccagcaggccgugauuccgaacaucggcucucggccccgcaucagaaauauuccuagccggaucuccauuuacuggaccaucgucaaacccggggauauucugcugaucaacagcacaggaaaucucaucgcuccucgcggcuacuucagaauuagaucugggaaguccagcaucaugcgcucugacgcccccauuggaaaauguaacagcgaaugcaucaccccgaauggcuccauuccuaacgacaagcccuuucagaaugugaacagaaucaccuauggcgcuuguccucgguacgugaagcaaucuacacugaaacuugccacggggaugcgcaauguccccgagaagcagaccagaggaaucuucggcgcgauugccggguuuaucgaaaacggaugggagggcaugguugaugggugguauggauuccggcaccagaauagcgagggcagaggccaagcugccgaccugaaauccacacaggcugccauugaucagaucaaccgcaagcucaaucggcugauugggaaaaccaacgaaaaguuccaccagaucgagaaagaauuuagcgagguggaaggacggauucaagaccuugagaaguacguggaggauacaaagaucgaccuguggucuuauaacgccgaacuccuggucgcucuggagaaucagcauaccaucgaucucacggacuccgaaaugaacaaacuguucgagaagaccaaaaagcagcuucgcgaaaaugcggaggauaugggcaacgggugcuuuaaaauuuaccacaagugugacaaugccugcaucggaagcauucggaacggcacauaugaucauuacguguacagagacgaggcucugaauaaccgcuuccagaucaaggggguugaacucaaaucuggcuauaaggacuggauucuguggaucuccuuugccaucagcugcuuccuucuguguguggcccuccugggauuuauuaugugggcuugccaaaaaggcaauauccgguguaacauuugcaucuga

SEQ ID NO: 201528 - RNA, 1701 nt, Artificial Sequence
  derived and/or modified CDS sequence (opt5) from hemagglutinin__InfluenzaA__AFN19439
augaagaccaucauugcccugagccacauccucugccugguguucgcucagaaacuucccgagaacgacaauuccacagccacgcugugucucggccaucacgcggucccuaacgggaccauuguuaagacaaucaccaaugaucaaauugaagugacaaacgcuaccgagcuggugcagucuagcuccacaggagaaaucugcgacucuccgcaucagauccuugauggcauuaauuguacccugaucgacgcccuccugggggauccccagugcgacggauuucaaaacaaaaagugggaucuguucgucgagagaagcaaagccuacuccaauuguuauccuuacgacgugcccgauuaugcuucucuccggagccugguugccuccagcggcacgcuugaauuuaacaaugagucuuucaacuggaccggggugacacagaauggaaccuccagcgcuugcauucgcagaucuaacuccagcuuuuucucucggcugaauuggcucacacaccugaacuuuaaguacccugcccuuaaugucaccaugcccaacaacgagcaguucgacaagcuguauaucuggggcgugcaucacccuggcacggauaaagaccagauuuuucucuacgcgcaaccguccgggcgcaucacaguuagcaccaagagaucccagcaggccgugauucccaauaucggaucucggccucgcaucagaaacauucccagccggaucuccauuuauuggacaaucgucaaaccuggcgauauucugcugaucaauagcaccgggaaccucaucgcuccccgcggauacuucaagauuagaucuggcaaauccagcaucaugcggucugacgccccgauugggaaguguaauagcgaaugcaucaccccuaacggauccauucccaaugacaagccuuuucagaacgugaaucgcaucacauacggcgcuugucccagauaugugaaacaaucuacgcugaaacuugccaccggcaugcggaacguccccgagaagcagacacgcgggaucuucggagcgauugccggcuuuaucgaaaaugggugggagggaaugguugauggcugguacggguucagacaccagaacagcgagggacggggccaagcugccgaccugaaguccacccaggcugccauugaucagaucaauggcaaacucaacagacugauugggaagacaaaugaaaaauuccaucagaucgagaaggaauuuagcgagguggaaggacgcauucaagaccuugagaaguauguggaggauaccaaaaucgaccuguggucuuacaacgccgaacuccuggucgcucuggagaaccagcacacgaucgaucucacagacuccgaaaugaauaagcuguucgagaaaaccaagaaacagcuucgggaaaacgcggaggauaugggcaaugggugcuuuaagauuuaucauaagugugacaacgccugcaucggaagcauuagaaauggcaccuacaaccacgauguguaucgcgacgaggcucugaauaaccgguuccagaucaaagggguugaacucaagucuggcuacaaagacuggauucuguggaucuccuuugccaucagcugcuuccuucuguguguggcccuccugggauuuauuaugugggcuugccaaaagggcaauaucagauguaacauuugcaucuga

SEQ ID NO: 201529 - RNA, 1701 nt, Artificial Sequence; identical to SEQ ID NO: 201503
  derived and/or modified CDS sequence (opt5) from hemagglutinin__InfluenzaA__AFN19443

SEQ ID NO: 201530 - RNA, 1701 nt, Artificial Sequence
  derived and/or modified CDS sequence (opt5) from hemagglutinin__InfluenzaA__AFN19445
augaagaccaucauugcccugagcuacauccucugccugguguucgcucagaaacuucccggcaacgacaauuccacagccacgcugugucucgggcaccaugcggucccuaacggaaccauuguuaagacaaucaccaaugauagaauugaggugacaaacgcuaccgaacuggugcaaaauucuagcaucggcgagaucugcgacuccccgcaccagauucuugauggggaaaacuguacacugaucgacgcccuccugggagauccccagugcgacggcuuucagaauaaaaagugggaucuguucgucgagcggucuaaagccuauagcaacuguuacccuuaugacgugcccgauuacgcuucccuccgcucucugguugccagcuccgggacccuugaauuuaauaacgagagcuucaauuggacgggagugacccaaaacggcacaucuuccgcuugcauuagacggagcaauaacagcuuuuucucccgccugaauuggcucacccaucugaacuuuaaguauccugcccuuaacgucacaaugcccaauaacgagcaguucgacaagcuguacaucuggggcgugcaccauccugggaccgauaaagaccagauuuuucucuaugcgcagagcucuggaagaaucacgguuuccacaaagcggagccaacaggccgugauuccgaauaucggcucccgccccagaauccggaacauuccuucucgcaucagcauuuacuggaccaucgucaaacccggggauauucugcugaucaauuccacaggaaaccucaucgcuccuagaggcuacuucaagauucggagcgggaaaucuuccaucaugcgcagcgacgcccccauuggaaaguguaagucugaaugcaucaccccgaauggcagcauuccuaacgacaaacccuuucagaaugugaacagaaucaccuauggcgcuuguccucgguacgugaagcaguccacacugcgccuugccacggggaugagaaauguccccgagaaacaaacccggggaaucuucggcgcgauugccggguuuaucgaaaacggaugggagggcaugguugaugggugguauggauucagacaccaaaauucugagggccgcggccaggcugccgaccugaagucuacacaggcugccauugaucagaucaacgggaaacucaaucggcugauuggaaagaccaacgaaaaauuccaccagaucgagaaggaauuuuccgagguggaaggccgcauucaggaccuugagaaguacguggaggauacaaaaaucgaccuguggagcuauaacgccgaacuccuggucgcucuggagaaucaacauaccaucgaucucacggacucugaaaugaacaagcuguucgagaaaacaaagaaacagcuuagagaaaaugcggaggauauggggaacggaugcuuuaagauuuaccacaagugugacaaugccugcaucggcuccauucggaacgggaccuaugaucaugacguguacagagacgaggcucugaauaaccgcuuccagaucaaaggcguugaacucaagagcggauacaaagauuggauucuguggaucucuuuugccaucuccugcuuccuucuguguguggcccuccugggcuuuauuaugugggcuugccagaaggggaauauccgguguaacauuugcaucuga

SEQ ID NO: 201531 - RNA, 1701 nt, Artificial Sequence; identical to SEQ ID NO: 201525
  derived and/or modified CDS sequence (opt5) from hemagglutinin__InfluenzaA__AFN19447

SEQ ID NO: 201532 - RNA, 1701 nt, Artificial Sequence
  derived and/or modified CDS sequence (opt5) from hemagglutinin__InfluenzaA__AFN19451
augaagaccaucauugcccugagcuacauccucugccugguguucgcucagaaacuucccggcaacgacaauuccacagccacgcugugucucgggcaccaugcggucccuaacggaaccauuguuaagacaaucaccaaugaucaaauugaggugacaaacgcuaccgaacuggugcaaaauucuagcaucggcgagaucugcgacuccccgcaccagauucuugauggggaaaacuguacacugaucgacgcccuccugggagauccccagugcgacggcuuucagaauaaaaagugggaucuguucgucgagagaucuaaagccuauagcaacuguuacccuuaugacgugcccgauuacgcuucccuccggucucugguugccagcuccgggacccuugaauuuaauaacgagagcuucaauuggacgggagugacccagaacggcacaucuuccgcuugcauucgcagaagcaauucuuccuuuuucagccggcugaacuggcucacccaucugaauuuuaaguauccugcccuuaacgucacaaugcccaacaaugagcaguucgacaagcuguacaucuggggcgugcaccauccugggaccgauaaagaccagauuuuucucuaugcgcaaucuuccggacgcaucacgguuagcacaaagagaucccagcaggccgugauuccgaacaucggcucucggccccgcaucagaaauauuccuagccggaucuccauuuacuggaccaucgucaaacccggggauauucugcugaucaacagcacaggaaaucucaucgcuccucgcggcuacuucaagauuagaucugggaaauccagcaucaugcggucugacgcccccauuggaaaguguaacagcgaaugcaucaccccgaauggcuccauuccuaacgacaagcccuuucagaaugugaaccgcaucaccuauggcgcuuguccuagauacgugaaacaaucuacacugaaacuugccacggggaugcggaauguccccgagaagcagacccgcggaaucuucggcgcgauugccggguuuaucgaaaacggaugggagggcaugguugaugggugguauggauucagacaccagaauagcgagggccggggccaagcugccgaccugaaguccacacaggcugccauugaucagaucaacgggaaacucaauagacugauuggaaagaccaacgaaaaauuccaccagaucgagaaggaauuuagcgagguggaaggccgcauucaagaccuugagaaguacguggaggauacaaaaaucgaccuguggucuuauaacgccgaacuccuggucgcucuggagaaucagcauaccaucgaucucacggacuccgaaaugaacaagcuguucgagaaaacaaagaaacagcuucgggaaaaugcggaggauauggggaacggaugcuuuaagauuuaccacaagugugacaaugccugcaucggcagcauuagaaacgggaccuaugaucaugacguguaccgcgacgaggcucugaauaaccgguuccagaucaauggcguugaacucaaaucuggauacaaggauuggauucuguggaucuccuuugccaucagcugcuuccuucuguguguggcccuccugggcuuuauuaugugggcuugccaaaaagggaacaucagauguaauauuugcaucuga

SEQ ID NO: 201533 - RNA, 1701 nt, Artificial Sequence
  derived and/or modified CDS sequence (opt5) from hemagglutinin__InfluenzaA__AFN19453
augaagaccaucauugcccugagcuacauccucugccugguguucgcucagaaacuucccggcaacgacaauuccacagccacgcugugucucgggcaccaugcggucccuaacggaaccauuguuaagacaaucaccaaugaucaaauugaggugacaaacgcuaccgaacuggugcaaaauucuagcaucggcgagaucugcgacuccccgcaccagauucuugauggggaaaacuguacacugaucgacgcccuccugggagauccccagugcgacggcuuucagaauaaaaagugggaucuguucgucgagagaucuaaagccuauagcaacuguuacccuuaugacgugcccgauuacgcuucccuccggucucugguugccagcuccgggacccuugaauuuaauaacgagagcuucaauuggacgggagugacccagaacggcacaucuuccgcuugcauucgcagaagcaauucuuccuuuuucagccggcugaacuggcucacccaucugaauuuuaaguauccugcccuuaacgucacaaugcccaacaaugagcaguucgacaagcuguacaucuggggcgugcaccauccugggaccgauaaagaccagauuuuucucuaugcgcaaucuuccggacgcaucacgguuagcacaaagagaucccagcaggccgugauuccgaacaucggcucucggccccgcaucagaaauauuccuagccggaucuccauuuacuggaccaucgucaaacccggggauauucugcugaucaacagcacaggaaaucucaucgcuccucgcggcuacuucaagauuagaucugggaaauccagcaucaugcggucugacgcccccauuggaaaguguaacagcgaaugcaucaccccgaauggcuccauuccuaacgacaagcccuuucagaaugugaaccgcaucaccuauggcgcuuguccuagauacgugaaacaaucuacacugaaacuugccacggggaugcggaauguccccgagaagcagacccgcggaaucuucggcgcgauugccggguuuaucgaaaacggaugggagggcaugguugaugggugguauggauucagacaccagaauagcgagggccggggccaagcugccgaccugaaguccacacaggcugccauugaucagaucaacgggaaacucaauagacugauuggaaagaccaacgaaaaauuccaccagaucgagaaggaauuuagcgagguggaaggccgcauucaagaccuugagaaguacguggaggauacaaaaaucgaccuguggucuuauaacgccgaacuccuggucgcucuggagaaucagcauaccaucgaucucacggacuccgaaaugaacaagcuguucgagaaaacaaagaaacagcuucgggaaaaugcggaggauauggggaacggaugcuuuaagauuuaccacaagugugacaaugccugcaucggcagcauuagaaacgggaccuaugaucaugacguguaccgcgacgaggcucugaauaaccgguuccagguuaaaggcguggaacucaagucuggauacaaagauuggauccuguggauuuccuuugccaucagcugcuuccuucugugugucgcccuccugggcuuuaucaugugggcuugccaaaaggggaauauuagauguaacaucugcauuuga

SEQ ID NO: 201534 - RNA, 1701 nt, Artificial Sequence; identical to SEQ ID NO: 201525
  derived and/or modified CDS sequence (opt5) from hemagglutinin__InfluenzaA__AFN19455

SEQ ID NO: 201535 - RNA, 1701 nt, Artificial Sequence; identical to SEQ ID NO: 201146
  derived and/or modified CDS sequence (opt5) from hemagglutinin__InfluenzaA__AFN19457

SEQ ID NO: 201536 - RNA, 1701 nt, Artificial Sequence; identical to SEQ ID NO: 201146
  derived and/or modified CDS sequence (opt5) from hemagglutinin__InfluenzaA__AFN19459

SEQ ID NO: 201537 - RNA, 1701 nt, Artificial Sequence; identical to SEQ ID NO: 201503
  derived and/or modified CDS sequence (opt5) from hemagglutinin__InfluenzaA__AFN19461

SEQ ID NO: 201538 - RNA, 1701 nt, Artificial Sequence
  derived and/or modified CDS sequence (opt5) from hemagglutinin__InfluenzaA__AFN19465
augaagaccaucauugcccugagcuacauccucugccugguguucgcucagaaacuucccggcaacgacaauuccacagccacgcugugucucgggcaccaugcggucccuaacggaaccauuguuaagacaaucaccaaugaucaaauugaggugacaaacgcuaccgaacuggugcagucuagcuccacaggcgagaucugcgacucuccgcaccagauccuugauggggaaaauuguacccugauugacgcccuccugggagauccccagugcgacggcuuucaaaacaaaaagugggaucuguucgucgagagaagcaaagccuauuccaauuguuacccuuaugacgugcccgauuacgcuucucuccggagccugguugccuccagcgggacgcuugaauuuaacaaugagucuuucaacuggaccggagugacacagaauggcaccuccagcgcuugcauccgcagaucuaacuccagcuuuuucucucggcugaauuggcucacacaucugaacuuuaaguauccugcccuuaaugucaccaugcccaacaacgagcaguucgacaagcuguacauuuggggcgugcaccauccugggacggauaaagaccagaucuuucucuaugcgcaauccagcggacgcauuacaguuuccaccaagagaucucagcaggccgugaucccgaauauuggcagccggccccgcaucagaaacaucccuucccggauuagcaucuacuggacaauugucaaacccggggauauccugcugauuaauucuaccggaaaccucaucgcuccucgcggcuacuucaagaucagauccgggaaaagcucuauuaugcggagcgacgcccccaucggaaaguguaauuccgaaugcauuaccccgaacggcucuaucccuaaugacaagcccuuucagaacgugaaucgcauuacauauggcgcuuguccuagauacgugaaacaaagcacgcugaagcuggccaccgggaugcggaacguccccgagaaacagacacgcggaaucuucggcgcgaucgccggguuuauugaaaauggaugggagggcaugguugaugggugguauggauucagacaccagaacuccgagggccggggccaagcugccgaccuuaagagcacccaggcugccaucgaucagauuaaugggaaacucaacagacugaucggaaagacaaaugaaaaauuccaccagauugagaaggaauuuucugagguggaaggccgcauccaagaccuugagaaguacguggaggauaccaaaauugaccugugguccuauaacgccgaacuccuggucgcucuggagaaccagcauacgaucgaucucacagacagcgaaaugaauaagcuguucgagaaaaccaagaaacagcuucgggaaaacgcggaggauaucgggaauggaugcuuuaagauuuaccacaagugugacaacgccugcaucggcucuauuagaaaugggaccuauaaccaugauguguaccgcgacgaggcucugaauaaccgguuccagaucaaaggcguugaacucaaguccggauacaaagacuggauucuguggaucagcuuugccaucuccugcuuccuucuguguauugcccuccugggcuuuaucaugugggcuugccaaaaggggaauauuagauguaacaucugcauuuga

SEQ ID NO: 201539 - RNA, 1701 nt, Artificial Sequence; identical to SEQ ID NO: 201525
  derived and/or modified CDS sequence (opt5) from hemagglutinin__InfluenzaA__AFN19467

SEQ ID NO: 201540 - RNA, 1701 nt, Artificial Sequence; identical to SEQ ID NO: 201533
  derived and/or modified CDS sequence (opt5) from hemagglutinin__InfluenzaA__AFN19469

SEQ ID NO: 201541 - RNA, 1701 nt, Artificial Sequence; identical to SEQ ID NO: 201146
  derived and/or modified CDS sequence (opt5) from hemagglutinin__InfluenzaA__AFN19471

SEQ ID NO: 201542 - RNA, 1701 nt, Artificial Sequence
  derived and/or modified CDS sequence (opt5) from hemagglutinin__InfluenzaA__AFN19473
augaagaccaucauugcccugagcuacauccucugccugguguucgcucagaaacuucccggcaacgacaauuccacagccacgcugugucucgggcaccaugcggucccuaacggaaccauuguuaagacaaucaccaaugaucaaauugaggugacaaacgcuaccgaacuggugcagucuagcuccacaggcgagaucugcgggucuccgcaccagauccuugacggagaaaauuguacccugauugaugcccuccugggcgacccccagugcgauggguuucaaaacaaaaagugggaccuguucgucgagagaagcaaagccuauuccaauuguuacccuuaugaugugcccgacuacgcuucucuccggagccugguugccuccagcggaacgcuugaauuuaacaaugagucuuucaacuggaccggcgugacacagaauggcaccuccagcgcuugcauccgcagaucuaacuccagcuuuuucucucggcugaauuggcucacacaucugaacuuuaaguauccugcccuuaaugucaccaugcccaacaacgagcaguucgauaagcuguacauuuggggagugcaccauccugggacggacaaagaucagaucuuucucuaugcgcaauccagcggccgcauuacaguuuccaccaagagaucucagcaggccgugaucccgaauauugggagccggccccgcaucagaaacaucccuucccggauuagcaucuacuggacaauugucaaacccggagacauccugcugauuaauucuaccggcaaccucaucgcuccucgcggguacuucaagaucagauccggaaaaagcucuauuaugcggagcgaugcccccaucggcaaguguaauuccgaaugcauuaccccgaacggcucuaucccuaaugacaagcccuuucagaacgugaaucgcauuacauauggggcuuguccuagauacgugaaacaaagcacgcugaagcuggccaccggaaugcggaacguccccgagaaacagacacgcggcaucuucggggcgaucgccggauuuauugaaaauggcugggaggggaugguugacggaugguauggcuucagacaccagaacuccgagggccgggggcaagcugccgaucuuaagagcacccaggcugccaucgaccagauuaauggaaaacucaacagacugaucggcaagacaaaugaaaaauuccaccagauugagaaggaauuuucugagguggaagggcgcauccaagaucuugagaaguacguggaggacaccaaaauugaucugugguccuauaacgccgaacuccuggucgcucuggagaaccagcauacgaucgaccucacagauagcgaaaugaauaagcuguucgagaaaaccaagaaacagcuucgggaaaacgcggaggacaugggaaauggcugcuuuaagaucuaccacaagugugauaacgccugcauugggucuaucagaaauggcaccuauaaccaugacguguaccgcgaugaggcucugaauaaccgguuccagauuaaaggaguugaacucaaguccggcuacaaagacuggauccuguggauuagcuuugccaucuccugcuuccuucuguguguggcccuccugggguuuaucaugugggcuugccaaaagggaaauauuagauguaacaucugcauuuga

SEQ ID NO: 201543 - RNA, 1701 nt, Artificial Sequence; identical to SEQ ID NO: 201525
  derived and/or modified CDS sequence (opt5) from hemagglutinin__InfluenzaA__AFN19475

SEQ ID NO: 201544 - RNA, 1701 nt, Artificial Sequence; identical to SEQ ID NO: 201146
  derived and/or modified CDS sequence (opt5) from hemagglutinin__InfluenzaA__AFN19477

SEQ ID NO: 201545 - RNA, 1701 nt, Artificial Sequence
  derived and/or modified CDS sequence (opt5) from hemagglutinin__InfluenzaA__AFN19479
augaagaccaucauugcccugagcugcauccucugucugguguucgcucagaaacuucccggcaacgacaauuccacagccacgcugugccucgggcaccaugcggucccuaacggaaccauuguuaagacaaucaccaaugaucaaauugaggugacaaacgcuaccgaacuggugcaaaauucuagcaucggcgagaucugugacuccccgcaccagauucuugauggggaaaacugcacacugaucgacgcccuccugggagauccccagugugacggcuuucagaauaaaaagugggaucuguucgucgagagaucuaaagccuacagcaacugcuauccuuacgacgugcccgauuaugcuucccuccggucucugguugccagcuccgggacccuugaauuuaauaacgagagcuucaauuggacgggagugacccagaacggcacaucuuccgcuuguauucgcagaagcaauucuuccuuuuucagccggcugaacuggcucacccaucugaauuuuaaguacccugcccuuaacgucacaaugcccaacaaugagcaguucgacaagcuguauaucuggggcgugcaccauccugggaccgauaaagaccagauuuuucucuacgcgcaaucuuccggacgcaucacgguuagcacaaagagaucccagcaggccgugauuccgaacaucggcucucggccccgcaucagaaauauuccuagccggaucuccauuuauuggaccaucgucaaacccggggauauucugcugaucaacagcacaggaaaucucaucgcuccucgcggcuacuucaagauuagaucugggaaauccagcaucaugcggucugacgcccccauuggaaagugcaacagcgaauguaucaccccgaauggcuccauuccuaacgacaagcccuuucagaaugugaaccgcaucaccuacggcgcuugcccuagauaugugaaacaaucuacacugaaacuugccacggggaugcggaauguccccgagaagcagacccgcggaaucuucggcgcgauugccggguuuaucgaaaacggaugggagggcaugguugaugggugguacggauucagacaccagaauagcgagggccggggccaagcugccgaccugaaguccacacaggcugccauugaucagaucaacgggaaacucaauagacugauuggaaagaccaacgaaaaauuccaccagaucgagaaggaauuuagcgagguggaaggccgcauucaagaccuugagaaguauguggaggauacaaaaaucgaccuguggucuuacaacgccgaacuccuggucgcucuggagaaucagcauaccaucgaucucacggacuccgaaaugaacaagcuguucgagaaaacaaagaaacagcuucgggaaaaugcggaggauauggggaacggauguuuuaagauuuaucacaagugcgacaaugccugcaucggcagcauuagaaacgggaccuacgaucaugacguguaucgcgacgaggcucugaauaaccgguuccagaucaaaggcguugaacucaagucuggauacaaagauuggauucuguggaucuccuuugccaucagcuguuuccuucugugcguggcccuccugggcuuuauuaugugggcuugucaaaaggggaauaucagaugcaacauuuguaucuga

SEQ ID NO: 201546 - RNA, 1701 nt, Artificial Sequence; identical to SEQ ID NO: 201525
  derived and/or modified CDS sequence (opt5) from hemagglutinin__InfluenzaA__AFN19483

SEQ ID NO: 201547 - RNA, 1701 nt, Artificial Sequence; identical to SEQ ID NO: 198927
  derived and/or modified CDS sequence (opt5) from hemagglutinin__InfluenzaA__AFN19485

SEQ ID NO: 201548 - RNA, 1701 nt, Artificial Sequence; identical to SEQ ID NO: 201146
  derived and/or modified CDS sequence (opt5) from hemagglutinin__InfluenzaA__AFN19487

SEQ ID NO: 201549 - RNA, 1701 nt, Artificial Sequence
  derived and/or modified CDS sequence (opt5) from hemagglutinin__InfluenzaA__AFN19491
augaagaccaucauugcccugagcuacauccucugccugguguucgcucagaaacuucccggcaacgacaauuccacagccacgcugugucucgggcaccaugcggucccuaacggaaccauuguuaagacaaucaccaaugaucaaauugaggugacaaacgcuaccgaacuggugcagucuagcuccacaggcgagaucugcgacucuccgcaccagauccuugauggggaaaauuguacccugauugacgcccuccugggagauccccagugcgacggcuuucaaaacaaaaagugggaucuguucgucgagagaagcaaagccuauuccaauuguuacccuuaugacgugcccgauuacgcuucucuccggagccugguugccuccagcgggacgcuugaauuuaacaaugagucuuucaacuggaccggagugacacagaauggcaccuccagcgcuugcauccgcagaucuaacuccagcuuuuucucucggcugaauuggcucacacaucugaacuuuaaguauccugcccuuaaugucaccaugcccaacaacgagcaguucgacaagcuguacauuuggggcgugcaccauccugggacggauaaagaccagaucuuucucuaugcgcaauccagcggacgcauuacaguuuccaccaagagaucucagcaggccgugaucccgaauauuggcagccggccccgcaucagaaacaucccuucccggauuagcaucuacuggacaauugucaaacccggggauauccugcugauuaauucuaccggaaaccucaucgcuccucgcggcuacuucaagaucagauccgggaaaagcucuauuaugcggagcgacgcccccaucggaaaguguaauuccgaaugcauuaccccgaacggcucuaucccuaaugacaagcccuuucagaacgugaaucgcauuacauauggcgcuuguccuagauacgugaaacaaagcacgcugaagcuggccaccgggaugcggaacguccccgagaaacagacacgcggaaucuucggcgcgaucgccggguuuauugaaaauggaugggagggcaugguugaugggugguauggauucagacaccagaacuccgagggccggggccaagcugccgaccuuaagagcacccaggcugccaucgaucagauuaaugggaaacucaacagacugaucggaaagacaaaugaaaaauuccaccagauugagaaggaauuuucugagguggaaggccgcauccaagaccuugagaaguacguggaggauaccaaaauugaccugugguccuauaacgccgaacuccuggucgcucuggagaaccagcauacgaucgaucucacagacagcgaaaugaauaagcuguucgagaaaaccaagaaacagcuucgggaaaacgcggaggauauggggaauggaugcuuuaagaucuaccacaagugugacaacgccugcauuggcucuaucagaaaugggaccuauaaccaugauguguaccgcgacgaggcucugaauaaccgguuccagauuaaaggcguugaacucaaguccggauacaaagacuggauccuguggauuagcuuugccaucuccugcuuccuucugugugugguccuccugggcuuuaucaugugggccugccaaaaggggaauauuagauguaacaucugcauuuga

SEQ ID NO: 201550 - RNA, 1701 nt, Artificial Sequence
  derived and/or modified CDS sequence (opt5) from hemagglutinin__InfluenzaA__AFN19493
augaagaccaucauugcccugagcuacauccucugccugguguucgcucagaaacuucccggcaacgacaauuccacagccacgcugugucucgggcaccaugcggucccuaacggaaccauuguuaagacaaucaccaaugaucaaauugaggugacaaacgcuaccgaacuggugcagucuagcuccacaggcgagaucugcaauucuccgcaccagauccuugacggggaaaacuguacccugauugaugcccuccugggagacccccagugcgauggcuuucaaaauaaaaagugggaccuguucgucgagagaagcaaagcccauuccaacuguuauccuuacgaugugcccgacuaugcuucucuccggagccugguugccuccagcgggacgcuugaauuuaauaacgagucuuucaauuggaccggagugacacagaacggcaccuccagcgcuugcauccgcagaucuaauaacuccuuuuucagccggcugaauuggcucacacaccugaacuuuaaguacccugcccuuaacgucaccaugcccaauaacgagcaguucgauaagcuguauauuuggggcgugcaucacccugggacggacaaagaucagaucuuucucuacgcgcaagccucuggacgcauuacaguuuccaccaagagaagccagcagacagugaucccgaauauuggcucccggccccgcgucagaaacaucccuucucgggugagcaucuauuggaccauugugaaacccggggacauccugcugauuaauuccaccggaaaccucaucgcuccucgcggcuacuucaagauuagaagcgggaaaucuuccaucaugcggagcgaugcccccaucggaaaguguaauucugcuugcauuacaccgaacggcagcaucccuaaugacaagcccuuucagaacgucaaucgcauuacguacggcgccuguccuagauauguuaaacaaaacacccugaaacuugcgacagggaugcggaaugugcccgaaaaacagacccgcggaaucuucggcgccauugcuggguuuaucgagaacggaugggaaggcaugguggacgggugguacggauucagacaccaaaauuccgagggccggggccaggccgcugaucugaagucuacacaggccgccaucgaccagauuaacgggaaacucaacagacugaucggaaagaccaaugagaaauuccaucagauugaaaaggaguuuagcgaagucgagggccgcauccaagaucuugaaaaguauguggaggacacgaaaauugaucugugguccuacaacgcugagcuccugguugcgcuggaaaaucagcacacaaucgaccucaccgauagcgagaugaacaagcuguucgaaaagaccaagaaacagcuucgggagaaugccgaagacauggggaacggaugcuuuaagauuuaucauaagugugauaaugcuugcaucggcucuaucagaaacgggacauacgaccacgauguguaucgcgacgaggcccugaauaaccgguuccagauuaaaggcgucgagcucaaguccggauacaaagacuggauccuguggauuagcuuugccaucucuugcuuccuucuguguguggcucuccugggcuuuauuaugugggccugccaaaaggggaauaucagauguaacaucugcauuuga

SEQ ID NO: 201551 - RNA, 1701 nt, Artificial Sequence
  derived and/or modified CDS sequence (opt5) from hemagglutinin__InfluenzaA__AFN19495
augaagaccaucauugcccugagcuacauccucugccugguguucgcucagaaaauucccggcaacgacaauuccacagccacgcuuugucuggggcaccaugcggucccuaacggaaccaucguuaagacaauuaccaaugaucaaaucgaggugacaaacgcuaccgaacucgugcagucuagcuccgccggcgagaucugcgacucuccgcaccauauucuggauggggaaaauuguacacuuaucgacgcccugcucggagauccccagugcgacggcuuucagaacaaaaagugggaucuguucgucgagagaagccgggcuuauuccaauuguuacccuuaugacgugcccgauuacgccucucugcgcagccucguugcuuccagcgggacccuggaauuuaacaaugagucuuucaacuggacgggagugacccaaaauggcacauccagcgccugcauuagacggucuaacaauuccuuuuucagccgccuuaacuggcugacccaccucaauuuuaaauauccugcgcugaacgucacaaugcccaacaaugagcaguucgacaaacuuuacaucuggggcgugcaucacccugggaccgauaaggaccagauuuuucuguaugcccaggcuucuggaagaaucacgguuuccacaaaacggagccaacaggccgugauuccgaacaucggcucccgccccagaguccggaauaucccuucucgcauuagcaucuacuggaccauugugaagcccggggauauccuccugauuaacuccacaggaaaucugaucgcuccuagaggcuacuucaaaauccggagcgggaagucuuccauuaugcgcagcgacgcccccaucggaaaauguaacucugaaugcauuaccccgaauggcagcaucccuaacgacaagcccuuucagaaugugaacagaauuaccuauggcgcguguccucgguacgucaagcaguccacacucaaacuggccacggggaugcgcaauguucccgagaagcaaaccagaggaaucuucggcgcuaucgccggguuuauugaaaacggaugggagggcaugauggaugggugguauggauuccggcaccaaaauucugagggcagaggccaggcugccgaccuuaaaagcacacaggccgcuaucgaucagauuaacgggaagcugaaucgccucaucggaaaaaccaacgaaaaguuccaucagauugagaaagaauuuuccgagguggaaggccggauccaggaccuggagaaguacguggaggauacaaagauugaccuuuggagcuauaacgcggaacugcucgucgcccuggagaaucaacacaccaucgaucugacggacucugaaaugaacaaacucuucgagaagacaaagaagcagcugagagaaaaugcugaggauauggggaacggaugcuuuaaaaucuaccauaagugugacaaugccugcauuggcuccauccgcaacgggaccuaugaucacgacguguaccgggacgaggcccuuaauaacagauuccagauuaagggcguugaacugaaaagcggauacaaggauuggauccucuggauuucuuuugcuaccuccugcuuccugcuuuguguggcccugcucggcuuuaucaugugggcgugccagaaagggaauauccgcuguaacauuugcaucuga

SEQ ID NO: 201552 - RNA, 1701 nt, Artificial Sequence
  derived and/or modified CDS sequence (opt5) from hemagglutinin__InfluenzaA__AFN19497
augaagaccaucauugcccugagcuacauccucugccugguguucgcucagaaacuucccgagaacgacaauuccacagccacgcugugucucggccaccaugcggucccuaacgggaccauuguuaagacaaucaccaaugaucaaauugaagugacaaacgcuaccgagcuggugcagucuagcuccacaggagaaaucugcaauucuccgcaccagauccuugacggcgagaacuguacccugauugaugcccuccugggggacccccagugcgauggauuucaaaauaaaaagugggaccuguucgucgaaagaagcaaagcccauuccaacuguuauccuuacgaugugcccgacuaugcuucucuccggagccugguugccuccagcggcacgcuugaguuuaauaacgagucuuucaauuggaccggggugacacagaacggaaccuccagcgcuugcauccgcagaucuaauaacuccuuuuucagccggcugaauuggcucacacaccugaacuuuaaguacccugcccuuaacgucaccaugcccaauaacgaacaguucgauaagcuguauauuuggggcgugcaucacccuggcacggacaaagaucagaucuuucucuacgcgcaagccucugggcgcauuacaguuuccaccaagagaagccagcaggcugugaucccgaauauuggaucccggccccgcgucagaaacaucccuucucgggugagcaucuauuggacaauugugaaacccggcgacauccugcugauuaauuccaccgggaaccucaucgccccucgcggauacuucaagauuagaagcggcaaaucuuccaucaugcggagcgaugcucccaucgggaaguguaauucuaccugcauuacaccgaacggaagcaucccuaaugacaagcccuuucagaacgucaaucgcauuacguacggcgccuguccuagauauguuaaacaaaacacccugaaacuugcgacaggcaugcggaaugugcccgagaagcagacccgcgggaucuucggagccauugcuggcuuuaucgaaaacgggugggagggaaugguggacggcugguacggguucagacaccaaaauuccgagggacggggccaggccgcugaucugaagucuacacaggccgccaucgaccagauuaacggcaaacucaacagacugaucgggaagaccaaugaaaaauuccaucagauugagaaggaauuuagcgaggucgaaggacgcauccaagaucuugagaaguauguggaggacacgaaaauugaucugugguccuacaacgcugaacuccugguugcgcuggagaaucagcacacaaucgaccucaccgauagcgaaaugaacaagcuguucgagaaaaccaagaaacagcuucgggaaaaugccgaggacaugggcaacgggugcuuuaagauuuaucauaagugugauaaugcuugcaucggaucuaucagaaacggcacauacgaccacgauguguaucgcgacgaggcccugaauaaccgguuccagauuaaaggggucgaacucaaguccggcuacaaagacuggauccuguggauuagcuuugccaucucuugcuuccuucuguguguggcucuccugggauuuauuaugugggccugccaaaagggcaauaucagauguaacaucugcauuuga

SEQ ID NO: 201553 - RNA, 1701 nt, Artificial Sequence; identical to SEQ ID NO: 201503
  derived and/or modified CDS sequence (opt5) from hemagglutinin__InfluenzaA__AFN19499

SEQ ID NO: 201554 - RNA, 1701 nt, Artificial Sequence; identical to SEQ ID NO: 201502
  derived and/or modified CDS sequence (opt5) from hemagglutinin__InfluenzaA__AFN19501

SEQ ID NO: 201555 - RNA, 1701 nt, Artificial Sequence; identical to SEQ ID NO: 199054
  derived and/or modified CDS sequence (opt5) from hemagglutinin__InfluenzaA__AFN19503

SEQ ID NO: 201556 - RNA, 1701 nt, Artificial Sequence; identical to SEQ ID NO: 201503
  derived and/or modified CDS sequence (opt5) from hemagglutinin__InfluenzaA__AFN19507

SEQ ID NO: 201557 - RNA, 1701 nt, Artificial Sequence; identical to SEQ ID NO: 201502
  derived and/or modified CDS sequence (opt5) from hemagglutinin__InfluenzaA__AFN19509

SEQ ID NO: 201558 - RNA, 1701 nt, Artificial Sequence; identical to SEQ ID NO: 201503
  derived and/or modified CDS sequence (opt5) from hemagglutinin__InfluenzaA__AFN19513

SEQ ID NO: 201559 - RNA, 1701 nt, Artificial Sequence; identical to SEQ ID NO: 201502
  derived and/or modified CDS sequence (opt5) from hemagglutinin__InfluenzaA__AFN19515

SEQ ID NO: 201560 - RNA, 1701 nt, Artificial Sequence; identical to SEQ ID NO: 201503
  derived and/or modified CDS sequence (opt5) from hemagglutinin__InfluenzaA__AFN19517

SEQ ID NO: 201561 - RNA, 1701 nt, Artificial Sequence; identical to SEQ ID NO: 201503
  derived and/or modified CDS sequence (opt5) from hemagglutinin__InfluenzaA__AFN19519

SEQ ID NO: 201562 - RNA, 1701 nt, Artificial Sequence; identical to SEQ ID NO: 201146
  derived and/or modified CDS sequence (opt5) from hemagglutinin__InfluenzaA__AFN19521

SEQ ID NO: 201563 - RNA, 1701 nt, Artificial Sequence; identical to SEQ ID NO: 201502
  derived and/or modified CDS sequence (opt5) from hemagglutinin__InfluenzaA__AFN19523

SEQ ID NO: 201564 - RNA, 1701 nt, Artificial Sequence
  derived and/or modified CDS sequence (opt5) from hemagglutinin__InfluenzaA__AFN19527
augaagaccaucauugcccugagcuacacacucugccugguguucgcucagaaacuucccggcaacgacaauuccacggccacccugugucucgggcaccaugcggucccuaacggaacaaucguuaagaccauuacaaaugaucaaaucgaggugaccaacgcuacagaacuggugcaaaauucuagcauuggcgagaucugcgacuccccgcaccagauccuugauggggaaaacuguacccugauugacgcccuccugggagauccccagugcgacggcuuucagaauaaaaagugggaucuguucgucgagagaucuaaagccuauagcaacuguuacccuuaugacgugcccgauuacgcuucccuccggucucugguugccagcuccgggacgcuugaauuuaauaacgagagcuucaauuggaccggagugacacagaacggcaccucuuccgcuugcauccgcagaagcaauucuuccuuuuucagccggcugaacuggcucacacaucugaauuuuaaguauccugcccuuaacgucaccaugcccaacaaugagcaguucgacaagcuguacauuuggggcgugcaccauccugggacggauaaagaccagaucuuucucuaugcgcaaucuuccggacgcauuacaguuagcaccaagagaucccagcaggccgugaucccgaacauuggcucucggccccgcaucagaaauaucccuagccggauuuccaucuacuggacaauugucaaacccggggauauccugcugauuaacagcaccggaaaucucaucgcuccucgcggcuacuucaagaucagaucugggaaauccagcauuaugcggucugacgcccccaucggaaaguguaacagcgaaugcauuaccccgaauggcuccaucccuaacgacaagcccuuucagaaugugaaccgcauuacauauggcgcuuguccuagauacgugaaacaaucuacgcugaaacuugccaccgggaugcggaauguccccgagaagcagacacgcggaaucuucggcgcgaucgccggguuuauugaaaacggaugggagggcaugguugaugggugguauggauucagacaccagaauagcgagggccggggccaagcugccgaccugaaguccacccaggcugccaucgaucagauuaacgggaaacucaauagacugaucggaaagacaaacgaaaaauuccaccagauugagaaggaauuuagcgagguggaaggccgcauccaagaccuugagaaguacguggaggauaccaaaauugaccuguggucuuauaacgccgaacuccuggucgcucuggagaaucagcauacgaucgaucucacagacuccgaaaugaacaagcuguucgagaaaaccaagaaacagcuucgggaaaaugcggaggauauggggaacggaugcuuuaagaucuaccacaagugugacaaugccugcauuggcagcaucagaaacgggaccuaugaucaugacguguaccgcgacgaggcucugaauaaccgguuccagauuaaaggcguugaacucaagucuggauacaaagauuggauccuguggauuuccuuugccaucagcugcuuccuucuguguguggcccuccugggcuuuaucaugugggcuugccaaaaggggaauauuagauguaacaucugcauuuga

SEQ ID NO: 201565 - RNA, 1701 nt, Artificial Sequence
  derived and/or modified CDS sequence (opt5) from hemagglutinin__InfluenzaA__AFN19529
augaagaccaucauugcccugagcuacauccucugccugguguucgcucagaaacuucccggcaacgacaauuccacagccacgcugugucucgggcaccaugcggucccuaacggaaccauuguuaagacaaucaccaaugaucaaauugaggugacaaacgcuaccgaacuggugcaaaauucuagcaucggcgagaucugcgacuccccgcaccagauucuugauggggaaaacuguacacugaucgacgcccuccugggagauccccagugcgacggcuuucagaauaaaaagugggaucuguucgucgagagaucuaaagccuauagcaacuguuacccuuaugacgugcccgauuacgcuucccuccggucucugguugccagcuccgggacccuugaauuuaauaacgagagcuucaauuggacgggagugacccagaacggcacaucuuccgcuugcauucgcagaagcaauucuuccuuuuucagccggcugaacuggcucacccaucugaauuuuaaguauccugcccuuaacgucacaaugcccaacaaugagcaguucgacaagcuguacaucuggggcgugcaccauccugggaccgauaaagaccagauuuuucucuaugcgcaaucuuccggacgcaucacgguuagcacaaagagaucccagcaggccgugauuccgaacaucggcucucggccccgcaucagaaauauuccuagccggaucuccauuuacuggaccaucgucaaacccggggauauucugcugaucaacagcacaggaaaucucaucgcuccucgcggcuacuucaagauuagaucugggaaauccagcaucaugcggucugacgcccccauuggaaaguguaacagcgaaugcaucaccccgaauggcuccauuccuaacgacaagcccuuucagaaugugaaccgcaucaccuauggcgcuuguccuagauacgugaaacaaucuacacugaaacuugccacggggaugcggaauguccccgagaagcagacccgcggaaucuucggcgcgauugccggguuuaucgaaaacggaugggagggcaugguugaugggugguauggauucagacaccagaauagcgagggccggggccaagcugccgaccugaaguccacacaggcugccauugaucagaucaacgggaaacucaauagacugauuggaaagaccaacgaaaaauuccaccagaucgagaaggaauuuagcgagguggaaggccgcauucaagaccuugagaaguacguggaggauacaaaaaucgaccuguggucuuauaacgccgaacuccuggucgcucuggagaaucagcauaccaucgaucucacggacuccgaaaugaacaagcuguucgagaaaacaaagaaacagcuucgggaaaaugcggaggauauggggaacggaugcuuuaagauuuaccacaagugugacaaugccugcaucggcagcauuagaaacgggaccuaugaucaugacguguaccgcgacgaggcucugaauaaccgguuccagaucaaaggcguugaacucaagucuggauacaaagauuggauucuguggaucuccuuugccaucagcugcuuccuucuguguguggcccuccugggcuuuauuaugugggcuugccaaaaggggaauaucagauguaacauuugcaucuga

SEQ ID NO: 201566 - RNA, 1701 nt, Artificial Sequence; identical to SEQ ID NO: 201146
  derived and/or modified CDS sequence (opt5) from hemagglutinin__InfluenzaA__AFN19531

SEQ ID NO: 201567 - RNA, 1701 nt, Artificial Sequence; identical to SEQ ID NO: 201565
  derived and/or modified CDS sequence (opt5) from hemagglutinin__InfluenzaA__AFN19533

SEQ ID NO: 201568 - RNA, 1701 nt, Artificial Sequence
  derived and/or modified CDS sequence (opt5) from hemagglutinin__InfluenzaA__AFN19535
augaagaccaucauugcccugagcuacauccucugccugguguucgcucagaaaauucccggcaacgacaauuccacagccacgcuuugucuggggcaccaugcggucccuaacggaaccaucguuaagacaauuaccaaugaucaaaucgaggugacaaacgcuaccgaacucgugcagucuagcuccacaggcgagaucugcgacucuccgcaccagauucuggauggggaaaauuguacccuuaucgacgcccugcucggagauccccagugcgacggcuuucaaaacaaaaagugggaucuguucgucgagagaagcaaagccuauuccaauuguuacccuuaugacgugcccgauuacgcuucucugcggagccucguugccuccagcgggacgcuggaauuuaacaaugagucuuucaacuggaccggagugacacagaauggcaccuccagcgcuugcauucgcagaucuaacuccagcuuuuucucucggcuuaauuggcugacacaucucaacuuuaaguauccugcccugaaugucaccaugcccaacaacgagcaguucgacaaacuuuacaucuggggcgugcaccauccugggacggauaaggaccagauuuuucuguaugcgcaauccagcggacgcaucacaguuuccaccaagagaucucagcaggccgugauuccgaauaucggcagccggccccgcaucagaaacauuccuucccggaucagcauuuacuggacaaucgucaaacccggggauauucuccugaucaauucuaccggaaaccugaucgcuccucgcggcuacuucaagauuagauccgggaaaagcucuaucaugcggagcgacgcccccauuggaaaguguaauuccgaaugcaucaccccgaacggcucuauuccuaaugacaagcccuuucagaacgugaaucgcaucacauauggcgcuuguccuagauacgugaaacaaagcacgcucaagcuggccaccgggaugcggaacguccccgagaaacagacacgcggaaucuucggcgcgauugccggguuuaucgaaaauggaugggagggcaugguugaugggugguauggauucagacaccagaacuccgagggccggggccaagcugccgaccuuaagagcacccaggcugccauugaucagaucaaugggaaacugaacagacucauuggaaagacaaaugaaaaauuccaccagaucgagaaggaauuuucugagguggaaggccgcauucaagaccuggagaaguacguggaggauaccaaaaucgaccuuugguccuauaacgccgaacugcucgucgcucuggagaaccagcauacgaucgaucugacagacagcgaaaugaauaaacucuucgagaagaccaagaaacagcugcgggaaaacgcggaggauauggggaauggaugcuuuaagauuuaccacaagugugacaacgccugcaucggcucuauuagaaaugggaccuauaaccaugauguguaccgcgacgaggcucuuaauaaccgguuccagaucaaaggcguugaacugaaguccggauacaaagacuggauucucuggaucagcuuugccaucuccugcuuccugcuuuguguggcccugcucggcuuuauuaugugggcuugccaaaaggggaauaucagauguaacauuugcaucuga

SEQ ID NO: 201569 - RNA, 1701 nt, Artificial Sequence; identical to SEQ ID NO: 201146
  derived and/or modified CDS sequence (opt5) from hemagglutinin__InfluenzaA__AFN19537

SEQ ID NO: 201570 - RNA, 1701 nt, Artificial Sequence; identical to SEQ ID NO: 201146
  derived and/or modified CDS sequence (opt5) from hemagglutinin__InfluenzaA__AFN19539

SEQ ID NO: 201571 - RNA, 1701 nt, Artificial Sequence; identical to SEQ ID NO: 201146
  derived and/or modified CDS sequence (opt5) from hemagglutinin__InfluenzaA__AFN19543

SEQ ID NO: 201572 - RNA, 1701 nt, Artificial Sequence
  derived and/or modified CDS sequence (opt5) from hemagglutinin__InfluenzaA__AFN19545
augaagaccaucauugcccugagcuacauccucugccugguguucgcucagaaacuucccggcuccgacaacucuacagccacgcugugucucgggcaccaugcggucccuaauggaaccauuguuaagacaaucaccaacgauagaauugaggugacaaaugcuaccgaacuggugcaaaacagcuccaucggcgagaucugcgacucuccgcaccagauucuugauggggaaaauuguacacugaucgacgcccuccugggagauccccagugcgacggcuuuaaaaacaagaaaugggaucuguucgucgagcggagcaaggccuauuccaauuguuacccuuaugacgugcccgauuacgcuucucuccgcagccugguugccuccagcgggacccuugaauuuaacaaugagucuuucaacuggacgggagugacccagaauggcacauccagcgcuugcauuagacggucuaacaauuccuuuuucagccgccugaacuggcucacccaucugaauuuuaaguauccugcccuuaacgucacaaugcccaacaaugagcaauucgacaaacuguacaucuggggcgugcaccauccugggaccgauaaggaccagauuuuucucuaugcgcagucuuccggaagaaucacgguuagcacaaaacggucccagcaagccgugauuccgaacaucggcucucgccccagaauccggaauauuccuagccgcaucuccauuuacuggaccaucgucaagcccggggauauucugcugaucaacagcacaggaaaucucaucgcuccuagaggcuacuucaaaauucagucugggaaguccagcaucaugcggucugacgcccccauuggaaaguguaaaagcgaaugcaucaccccgaacggcuccauuccuaaugacaagcccuuucagaacgugaaucgcaucaccuauggcgcuuguccuagauacgugaaacagucuacacugaaacuugccacggggaugcggaacguccccgagaagcaaacccgcggaaucuucggcgcgauugccggguuuaucgaaaauggaugggagggcaugguugaugggugguauggauucagacaccagaacagcgagggccggggccaggcugccgaccugaaguccacacaagcugccauugaucagaucaaugggaaacucaacagacugauuggaaagaccaaugaaaaguuccaccagaucgagaaagaauuuagcgagguggaaggccgcauucaggaccuugagaaguacguggaggauacaaaaaucgaccuguggucuuauaacgccgaacuccuggucgcucuggagaaccaacauaccaucgaucucacggacuccgaaaugaauaagcuguucgagaaaacaaagaagcagcuucgggaaaacgcggaggauauggggaauggaugcuuuaaaauuuaccacaagugugacaacgccugcaucggcagcauuagaaaugggaccuaugaucaugacguguaccgcgacgaggcucugaacaaucgguuccagaucaaaggcguugaacucaagucuggauacaaagauuggauucuguggaucuccuuugccaucagcugcuuccuucuguguguggcccuccugggcuuuauuaugugggcuugccagaaggggaacaucagauguaauauuugcaucuga

SEQ ID NO: 201573 - RNA, 1701 nt, Artificial Sequence; identical to SEQ ID NO: 201146
  derived and/or modified CDS sequence (opt5) from hemagglutinin__InfluenzaA__AFN19547

SEQ ID NO: 201574 - RNA, 1701 nt, Artificial Sequence
  derived and/or modified CDS sequence (opt5) from hemagglutinin__InfluenzaA__AFN19549
augaagaccaucauugcccugagcuacauccucugccugguguucgcucagaaacuucccggcaacgacaauuccacagccacgcugugucucgggcaccaugcggucccuaacggaaccauuguuaagacaaucaccaaugaucaaauugaggugacaaacgcuaccgaacuggugcagucuagcuccaaaggcgagaucugcaauucuccgcaccagauccuugacgggggaaacuguacacugauugaugcccuccugggcgacccccagugcgauggguuucaaaauaagaaaugggaccuguucgucgaaagaagcaaggcccauuccaacuguuauccuuacgaugugcccgacuaugcuucucuccggagccugguugccuccagcggaacccuugaguuuaauaacgaaucuuucaauuggacgggcgugacccagaacggcacauccagcgcuugcaugcgcagaucuaauaacuccuuuuucagccggcugaauuggcucacccaccugaacuuuaaguacccugcccuuaacgucacaaugcccaauaacgagcaguucgauaaacuguauaucuggggagugcaucacccugggaccgacaaggaucagauuuuucucuacgcgcaagccucuggccgcaucacgguuuccacaaaaagaagccagcaggcugugauuccgaauaucgggucccggccccgcgucagaaacauuccuucucgggugagcaucuauuggaccaucgugaagcccggagacauucugcugaucaauuccacaggcaaccucauugccccucgcggguacuucaaaaucagaagcggaaagucuuccauuaugcggagcgaugcucccaucggcaaguguaauucugccugcaucaccccgaacggcagcauuccuaaugacaaacccuuucagaacgucaaucgcaucaccuacggggcguguccuagauauguuaagcaaaacacacugaaacuugccacgggaaugcggaaugugcccgagaagcagacccgcggcauuuucggggcuaucgccggauuuauugaaaacggcugggaggggaugguggacggaugguacggcuucagacaccaaaauuccgaaggccgggggcaggcugccgaucugaaaucuacacaggccgcuaucgaccagaucaacggaaagcucaacagacugauuggcaaaaccaaugagaaguuccaucagaucgagaaggaauuuagcgaggucgaagggcgcauucaagauaucgagaaauauguggaagacacaaagauugaucuuugguccuacaacgcggagcugcucguugcccuggagaaucagcacaccaucgaccugacggauagcgaaaugaacaaacucuucgagaagaccaaaaagcagcugcgggaaaaugcugaggacaugggaaacggcugcuuuaagauuuaucauaaaugugauaaugccugcaucgggucuaucagaaacggcacauacgaccacgauguguaucgcgacgaagcccuuaauaaccgguuccagauuaagggagucgagcugaaauccggcuacaaggacuggauccucuggauuagcuuugcuaucucuugcuuccugcuuuguguggcccugcucggguuuauuaugugggcgugccaaaaaggaaauaucagauguaacaucugcauuuga

SEQ ID NO: 201575 - RNA, 1701 nt, Artificial Sequence
  derived and/or modified CDS sequence (opt5) from hemagglutinin__InfluenzaA__AFN19551
augaagaccaucauugcccugagcuacauccucugccugguguucgcucagaaaauucccggcaacgacaauuccacagccacgcuuugucuggggcaccaugcggucccuaacggaaccaucguuaagacaauuaccaaugaucaaaucgaggugacaaacgcuaccgaacucgugcagucuagcuccacaggcgagaucugcgacucuccgcaccagauucuggauggggaaaauuguacccuuaucgacgcccugcucggagauccccauugcgacggcuuucagaacaaaaagugggaucuguucgucgagagaagcaaagccuauuccaauuguuacccuuaugacgugcccgauuacgcuucucugcggagccucguugccuccagcgggacgcuggaauuuaacaaugagucuuucaacuggaccggagugacacaaaauggcaccuccagcgcuugcauucgcagaucuaacuccagcuuuuucucucggcuuaauuggcugacacaccucaacuuuaaguauccugcccugaaugucaccaugcccaacaacgagcaguucgacaaacuuuacaucuggggcgugcaucacccugggacggauaaggaccagauuuuucuguaugcgcaguccagcggacgcaucacaguuuccaccaagagaucucaacaggccgugauuccgaauaucggcagccggccccgcaucagaaacauuccuucccggaucagcauuuacuggacaaucgucaaacccggggauauucuccugaucaauucuaccggaaaccugaucgcuccucgcggcuacuucaagauuagauccgggaaaagcucuaucaugcggagcgacgcccccauuggaaaguguaauuccgaaugcaucaccccgaacggcucuauuccuaaugacaagcccuuucagaacgugaaucgcaucacauauggcgcuuguccuagauacgugaaacagagcacgcucaagcuggccaccgggaugcggaacguccccgagaaacaaacacgcggaaucuucggcgcgauugccggguuuaucgaaaauggaugggagggcaugguugaugggugguauggauucagacaccagaacuccgagggccggggccaggcugccgaccuuaagagcacccaagcugccauugaucagaucaaugggaaacugaacagacucauuggaaagacaaaugaaaaauuccaucagaucgagaaggaauuuucugagguggaaggccgcauucaggaccuggagaaguacguggaggauaccaaaaucgaccuuugguccuauaacgccgaacugcucgucgcucuggagaaccaacacacgaucgaucugacagacagcgaaaugaauaaacucuucgagaagaccaagaaacagcugcgggaaaacgcggaggauauggggaauggaugcuuuaagauuuaccauaagugugacaacgccugcaucggcucuauuagaaaugggaccuauaaccacgauguguaccgcgacgaggcucuuaauaaccgguuccagaucaaaggcguugaacugaaguccggauacaaagacuggauucucuggaucagcuuugccaucuccugcuuccugcuuuguguggcccugcucggcuuuauuaugugggcuugccagaaggggaauaucagauguaacauuugcaucuga

SEQ ID NO: 201576 - RNA, 1701 nt, Artificial Sequence; identical to SEQ ID NO: 201525
  derived and/or modified CDS sequence (opt5) from hemagglutinin__InfluenzaA__AFN19553

SEQ ID NO: 201577 - RNA, 1701 nt, Artificial Sequence; identical to SEQ ID NO: 201525
  derived and/or modified CDS sequence (opt5) from hemagglutinin__InfluenzaA__AFN19555

SEQ ID NO: 201578 - RNA, 1701 nt, Artificial Sequence; identical to SEQ ID NO: 201146
  derived and/or modified CDS sequence (opt5) from hemagglutinin__InfluenzaA__AFN19557

SEQ ID NO: 201579 - RNA, 1701 nt, Artificial Sequence; identical to SEQ ID NO: 201525
  derived and/or modified CDS sequence (opt5) from hemagglutinin__InfluenzaA__AFN19559

SEQ ID NO: 201580 - RNA, 1701 nt, Artificial Sequence; identical to SEQ ID NO: 201533
  derived and/or modified CDS sequence (opt5) from hemagglutinin__InfluenzaA__AFN19561

SEQ ID NO: 201581 - RNA, 1701 nt, Artificial Sequence
  derived and/or modified CDS sequence (opt5) from hemagglutinin__InfluenzaA__AFN19563
augaagaccaucauugcccugagcuacauccucugccugguguucgcucagaaacuucccggcaacgacaauuccacagccacgcugugucucgggcaccaugcggucccuaacggaaccauuguuaagacaaucaccaaugauagaauugaggugacaaacgcuaccgaacuggugcaaaauucuagcaucggcgagaucugcgacuccccgcaccagauucuugauggggaaaacuguacacugaucgacgcccuccugggagauccccagugcgacggcuuucagaauaaaaagugggaucuguucgucgagcggucuaaagccuauagcaacuguuacccuuaugacgugcccgauuacgcuucccuccgcucucugguugccagcuccgggacccuugaauuuaauaacgagagcuucaauuggacgggagugacccaaaacggcacaucuuccgcuugcauuagacggagcaauaacuccuuuuucucucgccugaauuggcucacccaucugaacuuuaaguauccugcccuuaacgucacaaugcccaauaacgagcaguucgacaagcuguacaucuggggcgugcaccauccugggaccgauaaagaccagauuuuucucuaugcgcagagcucuggaagaaucacgguuuccacaaagcggagccaacaggccgugauuccgaauaucggcucccgccccagaauccggaacauuccuucucgcaucagcauuuacuggaccaucgucaaacccggggauauucugcugaucaauuccacaggaaaccucaucgcuccuagaggcuacuucaagauucggagcgggaaaucuuccaucaugcgcagcgacgcccccauuggaaaguguaagucugaaugcaucaccccgaauggcagcauuccuaacgacaaacccuuucagaaugugaacagaaucaccuauggcgcuuguccucgguacgugaagcaguccacacugaaacuugccacggggaugcgcaauguccccgagaagcaaaccagaggaaucuucggcgcgauugccggguuuaucgaaaacggaugggagggcaugguugaugggugguauggauuccggcaccaaaauucugagggcagaggccaggcugccgaccugaaaagcacacaggcugccauugaucagaucaacgggaagcucaaucgccugauuggaaaaaccaacgaaaaguuccaccagaucgagaaggaauuuuccgagguggaaggccggauucaggaccuugagaaauacguggaggauacaaagaucgaccuguggagcuauaacgccgaacuccuggucgcucuggagaaucaacauaccaucgaucucacggacucugaaaugaacaaacuguucgagaagaccaaaaagcagcuuagagaaaaugcggaggauauggggaacggaugcuuuaagauuuaccacaaaugugacaaugccugcaucggcuccauucgcaacgggacauaugaucaugacguguaccgggacgaggcucugaauaacagauuccagaucaagggcguugaacucaaaagcggauacaaggauuggauucuguggaucucuuuugccaccuccugcuuccuucuguguguggcccuccugggcuuuaucaugugggcuugccagaaagggaauauucgcuguaacaucugcauuuga

SEQ ID NO: 201582 - RNA, 1701 nt, Artificial Sequence; identical to SEQ ID NO: 201503
  derived and/or modified CDS sequence (opt5) from hemagglutinin__InfluenzaA__AFN19565

SEQ ID NO: 201583 - RNA, 1701 nt, Artificial Sequence
  derived and/or modified CDS sequence (opt5) from hemagglutinin__InfluenzaA__AFN19567
augaagaccaucauugcccugagcuacauccucugccugguguucgcucagaaaauucccggcaacgacaauuccacagccacgcuuugucuggggcaccaugcggucccuaacggaaccaucguuaagacaauuaccaaugauagaaucgaggugacaaacgcuaccgaacucgugcaaaauucuagcaucggcgagauuugcgacuccccgcaccagauccuggauggggaaaacuguacacuuauugacgcccugcucggagauccccagugcgacggcuuucagaauaaaaagugggaucuguucgucgagcggucuaaagccuauagcaacuguuacccuuaugacgugcccgauuacgcuucccugcgcucucucguugccagcuccgggacccuggaauuuaauaacgagagcuucaauuggacgggagugacccaaaacggcacaucuuccgcuugcaucagacggagcaauaacuccuuuuucucucgccuuaauuggcugacccaucucaacuuuaaguauccugcccugaacgucacaaugcccaauaacgagcaguucgacaaacuuuacauuuggggcgugcaccauccugggaccgauaaagaccagaucuuucuguaugcgcagagcucuggaagaauuacgguuuccacaaagcggagccaacaggccgugaucccgaauaucggcucccgcccccggauuagaaacaucccuucucgcauuagcaucuacuggaccauugucaaacccggggauauccuccugaucaauuccacaggaaaccugauugcuccuagaggcuacuucaagauccggagcgggaaaucuuccauuaugcgcagcgacgcccccaucggaaaguguaagucugaaugcauuaccccgaauggcagcaucccuaacgacaaacccuuucagaaugugaacagaaucaccuauggcgcuuguccucgguacgugaagcaguccacacucaaacuggccacggggaugcgcaauguccccgagaagcaaaccagaggaauuuucggcgcgaucgccggguuuauugaaaacggaugggagggcaugguugaugggugguauggauuccggcaccaaaauucugagggcagaggccaggcugccgaccuuaaaagcacacaggcugccaucgaucagauuaacgggaagcugaaucgccucaucggaaaaaccaacgaaaaguuccaccagauugagaaggaauuuuccgagguggaaggccggauccaggaccuggagaaauacguggaggauacaaagaucgaccuuuggagcuauaacgccgaacugcucgucgcucuggagaaucaacauaccauugaucugacggacucugaaaugaacaaacucuucgagaagacaaagaagcagcugagagaaaaugcggaggauauggggaacggaugcuuuaagaucuaccacaaaugugacaaugccugcauuggcuccauccgcaacgggaccuaugaucaugacguguaccgggacgaggcucuuaauaacagauuccagauuaagggcguugaacugaaaagcggauacaaggauuggauccucuggaucucuuuugccauuuccugcuuccugcuuuguguggcccugcucggcuuuaucaugugggcuugccagaaagggaauauucgcuguaacaucugcauuuga

SEQ ID NO: 201584 - RNA, 1701 nt, Artificial Sequence; identical to SEQ ID NO: 201146
  derived and/or modified CDS sequence (opt5) from hemagglutinin__InfluenzaA__AFN19569

SEQ ID NO: 201585 - RNA, 1701 nt, Artificial Sequence
  derived and/or modified CDS sequence (opt5) from hemagglutinin__InfluenzaA__AFN19571
augaagaccaucauugcccugagcuacauccucugccugguguucgcucagaaacuucccggcaacgacaauuccacagccacgcugugucucgggcaccaugcggucccuaacggaaccauuguuaagacaaucaccaaugaucaaauugaggugacaaacgcuaccgaacuggugcagucuagcuccacaggcgagaucugcgacucuccgcaccagauccuugauggggaaaauuguacccugauugacgcccuccugggagauccccagugcgacggcuuucaaaacaaaaagugggaucuguucgucgagagaagcaaagccuauuccaauuguuacccuuaugacgugcccgauuacgcuucucuccggagccugguugccuccagcgggacgcuugaauuuaacaaugagucuuucaacuggaccggagugacacagaauggcaccuccagcgcuugcauccgcagaucuaacuccagcuuuuucucucggcugaauuggcucacacaucugaacuuuaaguauccugcccuuaaugucaccaugcccaacaacgagcaguucgacaagcuguacauuuggggcgugcaccauccugggacggauaaagaccagaucuuucucuauucccaaagcuccggacgcauuacaguuucuaccaagagaagccagcaggcggugaucccgaauauuggcucccggccccgcaucagaaacaucccuagccggauuucuaucuacuggacaauugucaaacccggggauauccugcugauuaauuccaccggaaaccucaucgccccucgcggcuacuucagaauccggagcgggaagucuagcauuaugcgcuccgacgcucccaucggaaaauguaauucugaaugcauuaccccgaacggcagcaucccuaaugacaagcccuuucagaacgugaauagaauuacauauggcccuuguccccgguacgugaagcaauccacgcugaaacuugccaccgggaugcgcaacguccccgagaagcagacaagaggaaucuucggcgcuaucgccggguuuauugaaaauggaugggagggcaugguugaugggugguauggauaccggcaccagaacagcgagggcagaggccaagcggccgaccugaaaucuacccaggcugccaucgaucagauuaaugggaagcucaaccgccugaucggaaaaacaaaugaaaaguuccaccagauugagaaagaguucuccgaaguggaaggccggauccaagaccuugagaaguauguggaggauaccaagauugaccuguggacguacaacgcugaacuccuggucgcccuggagaaccagcauacaaucgaucucaccgacagcgaaaugaauaaacuguuugagaagaccaaaaagcagcuuagagaaaacgccgaggauauggggaauggaugcuucaaaaucuaucacaagugugacaacgcuugcauuggcucuauccgcaaugggacauacaaccaugauguguaccgggacgaggcgcugaauaacagauuucagauuaagggcguugaacucaaauccggauauaaggacuggauccuguggauuagcuucgccaucuccugcuuucuucuguguguggcucuccugggcuucaucaugugggccugccaaaaagggaauauucgcuguaacaucugcauuuga

SEQ ID NO: 201586 - RNA, 1701 nt, Artificial Sequence
  derived and/or modified CDS sequence (opt5) from hemagglutinin__InfluenzaA__AFN19573
augaagaccaucauugcccugagcuacauccucugccugguguucgcucagaaacuucccggcaacgacaauuccacagccacgcugugucucgggcaccaugcggucccuaacggaaccauuguuaagacaaucaccaaugaucaaauugaggugacaaacgcuaccgaacuggugcagucuagcuccacaggcaaaaucugcgacucuccgcaccagauccuugaugggaagaauuguacccugauugacgcccuccugggagauccccagugcgacggcuuucaaaacaaaaagugggaucuguucgucgagagaagcaaggccuauuccaauuguuacccuuaugacgugcccgauuacgcuucucuccggagccugguugccuccagcgggacgcuugaauuuaacaaugagucuuucaacuggaccggagugacacagaauggcaccuccagcgcuugcauccgcagaucuaaaaacuccuuuuucagccggcugaauuggcucacacaucugaacuuuaaguauucugcccuuaaugucaccaugccuaacaaagaacaguucgacaagcuguacauuuggggcgugcaccaucccgggacggauaaagaccagaucucccucuaugcgcaagccagcggacgcauuacaguuuccaccaagagaucucagcagacagugaucccuaacauuggcagccggccgcgcgucagaaauauccccucccggaucagcauuuacuggaccaucgugaagccuggggauauucugcugaucaacucuaccggaaaucucauugcuccccgcggcuacuuuaaaaugcaguccggaaagagcucuaucaugagaagcgacgccccuaucgggaaauguaacuccgagugcauuacacccaauggcucuaucccgaacgacaagccuuuccaaaaugugaaccggauuacguauggcgcuuguccccgcuacgucaaacagaauacccugaaacuugccacagggaugagaaacguuccugagaagcagacccggggaaucuuuggcgcgauugccggguucaucgaaaauggaugggagggcaugguggaugggugguauggauuucgccaccaaaacagcgaaggcagaggccaggcugccgaccugaaguccacacaggcugccaucgaucagauuaaugggaagcucaaccggcugaucggaaaaaccaaugagaaguuccaccaaauugagaaagaguucagcgaaguggaaggcagaauccaggaccuugagaaguacgucgaagauacgaaaauugaccuguggucuuauaacgccgagcuccugguggcucuggagaaccagcauacaaucgaucucaccgacuccgaaaugaauaagcuguuugagaagaccaaaaagcagcuucgcgaaaacgcggaggauauggggaauggaugcuucaaaauuuaccacaagugugacaacgccugcaucggcagcauccggaaugggacauaugaucaugacguuuacagagacgaagcucugaacaaucgcuuucaaauuaaaggcguggagcucaagucuggauacaaggauuggauccuguggauuuccuucgccaucagcugcuuucuucugugugucgcccuccugggcuucauuaugugggcuugccagaaagggaacauccgguguaauaucugcauuuga

SEQ ID NO: 201587 - RNA, 1701 nt, Artificial Sequence
  derived and/or modified CDS sequence (opt5) from hemagglutinin__InfluenzaA__AFN19575
augaagaccaucauugcccugagcuacauccucugccugguguucgcucagaaacuucccggcaacgacaauuccacagccacgcugugucucgggcaccaugcggucccuaacggaaccauuguuaagacaaucaccaaugaucaaauugaggugacaaacgcuaccgaacuggugcagucuagcuccacaggcgagaucugcgacaauccgcaccagauccuugauggggaaaacuguacccugauugacgcccuccugggagauccccagugcgacggcuuucaaaauaaaaagugggaucuguucgucgagagaucuaaagccuauagcaacuguuacccuuaugacgugcccgauuacgcuucccuccggucucugguugccagcuccgggacgcuugaauuuaauaacgagagcuucaauuggaccggagugacacagaacggcaccucuuccgcuugcauccgcagaagcaauaacuccuuuuucucucggcugaauuggcucacacaucugaacuuuaaguauccugcccuuaacgucaccaugcccaauaacgagcaguucgacaagcuguacauuuggggcgugcaccauccugggacggauaaagaccagaucuuucucuaugcgcaaagcucuggacgcauuacaguuuccaccaagagaagccagcaggccgugaucccgaauauuggcucccggccccgcgucagaaacaucccuucucggaucagcauuuacuggacaaucgugaaacccggggauauucugcugaucaauuccaccggaaaccucauugcuccucgcggcuacuucaagaucagaagcgggaaaucuuccaucaugcggagcgacgcccccauuggaaaguguaauucugaaugcaucaccccgaacggcagcauuccuaaugacaagcccuuucagaacgugaaucgcaucacauauggcgcuuguccuagauacgucaaacaauccacgcugaagcuggccaccgggaugcggaacguucccgagaaacagacacgcggaauuuucggcgcgaucgccggguuuaucgaaaauggaugggagggcaugguggaugggugguauggauucagacaccagaacucugagggccggggccaagcugccgaccuuaagagcacccaggcugccauugaucagaucaaugggaaacucaacagacugauuggaaagacaaacgaaaaauuccaccagaucgagaaggaauuuuccgagguggaaggccgcauucaagaccuugagaaguacgucgaggauaccaaaaucgaccuguggagcuauaaugccgaacuccugguggcucuggagaaccagcauacgauugaucucacagacucugaaaugaauaagcuguucgagaaaaccaagaaacagcuucgggaaaacgcggaggauauggggaauggaugcuuuaagaucuaccacaagugugacaacgccugcaucggcuccauuagaaaugggaccuaugaucaugacguuuaccgcgacgaggcucugaacaaucgguuccagaucaaaggcguggaacucaagagcggauacaaagauuggauucuguggaucucuuuugccauuuccugcuuccuucugugugucgcccuccugggcuuuaucaugugggcuugccaaaaggggaacaucagauguaauauuugcaucuga

SEQ ID NO: 201588 - RNA, 1701 nt, Artificial Sequence; identical to SEQ ID NO: 201502
  derived and/or modified CDS sequence (opt5) from hemagglutinin__InfluenzaA__AFN19577

SEQ ID NO: 201589 - RNA, 1701 nt, Artificial Sequence; identical to SEQ ID NO: 201502
  derived and/or modified CDS sequence (opt5) from hemagglutinin__InfluenzaA__AFN19579

SEQ ID NO: 201590 - RNA, 1701 nt, Artificial Sequence; identical to SEQ ID NO: 201502
  derived and/or modified CDS sequence (opt5) from hemagglutinin__InfluenzaA__AFN19581

SEQ ID NO: 201591 - RNA, 1701 nt, Artificial Sequence; identical to SEQ ID NO: 201502
  derived and/or modified CDS sequence (opt5) from hemagglutinin__InfluenzaA__AFN19583

SEQ ID NO: 201592 - RNA, 1701 nt, Artificial Sequence
  derived and/or modified CDS sequence (opt5) from hemagglutinin__InfluenzaA__AFN19587
augaagaccaucauugcccugagcuacauccucugccugguguucgcucagaaacuucccgagaacgacaauuccacagccacgcugugucucggccaccaugcggucccuaacgggaccauuguuaagacaaucaccaaugaucaaauugaagugacaaacgcuaccgagcuggugcagucuagcuccacaggagaaaucugcgacucuccgcaccagauccuugauggcgucaauuguacccugauugacgcccuccugggggauccccagugcgacggauuucaaaacaaaaagugggaucuguucguggagagaagcaaagccuauuccaauuguuacccuuaugacguucccgauuacgcuucucuccggagccugguggccuccagcggcacgcuugaauuuaacaaugagucuuucaacuggaccggggucacacagaauggaaccuccagcgcuugcauccgcagaucuaacuccagcuuuuucucucggcugaauuggcucacacaucugaacuuuaaguauccugcccuuaaugugaccaugcccaacaacgagcaguucgacaagcuguacauuuggggcguucaccauccuggcacggauaaagaccagaucuuucucuaugcgcaauccagcgggcgcauuacaguguccaccaagagaucucagcaggccgucaucccgaauauuggaagccggccccgcaucagaaacaucccuucccggauuagcaucuacuggacaauugugaaacccggcgauauccugcugauuaauucuaccgggaaccucaucgcuccucgcggauacuucaagaucagauccggcaaaagcucuauuaugcggagcgacgcccccaucgggaaguguaauuccgaaugcauuaccccgaacggaucuaucccuaaugacaagcccuuucagaacgugaaucgcauuacauauggcgcuuguccuagauacgucaaacaaagcacgcugaagcuggccaccggcaugcggaacguucccgagaaacagacacgcgggaucuucggagcgaucgccggcuuuauugaaaaugggugggagggaaugguggauggcugguauggguucagacaccagaacuccgagggacggggccaagcugccgaccuuaagagcacccaggcugccaucgaucagauuaauggcaaacucaacagacugaucgggaagacaaaugaaaaauuccaccagauugagaaggaauuuucugagguggaaggacgcauccaagaccuugagaaguacgucgaggauaccaaaauugaccugugguccuauaacgccgaacuccugguggcucuggagaaccagcauacgaucgaucucacagacagcgaaaugaauaagcuguucgagaaaaccaagaaacagcuucgggaaaacgcggaggauaugggcaaugggugcuuuaagaucuaccacgagugugacaacgccugcauuggaucuaucagaaauggcaccuauaaccaugauguuuaccgcgacgaagcucugaauaaccgguuccagauuaaggggguggagcucaaauccggcuacaaggacuggauccuguggauuagcuuugccaucuccugcuuccuucugugugucgcccuccugggauuuaucaugugggcuugccaaaaaggcaauauuagauguaacaucugcauuuga

SEQ ID NO: 201593 - RNA, 1701 nt, Artificial Sequence; identical to SEQ ID NO: 201502
  derived and/or modified CDS sequence (opt5) from hemagglutinin__InfluenzaA__AFN19589

SEQ ID NO: 201594 - RNA, 1701 nt, Artificial Sequence
  derived and/or modified CDS sequence (opt5) from hemagglutinin__InfluenzaA__AFN19591
augaagaccaucauugcccugagcuacauccucugccugguguucgcucagaaacuucccggcaacgacaauuccacagccacgcugugucucgggcaccaugcggucccuaacggaaccauuguuaagacaaucaccaaugaucaaauugaggugacaaacgcuaccgaacuggugcaaaauucuagcaucggcgagaucugcgacuccccgcaccagauucuugauggggaaaacuguacacugaucgacgcccuccugggagauccccagugcgacggcuuucagaauaaaaagugggaucuguucgucgagagaucuaaagccuauagcaacuguuacccuuaugacgugcccgauuacgcuucccuccggucucugguugccagcuccgggacccuugaauuuaauaacgagagcuucaauuggacgggagugacccagaacggcacaucuuccgcuugcaugcgcagaagcaauucuuccuuuuucagccggcugaacuggcucacccaucugaauuuuaaguauccugcccuuaacgucacaaugcccaacaaugagcaguucgacaagcuguacauuuggggcgugcaccauccugggaccgauaaagaccagaucuuucucuaugcgcaaucuuccggacgcauuacgguuagcacaaagagaucccagcaggccgugaucccgaacauuggcucucggccccgcaucagaaauaucccuagccggauuuccaucuacuggaccauugucaaacccggggauauccugcugauuaacagcacaggaaaucucaucgcuccucgcggcuacuucaagaucagaucugggaaauccagcauuaugcggucugacgcccccaucggaaaguguaacagcgaaugcauuaccccgaauggcuccaucccuaacgacaagcccuuucagaaugugaaccgcauuaccuauggcgcuuguccuagauacgugaaacaaucuacacugaaacuugccacggggaugcggaauguccccgagaagcagacccgcggaaucuucggcgcgaucgccggguuuauugaaaacggaugggagggcaugguugaugggugguauggauucagacaccagaauagcgagggccggggccaagcugccgaccugaaguccacacaggcugccaucgaucagauuaacgggaaacucaauagacugaucggaaagaccaacgaaaaauuccaccagauugagaaggaauuuagcgagguggaaggccgcauccaagaccuugagaaguacguggaggauacaaaaauugaccuguggucuuauaacgccgaacuccuggucgcucuggagaaucagcauaccaucgaucucacggacuccgaaaugaacaagcuguucgagaaaacaaagaaacagcuucgggaaaaugcggaggauauggggaacggaugcuuuaagaucuaccacaagugugacaaugccugcauuggcagcaucagaaacgggaccuaugaucaugacguguaccgcgacgaggcucugaauaaccgguuccagauuaaaggcguugaacucaagucuggauacaaagauuggauccuguggauuuccuuugccaucagcugcuuccuucuguguguggcccuccugggcuuuaucaugugggcuugccaaaaugggaacauuagauguaauaucugcauuuga

SEQ ID NO: 201595 - RNA, 1701 nt, Artificial Sequence; identical to SEQ ID NO: 201502
  derived and/or modified CDS sequence (opt5) from hemagglutinin__InfluenzaA__AFN19593

SEQ ID NO: 201596 - RNA, 1701 nt, Artificial Sequence; identical to SEQ ID NO: 201503
  derived and/or modified CDS sequence (opt5) from hemagglutinin__InfluenzaA__AFN19595

SEQ ID NO: 201597 - RNA, 1701 nt, Artificial Sequence; identical to SEQ ID NO: 201503
  derived and/or modified CDS sequence (opt5) from hemagglutinin__InfluenzaA__AFN19599

SEQ ID NO: 201598 - RNA, 1701 nt, Artificial Sequence; identical to SEQ ID NO: 201565
  derived and/or modified CDS sequence (opt5) from hemagglutinin__InfluenzaA__AFN19601

SEQ ID NO: 201599 - RNA, 1701 nt, Artificial Sequence; identical to SEQ ID NO: 201146
  derived and/or modified CDS sequence (opt5) from hemagglutinin__InfluenzaA__AFN19607

SEQ ID NO: 201600 - RNA, 1701 nt, Artificial Sequence; identical to SEQ ID NO: 201502
  derived and/or modified CDS sequence (opt5) from hemagglutinin__InfluenzaA__AFN19609

SEQ ID NO: 201601 - RNA, 1701 nt, Artificial Sequence
  derived and/or modified CDS sequence (opt5) from hemagglutinin__InfluenzaA__AFN19611
augaagaccaucauugcccugagcuacauccucugccugguguucgcucagaaacuucccggcaacgacaauuccacagccacgcugugucucgggcaccaugcggucccuaacggaaccauuguuaagacaaucaccaaugaucaaauugaggugacaaacgcuaccgaacuggugcaaaauucuagcaucggcgagaucugcgacuccccgcaccagauucuugauggggaaaacuguacacugaucgacgcccuccugggagauccccagugcgacggcuuucagaauaaaaagugggaucuguucgucgagagaucuaaagccuauagcaacuguuacccuuaugacgugcccgauuacgcuucccuccggucucugguugccagcuccgggacccuugaauuuaauaacgagagcuucaauuggacgggagugacccagaacggcacaucuuccgcuugcauucgcagaagcaauaacuccuuuuucucucggcugaauuggcucacccaucugaacuuuaaguauccugcccuuaacgucacaaugcccaauaacgagcaguucgacaagcuguacaucuggggcgugcaccauccugggaccgauaaagaccagauuuuucucuaugcgcaaagcucuggacgcaucacgguuuccacaaagagaagccagcaggccgugauuccgaauaucggcucccggccccgcaucagaaacauuccuucucggaucagcauuuacuggaccaucgucgaacccggggauauucugcugaucaauuccacaggaaaccucaucgcuccucgcggcuacuucaaaauuagaagcgggaagucuuccaucaugcggagcgacgcccccauuggaaaauguaauucugagugcaucaccccgaacggcagcauuccuaaugacaagcccuuucagaacgugaaucgcaucaccuauggcgcuuguccuagauacgugaagcaauccacacugaaacuugccacggggaugcggaacguccccgaaaagcagacccgcggaaucuucggcgcgauugccggguuuaucgagaauggaugggagggcaugguugaugggugguauggauucagacaccagaacucugaaggccggggccaagcugccgaccugaaaagcacacaggcugccauugaucagaucaaugggaagcucaacagacugauuggaaaaaccaacgagaaguuccaccagaucgaaaaagaguuuuccgaaguggagggccgcauucaagaccuugagaaguacguggaagauacaaagaucgaccuguggagcuauaaugccgagcuccuggucgcucuggaaaaccagcauaccaucgaucucacggacucugagaugaauaaacuguucgaaaagaccaaaaagcagcuucgggagaacgcggaggauauggggaauggaugcuuuaaaauuuaccacaagugugacaacgccugcaucggcuccauuagaaaugggacauaugaucaugacguguaccgcgacgaagcucugaacaaucgguuccagaucaagggcguugagcucaaaagcggauacaaggauuggauucuguggaucucuuuugccaucuccugcuuccuucuguguguggcccuccugggcuuuauuaugugggcuugccaaaaagggaacaucagauguaauauuugcaucuga

SEQ ID NO: 201602 - RNA, 1701 nt, Artificial Sequence; identical to SEQ ID NO: 201525
  derived and/or modified CDS sequence (opt5) from hemagglutinin__InfluenzaA__AFN19613

SEQ ID NO: 201603 - RNA, 1701 nt, Artificial Sequence; identical to SEQ ID NO: 201503
  derived and/or modified CDS sequence (opt5) from hemagglutinin__InfluenzaA__AFN19617

SEQ ID NO: 201604 - RNA, 1701 nt, Artificial Sequence
  derived and/or modified CDS sequence (opt5) from hemagglutinin__InfluenzaA__AFN19619
augaagaccaucauugcccugagccacauccucugccugguguucgcucagaaacuucccggcaacgacaauuccacagccacgcugugucucgggcaucacgcggucccuaacggaaccauuguuaagacaaucaccaaugaucaaauugaggugacaaacgcuaccgaacuggugcagucuagcuccacaggcgagaucugcgacucuccgcaucagauccuugauggggaaaauuguacccugauugacgcccuccugggagauccccagugcgacggcuuucaaaacaaaaagugggaucuguucgucgagagaagcaaagccuacuccaauuguuauccuuacgacgugcccgauuaugcuucucuccggagccugguugccuccagcgggacgcuugaauuuaacaaugagucuuucaacuggaccggagugacacagaauggcaccuccagcgcuugcauccgcagaucuaacuccagcuuuuucucucggcugaauuggcucacacaccugaacuuuaaguacccugcccuuaaugucaccaugcccaacaacgagcaguucgacaagcuguauauuuggggcgugcaucacccugggacggauaaagaccagaucuuucucuacgcgcaauccagcggacgcauuacaguuuccaccaagagaucucagcaggccgugaucccgaauauuggcagcaaaccccggauccgcaacaucccuuccagaauuagcaucuauuggacaauugucaagcccggggauauccugcugauuaauucuaccggaaaccucaucgcuccucggggcuacuucaaaauccgcuccggaaagagcucuauuaugagaagcgacgcccccaucgggaaguguaauuccgaaugcauuaccccgaacggcucuaucccuaaugacaaacccuuucagaacgugaaucggauuacauacggcgcuuguccucgcuaugugaagcaaagcacgcugaaacuugccaccgggaugagaaacguccccgagaagcagacacggggaaucuucggcgcgaucgccggguuuauugaaaauggaugggagggcaugguugaugggugguacggauuccgccaccagaacuccgagggcagaggccaagcugccgaccugaaaagcacccaggcugccaucgaucagauuaaugggaagcucaaccggcugaucggaaaaacaaaugaaaaguuccaucagauugagaaggaauuuucugagguggaaggcagaauccaagaccuugagaaauauguggaggauaccaagauugaccugugguccuacaacgccgaacuccuggucgcucuggagaaccagcacacgaucgaucucacagacagcgaaaugaauaaacuguucgagaagaccaaaaagcagcuucgcgaaaacgcggaggauauggggaauggaugcuuuaagaucuaucauaaaugugacaacgccugcauuggcucuauccggaaugggaccuacaaccacgauguguauagagacgaggcucugaauaaccgcuuccagauuaagggcguugaacucaaauccggauacaaggacuggauccuguggauuagcuuugccaucuccugcuuccuucugugugugguccuccugggcuuuaucaugugggccugccaaaaagggaauauucgguguaacaucugcauuuga

SEQ ID NO: 201605 - RNA, 1701 nt, Artificial Sequence; identical to SEQ ID NO: 201565
  derived and/or modified CDS sequence (opt5) from hemagglutinin__InfluenzaA__AFN19623

SEQ ID NO: 201606 - RNA, 1701 nt, Artificial Sequence; identical to SEQ ID NO: 201502
  derived and/or modified CDS sequence (opt5) from hemagglutinin__InfluenzaA__AFN19629

SEQ ID NO: 201607 - RNA, 1701 nt, Artificial Sequence
  derived and/or modified CDS sequence (opt5) from hemagglutinin__InfluenzaA__AFN19631
augaagaccaucauugcccugagcuacauccucugccugguguucgcucagaaacuucccgagaacgacuauuccacagccacgcugugucucggccaccaugcggucccuaaugggaccauuguuaagacaaucaccaacgaucaaauugaagugacaaaugcuaccgagcuggugcagucuagcuccacaggagaaaucugcgacucuccgcaccagauccuugauggcauuaacuguacccugaucgacgcccuccugggggauccccagugcgacggauuucaaaauaaaaagugggaucuguucgucgagagaagcaaagccuacuccaacuguuauccuuacgacgugcccgauuaugcuucucuccggagccugguugccuccagcggcacgcuugaauuuaauaacgagucuuucaauuggaccggggugacacagaacggaaccuccagcgcuugcauucgcagaucuacauccagcuuuuucucucggcugaauuggcucacccaucugaacuuuaaguacccugcccuuaaugucacgaugcccaacaaugagcaguucgacaagcuguauaucuggggcgugcaccauccuggcacagauaaagaccagauuuuucucuacgcgcaaccguccgggcgcaucaccguuagcacaaagagaucccagcaggccgugauucccaacaucggaucucggccucgcaucagaaacauucccagccggaucuccauuuacuggaccaucgucaaaccuggcgauauucugcugaucaauagcaccgggaaccucaucgcuccccgcggauauuucaagauuagaucuggcaaauccagcaucaugcggucugacgccccgauugggaaguguaauagcgaaugcaucacaccuaacggauccauucccaaugacaagccuuuucagaacgugaaucgcaucacguacggcgcuugucccagauaugugaaacaaucuacccugaaacuugccacaggcaugcggaacguccccgagaagcagacccgcgggaucuucggagcgauugccggcuuuaucgaaaaugggugggagggaaugguugauggcugguacggguucagacaccagaacagcgagggacggggccaagcugccgaccugaaguccacacaggcugccauugaucagaucaauggcaaacucaacagacugauugggaagaccaaugaaaaauuccaccagaucgagaaggaauuuagcgagguggaaggacgcauucaagaccuugagaaguauguggaggauacgaaaaucgaccuguggucuuacaacgccgaacuccuggucgcucuggagaaucagcauacaaucgaucucaccgacuccgaaaugaacaagcuguucgagaaaaccaagaaacagcuucgggaaaacgcggaggauaugggcaaugggugcuuuaagauuuaucacaagugugacaacgccugcaucggaagcauuagaaauggcacauacaaccaugauguguaccgcgacgaggcucugaauaaccgguuccagaucaaagggguugaacucaagucuggcuauaaagacuggauucuguggaucuccuuugccaucagcugcuuccuucuguguguggcccuccugggauuuauuaugugggcuugccaaaagggcaauaucagauguaacauuugcaucuga

SEQ ID NO: 201608 - RNA, 1701 nt, Artificial Sequence
  derived and/or modified CDS sequence (opt5) from hemagglutinin__InfluenzaA__AFN19633
augaagaccaucauugcccugagcuacauccucugccugguguucgcucagaaacuucccggcaacgacaauuccacagccacgcugugucucgggcaccaugcggucccuaacggaaccauuguuaagacaaucaccaaugaucaaauugaggugacaaacgcuaccgaacuggugcagucuagcuccacaggcgagaucugcgacucuccgcaccagauccuugauggggaaaauuguacccugauugacgcccuccugggagauccccagugcgacggcuuucaaaacaaaaagugggaucuguucgucgagagaagcaaagccuauuccaauuguuacccuuaugacgugcccgauuacgcuucucuccggagccugguugccuccagcgggacgcuugaauuuaacaaugagucuuucaacuggaccggagugacacagaauggcaccuccagcgcuugcauccgcagaucuaacuccagcuuuuucucucggcugaauuggcucacacaucugaacuuuaaguauccugcccuuaaugucaccaugcccaacaacgagcaguucgacaagcuguacauuuggggcgugcaccauccugggacggauaaagaccagaucuuucucuaugcgcaauccagcggacgcauuacaaucuccaccaagagaucucagcaggccguuauuccgaauaucggcagccggccccgcaucagaaacauuccuucccggaucagcauuuacuggacaaucgugaaacccggggauauucugcugaucaauucuaccggaaaccucaucgcuccucgcggcuacuucaagauuagauccgggaaaagcucuaucaugcggagcgacgcccccauuggaaaguguaauuccgaaugcaucaccccgaacggcucuauuccuaaugacaagcccuuucagaacgucaaucgcaucacauauggcgcuuguccuagauacgugaaacaaagcacgcugaagcuggccaccgggaugcggaacgugcccgagaaacagacacgcggaaucuucggcgcgauugccggguuuaucgaaaauggaugggagggcauggucgaugggugguauggauucagacaccagaacuccgagggccggggccaagcugccgaccuuaagagcacccaggcugccauugaucagaucaaugggaaacucaacagacugauuggaaagacaaaugaaaaauuccaccagaucgagaaggaauuuucugagguugaaggccgcauucaagaccuugagaaguacguggaggauaccaaaaucgaccugugguccuauaacgccgaacuccugguggcucuggagaaccagcauacgaucgaucucacagacagcgaaaugaauaagcuguucgagaaaaccaagaaacagcuucgggaaaacgcggaggauauggggaauggaugcuuuaagauuuaccacaagugugacaacgccugcaucggcucuauuagaaaugggaccuauaaccaugaugucuaccgcgacgaggcucugaauaaccgguuccagaucaaaggcguggaacucaaguccggauacaaagacuggauucuguggaucagcuuugccaucuccugcuuccuucuguguguugcccuccugggcuuuauuaugugggcuugccaaaaggggaauaucagauguaacauuugcaucuga

SEQ ID NO: 201609 - RNA, 1701 nt, Artificial Sequence
  derived and/or modified CDS sequence (opt5) from hemagglutinin__InfluenzaA__AFN19635
augaagaccaucauugcccugagcuacauccucugccugguguucgcucagaaacuucccgagaacgacaauuccacagccacgcugugucucggccaccaugcggucccuaacgggaccauuguuaagacaaucaccaaugaucaaauugaagugacaaacgcuaccgagcuggugcagucuagcuccacaggagaaaucugcgacucuccgcaccagauccuugauggcauuaauuguacccugaucgacgcccuccugggggauccccagugcgacggauuucaaaacaaaaagugggaucuguucgucgagagaagcaaagccuauuccaauuguuacccuuaugacgugcccgauuacgcuucucuccggagccugguugccuccagcggcacgcuugaauuuaacaaugagucuuucaacuggaccggggugacacagaauggaaccuccagcgcuugcauucgcagaucuaacuccagcuuuuucucucggcugaauuggcucacacaucugaacuuuaaguauccugcccuuaaugucaccaugcccaacaacgagcaguucgacaagcuguacaucuggggcgugcaccauccuggcacggauaaagaccagauuuuucucuaugcgcaaccguccgggcgcaucacaguuagcaccaagagaucccagcaggccgugauucccaauaucggaucucggccucgcaucagaaacauucccagccggaucuccauuuacuggacaaucgucaaaccuggcgauauucugcugaucaauagcaccgggaaccucaucgcuccccgcggauacuucaagauuagaucuggcaaauccagcaucaugcggucugacgccccgauugggaaguguaauagcgaaugcaucaccccuaacggauccauucccaaugacaagccuuuucagaacgugaaucgcaucacauauggcgcuugucccagauacgugaaacaaucuacgcugaaacuugccaccggcaugcggaacguccccgagaagcagacacgcgggaucuucggagcgauugccggcuuuaucgaaaaugggugggagggaaugguugauggcugguauggguucagacaccagaacagcgagggacggggccaagcugccgaccugaaguccacccaggcugccauugaucagaucaauggcaaacucaacagacugauugggaagacaaaugaaaaauuccaccagaucgagaaggaauuuagcgagguggaaggacgcauucaagaccuugagaaguacguggaggauaccaaaaucgaccuguggucuuauaacgccgaacuccuggucgcucuggagaaccagcauacgaucgaucucacagacuccgaaaugaauaagcuguucgagaaaaccaagaaacagcuucgggaaaacgcggaggauaugggcaaugggugcuuuaagauuuaccacaagugugacaacgccugcaucggaagcauuagaaauggcaccuauaaccaugauguguaccgcgacgaggcucugaauaaccgguuccagaucaaagggguugaacucaagucuggcuacaaagacuggauucuguggaucuccuuugccaucagcugcuuccuucuguguguggcccuccugggauuuauuaugugggcuugccaaaagggcaauaucagauguaacauuugcaucuga

SEQ ID NO: 201610 - RNA, 1701 nt, Artificial Sequence; identical to SEQ ID NO: 201609
  derived and/or modified CDS sequence (opt5) from hemagglutinin__InfluenzaA__AFN19637

SEQ ID NO: 201611 - RNA, 1701 nt, Artificial Sequence; identical to SEQ ID NO: 201146
  derived and/or modified CDS sequence (opt5) from hemagglutinin__InfluenzaA__AFN19639

SEQ ID NO: 201612 - RNA, 1701 nt, Artificial Sequence; identical to SEQ ID NO: 201565
  derived and/or modified CDS sequence (opt5) from hemagglutinin__InfluenzaA__AFN19641

SEQ ID NO: 201613 - RNA, 1701 nt, Artificial Sequence; identical to SEQ ID NO: 201609
  derived and/or modified CDS sequence (opt5) from hemagglutinin__InfluenzaA__AFN19643

SEQ ID NO: 201614 - RNA, 1701 nt, Artificial Sequence; identical to SEQ ID NO: 201146
  derived and/or modified CDS sequence (opt5) from hemagglutinin__InfluenzaA__AFN19645

SEQ ID NO: 201615 - RNA, 1701 nt, Artificial Sequence
  derived and/or modified CDS sequence (opt5) from hemagglutinin__InfluenzaA__AFN19647
augaagaccaucauugcccugagcuacauccucugccugguguucgcucagaaacuucccgagaacgacaauuccacagccacgcugugucucggccaccaugcggucccuaacgggaccauuguuaagacaaucaccaaugaucaaauugaagugacaaacgcuaccgagcuggugcagucuagcuccacaggagaaaucugcgacucuccgcaccagauccuugauggcgucaauuguacccugauugacgcccuccugggggauccccagugcgacggauuucaaaacaaaaagugggaucuguucguggagagaagcaaagccuauuccaauuguuacccuuaugacguucccgauuacgcuucucucaagagccugguggccuccagcggcacgcuugaauuuaacaaugagucuuucaacuggaccggggucacacagaauggaaccuccagcgcuugcauccggcgcucuaacuccagcuuuuucucuagacugaauuggcucacacaucugaacuuuaaguauccugcccuuaaugugaccaugcccaacaacgagcaguucgacaaacuguacauuuggggcguucaccauccuggcacggauaaggaccagaucuuucucuaugcgcaauccagcgggcggauuacaguguccaccaaacgcucucagcaggccgucaucccgaauauuggaagcagaccccggauccgcaacaucccuuccagaauuagcaucuacuggacaauugugaagcccggcgauauccugcugauuaauucuaccgggaaccucaucgcuccucggggauacuucaaaauccaguccggcaagagcucuauuaugcgcagcgacgcccccaucgggaaguguaauuccgaaugcauuaccccgaacggaucuaucccuaaugacaaacccuuucaaaacgugaauagaauuacauauggcgcuuguccucgguacgucaagcagagcacgcugaaacuugccaccggcaugcgcaacguucccgagaagcagacaagagggaucuucggagcgaucgccggcuuuauugaaaaugggugggagggaaugguggauggcugguauggguuccggcaccaaaacuccgagggacgcggccaggcugccgaccugaaaagcacccaggcugccaucgaucagauuaauggcaagcucaacagacugaucgggaaaacaaaugaaaaguuccaccaaauugagaaggaauuuucugagguggaaggacggauccaggaccuugagaaauacgucgaggauaccaagauugaccugugguccuauaacgccgaacuccugguggcucuggagaaccagcauacgaucgaucucacagacagcgaaaugaauaaacuguucgagaagaccaaaaagcagcuuagagaaaacgcggaggauaugggcaaugggugcuuuaagaucuaccacaaaugugacaacgccugcauuggaucuauccgcaauggcaccuauaaccaugauguuuaccgggacgaggcucugaauaacagauuccaaauuaaggggguggaacucaaauccggcuacaaggacuggauccuguggauuagcuuugccaucuccugcuuccuucugugugucgcccuccugggauuuaucaugugggcuugccagaaaggcaauauucgcuguaacaucugcauuuga

SEQ ID NO: 201616 - RNA, 1701 nt, Artificial Sequence
  derived and/or modified CDS sequence (opt5) from hemagglutinin__InfluenzaA__AFN19649
augaagaccaucauugcccugagcuacauccucugccugguguucgcucagaaacuucccggcaacgacaauuccacagccacgcugugucucgggcaccaugcggucccuaacggaaccauuguuaagacaaucaccaaugaucaaauugaggugacaaacgcuaccgaacuggugcaaaauucuagcaucuccgagaucugcgacucuccgcaccagauucuugauggcgaaaacuguacacugaucgacgcccuccugggggauccccagugcgacggauuucagaauaaaaagugggaucuguucgucgagagaagcaaagccuauuccaacuguuacccuuaugacgugcccgauuacgcuucucuccggagccugguugccuccagcggcacccuugaauuuaauaacgagucuuucaauuggacgggggugacccagaacggaacauccagcgcuugcauucgcagaucuaauuccagcuuuuucucucggcugaacuggcucacccaucugaauuuuaaguauccugcccuuaacgucacaaugcccaacaaugagcaguucgacaagcuguacaucuggggcgugcaccauccuggcaccgauaaagaccagauuuuucucuaugcgcaauccagcgggcgcaucacgguuuccacaaagagaucucagcaggccgugauuccgaacaucggaagccggccccgcaucagaaauauuccuucccggaucagcauuuacuggaccaucgucaaacccggcgauauucugcugaucaacucuacagggaaucucaucgcuccucgcggauacuucaagauuagauccggcaaaagcucuaucaugcggagcgacgcccccauugggaaguguaacuccgaaugcaucaccccgaauggaucuauuccuaacgacaagcccuuucagaaugugaaccgcaucaccuauggcgcuuguccuagauacgugaaacaaagcacacugaagcuggccacgggcaugcggaauguccccgagaaacagacccgcgggaucuucggagcgauugccggcuuuaucgaaaacgggugggagggaaugauggauggcugguauggguucagacaccaaaauuccgagggacggggccaggcugccgaccuuaagagcacacaggcugccauugaucagaucaacggcaaacucaauagacugauugggaagaccaacgaaaaauuccaccagaucgagaaggaauuuucugagguugaaggacgcauucaagaccuugagaaguacguggaggauacaaaaaucgaccugugguccuauaacgccgaacuccugguggcucuggagaaucagcauaccaucgaucucacggacagcgaaaugaacaagcuguucgagaaaacaaagaaacagcuucgggaaaaugcggaggauaugggcaacgggugcuuuaagauuuaccacaagugugacaaugccugcaucggaucuauuagaaacggcaccuaugaucaugacgucuaccgcgacgaggcucugaauaaccgguuccagaucaaagggguggaacucaaguccggcuacaaagauuggauucuguggaucagcuuugccaucuccugcuuccuucuguguguugcccuccugggauuuauuaugugggcuugccaaaagggcaauaucagauguaacauuugcaucuga

SEQ ID NO: 201617 - RNA, 1701 nt, Artificial Sequence; identical to SEQ ID NO: 201609
  derived and/or modified CDS sequence (opt5) from hemagglutinin__InfluenzaA__AFN19653

SEQ ID NO: 201618 - RNA, 1701 nt, Artificial Sequence; identical to SEQ ID NO: 201525
  derived and/or modified CDS sequence (opt5) from hemagglutinin__InfluenzaA__AFN19663

SEQ ID NO: 201619 - RNA, 1701 nt, Artificial Sequence; identical to SEQ ID NO: 201533
  derived and/or modified CDS sequence (opt5) from hemagglutinin__InfluenzaA__AFN19665

SEQ ID NO: 201620 - RNA, 1701 nt, Artificial Sequence
  derived and/or modified CDS sequence (opt5) from hemagglutinin__InfluenzaA__AFN19667
augaagaccaucauugcccugagcuacauccucugccugguguucgcucagaaacuucccggcaacgacaauuccacagccacgcugugucucgggcaccaugcggucccuaacggaaccauuguuaagacaaucaccaaugaucaaauugaggugacaaacgcuaccgaacuggugcaaaauucuagcaucggcgagaucugcgacuccccgcaccagauucuugauggggaaaacuguacacugaucgacgcccuccugggagauccccagugcgacggcuuucagaauaaaaagugggaucuguucgucgagagaucuaaagccuauagcaacuguuacccuuaugacgugcccgauuacgcuucccuccggucucugguugccagcuccgggacccuugaauuuaauaacgagagcuucaauuggacgggagugacccagaacggcacaucuuccgcuugcaugcgcagaagcaauucuuccuuuuucagccggcugaacuggcucacccaucugaauuuuaaguauccugcccuuaacgucacaaugcccaacaaugagcaguucgacaagcuguacauuuggggcgugcaccauccugggaccgauaaagaccagaucuuucucuaugcgcaaucuuccggacgcauuacgguuagcacaaagagaucccagcaggccgugaucccgaacauuggcucucggccccgcaucagaaauaucccuagccggauuuccaucuacuggaccauugucaaacccggggauauccugcugauuaacagcacaggaaaucucaucgcuccucgcggcuacuucaagaucagaucugggaaauccagcauuaugcggucugacgcccccaucggaaaguguaacagcgaaugcauuaccccgaauggcuccaucccuaacgacaagcccuuucagaaugugaaccgcauuaccuauggcgcuuguccuagauacgugaaacaaucuacacugaaacuugccacggggaugcggaauguccccgagaagcagacccgcggaaucuucggcgcgaucgccggguuuauugaaaacggaugggagggcaugguugaugggugguauggauucagacaccagaauagcgagggccggggccaagcugccgaccugaaguccacacaggcugccaucgaucagauuaacgggaaacucaauagacugaucggaaagaccaacgaaaaauuccaccagauugagaaggaauuuagcgagguggaaggccgcauccaagaccuugagaaguacguggaggauacaaaaauugaccuguggucuuauaacgccgaacuccuggucgcucuggagaaucagcauaccaucgaucucacggacuccgaaaugaacaagcuguucgagaaaacaaagaaacagcuucgggaaaaugcggaggauauggggaacggaugcuuuaagaucuaccacaagugugacaaugccugcauuggcagcaucagaaacgggaccuaugaucaugacguguaccgcgacgaggcucugaauaaccgguuccagauuaaaggcguugaacucaagucuggauacaaagauuggauccuguggauuuccuuugccaucagcugcuuccuucuguguguggcccuccugggcuuuaucaugugggcuugccaaaaggggaauauuagauguaacaucugcauuuga

SEQ ID NO: 201621 - RNA, 1701 nt, Artificial Sequence
  derived and/or modified CDS sequence (opt5) from hemagglutinin__InfluenzaA__AFN19669
augaagaccaucauugcccugagcuacauccucugcaugguguucgcucagaaacugcccggcaacgacaauuccacagccacgcuuugucuggggcaccaugcggucccuaacggaaccauuguuaagacaaucaccaaugaucaaauugaggugacaaacgcuaccgaacucgugcaaaauucuagcaucggcgagaucugcgacuccccgcaccagauucuggauggggaaaacuguacacuuaucgacgcccugcucggagauccccagugcgacggcuuucagaauaaaaagugggaucuguucgucgagagaucuaaagccuauagcaacuguuacccuuaugacgugcccaauuacgcuucccugcggucucucguugccagcuccgggacccuggaauuuaacaaugagagcuucaacuggacgggagugacccagaauggcacaucuuccgcuugcaugcgcagaagcaacucuuccuuuuucagccggcuuaauuggcugacccaucucaacuuuaaguauccugcccugaacgucacaaugcccaauaacgagcaguucgauaaacuuuacauuuggggcgugcaccauccugggaccgacaaggaucagaucuuucuguaugcgcaaucuuccggacgcauuacgguuagcacaaagagaucccagcaggccgugaucccgaauauuggcucucggccccgcaucagaaacaucccuagccggauuuccaucuacuggaccauugucaaacccggggacauccuccugauuaauagcacaggaaaccugaucgcuccucgcggcuacuucaagaucagaucugggaaauccagcauuaugcggucugaugcccccaucggaaaguguaauagcgaaugcauuaccccgaacggcuccaucccuaaugacaagcccuuucagaacgugaaucgcauuaccuauggcgcuuguccuagauacgugaaacaaucuacacucaagcuggccacggggaugcggaacguccccgagaaacagacccgcggaaucuucggcgcgaucgccggguuuauugaaaauggaugggagggcaugguugacgggugguauggauucagacaccagaacagcgagggccggggccaagcugccgaucuuaaguccacacaggcugccaucgaccagauuaaugggaaacugaacagacucaucggaaagaccaacgaaaaauuccaccagauugagaaggaauuuagcgagguggaaggccgcauccaagaucuggagaaguacguggaggacacaaaaauugaucuuuggucuuauaaugccgaacugcucgucgcucuggagaaccagcauaccaucgaccugacggauuccgaaaugaauaaacucuucgagaagacaaagaaacagcugcgggaaaacgcggaggacauggggaauggaugcuuuaagaucuaccacaagugugauaacgccugcauuggcagcaucagaaaugggaccuaugaccaugauguguaccgcgacgaggcucuuaacaaucgguuccagauuaaaggcguugaacugaagucuggauacaaagacuggauccucuggauuuccuuugccaucagcugcuuccugcuuuguguggcccugcucggcuuuaucaugugggcuugccaaaaggggaacauuagauguaauaucugcauuuga

SEQ ID NO: 201622 - RNA, 1701 nt, Artificial Sequence
  derived and/or modified CDS sequence (opt5) from hemagglutinin__InfluenzaA__AFN19671
augaagaccaucauugcccugagcuacauccucugccugguguucgcucagaaacuucccggcaacgacaauuccacagccacgcugugucucgggcaccaugcggucccuaacggaaccauuguuaagacaaucaccaaugauagaauugaggugacaaacgcuaccgaacuggugcaaaauucuagcaucggcgagaucugcgacuccccgcaccagauucuugauggggaaaacuguacacugaucgacgcccuccugggagauccccagugcgacggcuuucagaauaaaaagugggaucuguucgucgagcggucuaaagccuauagcaacuguuacccuuaugacgugcccgauuacgcuucccuccgcucucugguugccagcuccgggacccuugaauuuaauaacgagagcuucaauuggacgggagugacccaaaacggcacaucuuccgcuugcauuagacggagcaauaacuccuuuuucucucgccugaauuggcucacccaucugaacuuuaaguauccugcccuuaacgucacaaugcccaauaacgagcaguucgacaagcuguacaucuggggcgugcaccauccugggaccgauaaagaccagauuuuucucuaugcgcagagcucuggaagaaucacgguuuccacaaagcggagccaacaggccgugauuccgaauaucggcucccgccccagaauccggaacauuccuucucgcaucagcauuuacuggaccaucgucaaacccggggauauucugcugaucaauuccacaggaaaccucaucgcuccuagaggcuacuucaagauucggagcgggaaaucuuccaucaugcgcagcgacgcccccauuggaaaguguaagucugaaugcaucaccccgaauggcagcauuccuaacgacaaacccuuucagaaugugaacagaaucaccuauggcgcuuguccucgguacgugaagcaguccacacugaaacuugccacggggaugcgcaauguccccgagaagcaaaccagaggaaucuucggcgcgauugccggguuuaucgaaaacggaugggagggcaugguugaugggugguauggauuccggcaccaaaauucugagggcagaggccaggcugccgaccugaaaagcacacaggcugccauugaucagaucaacgggaagcucaaucgccugauuggaaaaaccaacgaaaaguuccaccagaucgagaaggaauuuuccgagguggaaggccggauucaggaccuugagaaauacguggaggauacaaagaucgaccuguggagcuauaacgccgaacuccuggucgcucuggagaaucaacauaccaucgaucucacggacucugaaaugaacaaacuguucgagaagaccaaaaagcagcuuagagaaaaugcggaggauauggggaacggaugcuuuaagauuuaccacaaaugugacaaugccugcaucgaguccauucgcaacggcacauaugaucaugacguguaccgggacgaagcucugaauaacagauuccagaucaaggggguugagcucaaaagcggcuacaaggauuggauucuguggaucucuuuugccaucuccugcuuccuucuguguguggcccuccugggauuuauuaugugggcuugccagaaaggcaauauccgcuguaacauuugcaucuga

SEQ ID NO: 201623 - RNA, 1701 nt, Artificial Sequence; identical to SEQ ID NO: 201146
  derived and/or modified CDS sequence (opt5) from hemagglutinin__InfluenzaA__AFN19674

SEQ ID NO: 201624 - RNA, 1701 nt, Artificial Sequence; identical to SEQ ID NO: 201146
  derived and/or modified CDS sequence (opt5) from hemagglutinin__InfluenzaA__AFN19676

SEQ ID NO: 201625 - RNA, 1701 nt, Artificial Sequence; identical to SEQ ID NO: 201533
  derived and/or modified CDS sequence (opt5) from hemagglutinin__InfluenzaA__AFN19678

SEQ ID NO: 201626 - RNA, 1701 nt, Artificial Sequence
  derived and/or modified CDS sequence (opt5) from hemagglutinin__InfluenzaA__AFN19682
augaagaccaucauugcccugagcuacauccucugccugguguucgcucagaaacuucccggcaacgacaauuccacagccacgcugugucucgggcaccaugcggucccuaacggaaccauuguuaagacaaucaccaaugaucaaauugaggugacaaacgcuaccgaacuggugcaaaauucuagcaucggcgagaucugcgacuccccgcaccagauucuugauggggaaaacuguacacugaucgacgcccuccugggagauccccagugcgacggcuuucagaauaaaaagugggaucuguucgucgagagaucuaaagccuauagcaacuguuacccuuaugacgugcccaauuacgcuucccuccggucucugguugccagcuccgggacccuugaauuuaacaaugagagcuucaacuggacgggagugacccagaauggcacaucuuccgcuugcaugcgcagaagcaacucuuccuuuuucagccggcugaauuggcucacccaucugaacuuuaaguauccugcccuuaacgucacaaugcccaauaacgagcaguucgauaagcuguacauuuggggcgugcaccauccugggaccgacaaagaucagaucuuucucuaugcgcaaucuuccggacgcauuacgguuagcacaaagagaucccagcaggccgugaucccgaauauuggcucucggccccgcaucagaaacaucccuagccggauuuccaucuacuggaccauugucaaacccggggacauccugcugauuaauagcacaggaaaccucaucgcuccucgcggcuacuucaagaucagaucugggaaauccagcauuaugcggucugaugcccccaucggaaaguguaauagcgaaugcauuaccccgaacggcuccaucccuaaugacaagcccuuucagaacgugaaucgcauuaccuauggcgcuuguccuagauacgugaaacaaucuacacugaaacuugccacggggaugcggaacguccccgagaagcagacccgcggaaucuucggcgcgaucgccggguuuauugaaaauggaugggagggcaugguugacgggugguauggauucagacaccagaacagcgagggccggggccaagcugccgaucugaaguccacacaggcugccaucgaccagauuaaugggaaacucaacagacugaucggaaagaccaacgaaaaauuccaccagauugagaaggaauuuagcgagguggaaggccgcauccaagaucuugagaaguacguggaggacacaaaaauugaucuguggucuuauaaugccgaacuccuggucgcucuggagaaccagcauaccaucgaccucacggauuccgaaaugaauaagcuguucgagaaaacaaagaaacagcuucgggaaaacgcggaggacauggggaauggaugcuuuaagaucuaccacaagugugauaacgccugcauuggcagcaucagaaaugggaccuaugaccaugauguguaccgcgacgaggcucugaacaaucgguuccagauuaaaggcguugaacucaagucuggauacaaagacuggauccuguggauuuccuuugccaucagcugcuuccuucuguguguggcccuccugggcuuuaucaugugggcuugccaaaaggggaacauuaaauguaauaucugcauuuga

SEQ ID NO: 201627 - RNA, 1701 nt, Artificial Sequence
  derived and/or modified CDS sequence (opt5) from hemagglutinin__InfluenzaA__AFN19684
augaagaccaucauugcccugagcuacauccucugccuggcuuucgcccagaaacuucccggcaacgacaauuccacagcgacgcugugucucgggcaccaugcugugccuaacggaaccauugucaagacaaucaccaaugaucaaauugagguuacaaacgccaccgaacuggugcagucuagcuccacaggcgagaucugcgacucuccgcaccagauccuugauggggaaaauuguacccugauugacgcccuccugggagauccccagugcgacggcuuucaaaacaaaaagugggaucuguucguggagagaagcaaggcuuauuccaauuguuacccuuaugacguccccgauuacgccucucuccggagccugguggcuuccagcgggacgcuugaauuuaacaaugagucuuucaacuggaccggaguuacacagaauggcaccuccagcgccugcauccgcggcucuaacuccagcuuuuucucuagacugaauuggcucacacaucugaacuuuaaguauccugcgcuuaaugugaccaugcccaacaacgagcaguucgacaagcuguacauuuggggaguccaccauccugggacggauaaagaccagaucuuucucuaugcccaauccagcggccggauuacaguguccaccaagcgcucucagcaggcuguuaucccgaauauugggagcagaccccggauccgcaacaucccuuccagaauuagcaucuacuggacaauugugaaacccggagauauccugcugauuaauucuaccggcaaccucaucgccccucggggguacuucaagauccgcuccggaaaaagcucuauuaugagaagcgacgcucccaucggcaaguguaauuccgaaugcauuaccccgaacggcucuaucccuaaugacaagcccuuucagaacgucaaucggauuacauauggggccuguccucgcuacgugaaacaaagcacgcugaaacuugcgaccggaaugagaaacgugcccgagaaacagacacggggcaucuucggggccaucgcuggauuuauugaaaauggcugggaggggauggucgauggaugguauggcuuccgccaccagaacuccgagggcagagggcaagccgcugaccucaagagcacccaggccgccaucgaucagauuaauggaaaacugaaccggcugaucggcaagacaaaugaaaaauuccaccagauugagaaggaauuuucugagguugaagggagaauccaagaccuugagaaguacguggaggauaccaaaauugaccugugguccuauaacgcugaacuccugguggcgcuggagaaccagcauacgaucgaucucacagacagcgaaaugaauaagcuguucgagaaaaccaagaaacagcuucgcgaaaacgccgaggauaugggaaauggcugcuuuaagaucuaccacaagugugacaacgcuugcauugggucuauccggaauggcaccuauaaccauaaugucuacagagaugaggcccugaacaaucgcuuccagauuaaaggaguggaacucaaguccggcuacaaagacuggauccuguggauuagcuuugccaucuccugcuuccuucuguguguugcucuccugggguuuaucaugugggccugccaaaagggaaacauucgguguaauaucugcauuuga

SEQ ID NO: 201628 - RNA, 1701 nt, Artificial Sequence
  derived and/or modified CDS sequence (opt5) from hemagglutinin__InfluenzaA__AFN19686
augaagaccaucauugcccugagcuacauccucugccuggcuuucgcccagaaacuucccggcaacgacaauuccacagcgacgcugugucucgggcaccaugcugugccuaacggaaccauugucaagacaaucaccaaugaucaaauugagguuacaaacgccaccgaacuggugcagucuagcuccacaggcgagaucugcgacucuccgcaccagauccuugauggggaaaauuguacccugauugacgcccuccugggagauccccagugcgacggcuuucaaaacaaaaagugggaucuguucguggagagaagcaaggcuuauuccaauuguuacccuuaugacguccccgauuacgccucucuccggagccugguggcuuccagcgggacgcuugaauuuaacaaugagucuuucaacuggaccggaguuacacagaauggcaccuccagcgccugcauccgcagaucuaacuccagcuuuuucucucggcugaauuggcucacacaucugaacuuuaaguauccugcgcuuaaugugaccaugcccaacaacgagcaguucgacaagcuguacauuuggggcguccaccauccugggacggauaaagaccagaucuuucucuaugcccaauccagcggacgcauuacaguguccaccaagagaucucagcaggcuguuaucccgaauauuggcagccggccccgcaucagaaacaucccuucccggauuagcaucuacuggacaauugugaaacccggggauauccugcugauuaauucuaccggaaaccucaucgccccucgcggcuacuucaagaucagauccgggaaaagcucuauuaugcggagcgacgcucccaucggaaaguguaauuccgaaugcauuaccccgaacggcucuaucccuaaugacaagcccuuucagaacgucaaucgcauuacauauggcgccuguccuagauacgugaaacaaagcacgcugaaacuugcgaccgggaugcggaacauccccgagaaacagacacgcggaaucuucggcgccauugcuggguuuaucgaaaauggaugggagggcaugguggaugggugguauggauucagacaccagaacuccgagggccggggccaagccgcugaccucaagagcacccaggccgccauugaucagaucaaugggaaacugaacagacugauuggaaagacaaaugaaaaauuccaccagaucgagaaggaauuuucugaggucgaaggccgcauucaagaccuugagaaguacguugaggauaccaaaaucgaccugugguccuauaacgcugaacuccugguggcgcuggagaaccagcauacgaucgaucucacagacagcgaaaugaauaagcuguucgagaaaaccaagaaacagcuucgggaaaacgccgaggauauggggaauggaugcuuuaagauuuaccacaagugugacaacgcuugcaucggcucuauuagaaaugggaccuauaaccauaauguguaccgcgaugaggcccugaacaaucgguuccagaucaaaggcgucgaacucaaguccggauacaaagacuggauucuguggaucagcuuugccaucuccugcuuccuucuguguguggcucuccugggcuuuauuaugugggccugccaaaaggggaacaucagauguaauauuugcaucuga

SEQ ID NO: 201629 - RNA, 1701 nt, Artificial Sequence
  derived and/or modified CDS sequence (opt5) from hemagglutinin__InfluenzaA__AFN19688
augaagaccaucauugcccugagcuacauccucugccugguguucgcucaggagcuucccggcaacgacaauuccacagccacgcugugucucgggcaccaugcggucccuaacggaaccauuguuaaaacaaucaccaaugaucaaauugaagugacaaacgcuaccgagcuggugcagucuagcuccacaggcgaaaucugcgacucuccgcaccagauccuugauggggagaauuguacccugauugacgcccuccugggagauccccagugcgacggcuuucaaaacaagaaaugggaucuguucgucgaaagaagcaaggccuauuccaauuguuacccuuaugacgugcccgauuacgcuucucuccggagccugguugccuccagcgggacgcuugaguuuaacaaugagucuuucaacuggaccggagugacacagaauggcaccuccagcgcuugcauccgcagaucuaacuccagcuuuuucucucggcugaauuggcucacacaucugaacuuuaaauauccugcccuuaaugucaccaugcccaacaacgaacaguucgacaagcuguacauuuggggcgugcaccauccugggacggauaaggaccagaucuuucucuaugcgcaauccagcggacgcauuacaguuuccaccaaaagaucucagcaggccgugaucccgaauauuggcagccggccccgcaucagaaacaucccuucccggauuagcaucuacuggacaauugucaagcccggggauauccugcugauuaauucuaccggaaaccucaucgcuccucgcggcuacuucaaaaucagauccggaaagagcucuauuaugcggagcgacgcccccaucgggaaauguaauuccgagugcauuaccccgaacggcucuaucccuaaugacaagcccuuucagaacgugaaucgcauuacauauggcgcuuguccuagauacgugaagcaaagcacgcugaaacuugccaccgggaugcggaacguccccgaaaagcagacacgcggaaucuucggcgcgaucgccggguuuauugagaauggaugggagggcaugguugaugggugguauggauucagacaccagaacuccgaaggccggggccaagcugccgaccugaaaagcacccaggcugccaucgaucagauuaaugggaagcucaacagacugaucggaaaaacaaaugagaaguuccaccagauugaaaaagaguuuucugaaguggagggccgcauccaagaccuugagaaguacguggaagauaccaagauugaccugugguccuauaacgccgagcuccuggucgcucuggaaaaccagcauacgaucgaucucacagacagcgagaugaauaaacuguucgaaaagaccaaaaagcagcuucgggagaacgcggaggauauggggaauggaugcuuuaaaaucuaccacaagugugacaacgccugcauuggcucuaucagaaaugggaccuauaaccaugauguguaccgcgacgaagcucugaauaaccgguuccagauuaagggcguugagcucaaauccggauacaaggacuggauccuguggauuagcuuugccaucuccugcuuccuucuguguguggcccuccugggcuuuaucaugugggcuugccaaaaagggaauauuagauguaacaucugcauuuga

SEQ ID NO: 201630 - RNA, 1701 nt, Artificial Sequence
  derived and/or modified CDS sequence (opt5) from hemagglutinin__InfluenzaA__AFN19690
augaagaccacaaucgcccugagcuacauucucugccugguguucgcucagaaacuucccggcaacgacaauuccacggccacccugugucucgggcaccaugcggucccuaacggaacaaucguuaagaccauuacaaaugauagaaucgaggugaccaacgcuacagaacuggugcaaaauucuagcauuggcgagaucugcgacuccccgcaccagauccuugauggggaaaacuguacccugauugacgcccuccugggagauccccagugcgacggcuuucagaauaaaaagugggaucuguucgucgagcggucuaaagccuauagcaacuguuacccuuaugacgugcccgauuacgcuucccuccgcucucugguugccagcuccgggacgcuugaauuuaauaacgagagcuucaauuggaccggagugacacaaaacggcaccucuuccgcuugcaucagacggagcaauaacuccuuuuucucucgccugaauuggcucacacaucugaacuuuaaguauccugcccuuaacgucaccaugcccaauaacgagcaguucgacaagcuguacauuuggggcgugcaccauccugggacggauaaagaccagaucuuucucuaugcgcagagcucuggaagaauuacaguuuccaccaagcggagccaacaggccgugaucccgaauauuggcucccgccccagaauccggaacaucccuucucgcauuagcaucuacuggacaauugucaaacccggggauauccugcugauuaauuccaccggaaaccucaucgcuccuagaggcuacuucaagauccggagcgggaaaucuuccauuaugcgcagcgacgcccccaucggaaaguguaagucugaaugcauuaccccgaauggcagcaucccuaacgacaaacccuuucagaaugugaacagaauuacauauggcgcuuguccucgguacgugaagcaguccacgcugaaacuugccaccgggaugcgcaauguccccgagaagcaaacaagaggaaucuucggcgcgaucgccggguuuauugaaaacggaugggagggcaugguugaugggugguauggauuccggcaccaaaauucugagggcagaggccaggcugccgaccugaaaagcacccaggcugccaucgaucagauuaacgggaagcucaaucgccugaucggaaaaacaaacgaaaaguuccaccagauugagaaggaauuuuccgagguggaaggccggauccaggaccuugagaaauacguggaggauaccaagauugaccuguggagcuauaacgccgaacuccuggucgcucuggagaaucaacauacgaucgaucucacagacucugaaaugaacaaacuguucgagaagaccaaaaagcagcuuagagaaaaugcggaggauauggggaacggaugcuuuaagaucuaccacaaaugugacaaugccugcauuggcuccauccgcaacgggaccuaugaucaugacguguaccgggacgaggcucugaauaacagauuccagauuaagggcguugaucucaaaagcggauacaaggacuggauccuguggauuucuuuugccaucuccugcuuccuucuguguguggcccuccugggcuuuaucaugugggcuugccagaaagggaauauucgcuguaacaucugcauuuga

SEQ ID NO: 201631 - RNA, 1701 nt, Artificial Sequence
  derived and/or modified CDS sequence (opt5) from hemagglutinin__InfluenzaA__AFN19692
augaagaccaucauugcccugagcuacauccucugccugguguucgcucagaaaauucccggcaacgacaauuccacagccacgcuuugucuggggcaccaugcggucccuaacggaaccaucguuaagacaauuaccaaugaucaaaucgaggugacaaacgcuaccgaacucgugcagucuagcuccacaggcgagaucugcgacucuccgcaccagauucuggauggggaaaauuguacccuuaucgacgcccugcucggagauccccagugcgacggcuuucaaaacaaaaagugggaucuguucgucgagagaagcaaagccuauuccaauuguuacccuuaugacgugcccgauuacgcuucucugcggagccucguugccuccagcgggacgcuggaauuuaacaaugagucuuucaacuggaccggagugacacagaauggcaccuccagcgcuugcauucgcagaucugacuccagcuuuuucucucggcuuaacuggcugacacaucucaauuuuaaguauccugcccugaacgucaccaugcccaauaacgagcaguucgauaagcuguacaucuggggcgugcaccauccugggacggacaaagaucagauuuuucuguaugcgcaagccuccggacgcaucacaguuagcaccaagagaucccagcaggcugugauuccgaacaucggcucucggccccgcaucagaaauauuccuagccggaucuccauuuacuggacaaucgucaaacccggggacauucuccugaucaacagcaccggaaaucugaucgccccucgcggcuacuucaagauuagaucugggaaauccagcaucaugcggucugacgcucccauuggaaaguguaacagcgaaugcaucaccccgaauggcuccauuccuaacgauaagcccuuucagaaugugaaccgcaucacauauggcgccuguccuagauacgugaaacaaaauacgcucaagcuggcgaccgggaugcggaacguccccgagaaacagacacgcggaaucuucggcgccauugcuggguuuaucgaaaauggaugggagggcaugguugacgggugguauggauucagacaccagaacucugagggccggggccaagccgcugaucuuaagagcacccaggccgccauugaccagaucaaugggaaacugaacagacucauuggaaagacaaaugaaaaauuccaccagaucgagaaggaauuuuccgagguggaaggccgcauucaagaucuggagaaguacguggaggacaccaaaaucgaucuuuggagcuauaacgcugaacugcucgucgcgcuggagaaccagcauacgaucgaccugacagauucugaaaugaauaaacucuucgagaagaccaagaaacagcugcgggaaaacgccgaggacauggggaauggaugcuuuaagauuuaccacaagugugauaacgcuugcaucggcuccauuagaaaugggaccuauaaccaugacguguaccgcgacgaggcccuuaauaaccgguuccagaucaaaggcguugaacuuaagagcggauacaaagauuggauucucuggaucucuuuugccaucuccugcuuccugcuuuguguggcucugcucggcuuuauuaugugggccugccaaaaggggaauaucagauguaacauuugcaucuga

SEQ ID NO: 201632 - RNA, 1701 nt, Artificial Sequence
  derived and/or modified CDS sequence (opt5) from hemagglutinin__InfluenzaA__AFN19694
augaagaccaucauugcccugagcuacauccucugccugguguucgcucagaaacuucccggcaacgacaauuccacagccacgcugugucucgggcaccaugcggucccuaacggaaccauuguuaagacaaucaccaaugauagaauugaggugacaaacgcuaccgaacuggugcaaaauucuccgaucggcgagaucugcgacagcccccaccagauucuugauggggaaaacuguacacugaucgacgcccuccugggagauccucagugcgacggcuuucagaauaaaaagugggaucuguucgucgagcgguccaaagccuauucuaacuguuaccccuaugacgugccugauuacgcuagccuccgcucccugguugccucuagcgggacccuugaauuuaauaacgaguccuucaauuggacgggagugacccaaaacggcacaagcucugcuugcauuagacgguccaauaacagcuuuuucucucgccugaauuggcucacccaucugaacuuuaaguaucccgcccuuaacgucacaaugccuaauaacgagcaguucgacaagcuguacaucuggggcgugcaccauccggggaccgauaaagaccagauuuuucucuaugcgcaguccagcggaagaaucacgguuucuacaaagcggucccaacaggccgugauucccaauaucggcagccgcccuagaauccggaacauucccucccgcaucucuauuuacuggaccaucgucaaaccuggggauauucugcugaucaauagcacaggaaaccucaucgcucccagaggcuacuucaagauucgguccgggaaaagcucuaucaugcgcuccgacgccccgauuggaaaguguaagagcgaaugcaucaccccuaauggcucuauucccaacgacaaaccuuuucagaaugugaacagaaucaccuauggcgcuuguccccgguacgugaagcagagcacacugaaacuugccacggggaugcgcaauguccccgagaagcaaaccagaggaaucuucggcgcgauugccggguuuaucgaaaacggaugggagggcaugguugaugggugguauggauuccggcaccaaaauuccgagggcagaggccaggcugccgaccugaaaucuacacaggcugccauugaucagaucaacgggaagcucaaucgccugauuggaaaaaccaacgaaaaguuccaccagaucgagaaggaauuuagcgagguggaaggccggauucaggaccuugagaaauacguggaggauacaaagaucgaccugugguccuauaacgccgaacuccuggucgcucuggagaaucaacauaccaucgaucucacggacagcgaaaugaacaaacuguucgagaagaccaaaaagcagcuuagagaaaaugcggaggauauggggaacggaugcuuuaagauuuaccacaaaugugacaaugccugcaucggcucuauucgcaacgggacauaugaucaugacguguaccgggacgaggcucugaauaacagauuccagaucaagggcguugaacucaaauccggauacaaggauuggauucuguggaucagcuuugccaucucuugcuuccuucuguguguggcccuccugggcuuuauuaugugggcuugccagaaagggaauauccgcuguaacauuugcaucuga

SEQ ID NO: 201633 - RNA, 1701 nt, Artificial Sequence
  derived and/or modified CDS sequence (opt5) from hemagglutinin__InfluenzaA__AFN19700
augaagaccaucauugcccugagcuacauccucugccugguguucgcucagaaacuucccggcaacgacaauuccacagccacgcugugucucgggcaccaugcggucccuaacggaaccauuguuaagacaaucaccaaugaucaaauugaggugacaaacgcuaccgaacuggugcaaaauucuagcaucggcgagaucugcgacuccccgcaccagauucuugauggggaaaacuguacacugaucgacgcccuccugggagauccccagugcgacggcuuucagaauaaaaagugggaucuguucgucgagagaucuaaagccuauagcaacuguuacccuuaugacgugcccgauuacgcuucccuccggucucugguugccagcuccgggacccuugaauuuaauaacgagcgcuucaauuggagcggagugacgcagaacggcaccucuuccgcuugcaugagacggagcaauucuuccuuuuucagccgccugaacuggcucacacaucugaauuuuaaguauccugcccuuaacgucaccaugcccaacaaugagcaguucgacaagcuguacauuuggggcgugcaccauccugggacagauaaagaccagaucuuucucuaugcgcaaucuuccggaagaauuaccguuagcacgaagcggucccagcaggccgugaucccgaacauuggcucucgccccagaauccggaauaucccuagccgcauuuccaucuacuggacaauugucaaacccggggauauccugcugauuaacagcaccggaaaucucaucgcuccuagaggcuacuucaagauccggucugggaaauccagcauuaugcgcucugacgcccccaucggaaaguguaacagcgaaugcauuacaccgaauggcuccaucccuaacgacaagcccuuucagaaugugaacagaauuaccuauggcgcuuguccucgguacgugaaacaaucuacccugaaacuugccacagggaugcgcaauguccccgagaagcagacgagaggaaucuucggcgcgaucgccggguuuauugaaaacggaugggagggcaugguugaugggugguauggauuccggcaccagaauagcgagggcagaggccaagcugccgaccugaaguccacccaggcugccaucgaucagauuaacgggaaacucaaucgccugaucggaaagacaaacgaaaaauuccaccagauugagaaggaauuuagcgagguggaaggccggauccaagaccuugagaaguacguggaggauaccaaaauugaccuguggucuuauaacgccgaacuccuggucgcucuggagaaucagcauacaaucgaucucaccgacuccgaaaugaacaagcuguucgagaaaacgaagaaacagcuuagagaaaaugcggaggauauggggaacggaugcuuuaagaucuaccacaagugugacaaugccugcauuggcagcauccgcaacgggacauaugaucaugacguguaccgggacgaggcucugaauaacagauuccagauuaaaggcguugaacucaagucuggauacaaagauuggauccuguggauuuccuuugccaucagcugcuuccuucuguguguggcccuccugggcuuuaucaugugggcuugccaaaaggggaauauucgcuguaacaucugcauuuga

SEQ ID NO: 201634 - RNA, 1701 nt, Artificial Sequence
  derived and/or modified CDS sequence (opt5) from hemagglutinin__InfluenzaA__AFN19702
augaagaccaucauugcccugagcuacauccucugccugguguucgcucagaaacuucccggcaacgacaauuccacagccacgcugugucucgggcaccaugcggucccuaacggaaccauuguuaagacaaucaccaaugauagaauugaggugacaaacgcuaccgaacuggugcaaaauucuagcaucggcgagaucugcgacuccccgcaccagauucuugauggggaaaacuguacacugaucgacgcccuccugggagauccccagugcgacggcuuucagaauaaaaagugggaucuguucgucgagcgggggaaagccuauucuaacuguuacccuuaugacgugcccgauuacgcuagccuccgcucccugguugccucuagcggaacccuugaauuuaauaacgaguccuucaauuggacgggcgugacccaaaacggcacaagcucugcuugcauuagacgguccaauaacagcuuuuucucucgccugaauuggcucacccaucugaacuuuaaguauccugcccuuaacgucacaaugcccaauaacgagcaguucgacaagcuguacaucuggggagugcaccauccugggaccgauaaagaccagauuuuucucuaugcgcaguccagcggcagaaucacgguuucuacaaagcggucccaacaggccgugauuccgaauaucgggagccgccccagaauccggaacauuccuucccgcaucucuauuuacuggaccaucgucaaacccggagauauucugcugaucaauagcacaggcaaccucaucgcuccuagaggguacuucaagauucgguccggaaaaagcucuaucaugcgcuccgacgcccccauuggcaaguguaagagcgaaugcaucaccccgaauggcucuauuccuaacgacaaacccuuucagaaugugaacagaaucaccuauggggcuuguccucgguacgugaagcagagcacacugaaacuugccacgggaaugcgcaauguccccgagaagcaaaccagaggcaucuucggggcgauugccggauuuaucgaaaacggcugggaggggaugguugauggaugguauggcuuccggcaccaaaauuccgagggcagagggcaggcugccgaccugaaaucuacacaggcugccauugaucagaucaacggaaagcucaaucgccugauuggcaaaaccaacgaaaaguuccaccagaucgagaaggaauuuagcgagguggaagggcggauucaggaccuugagaaauacguggaggauacaaagaucgaccugugguccuauaacgccgaacuccuggucgcucuggagaaucaacauaccaucgaucucacggacagcgaaaugaacaaacuguucgagaagaccaaaaagcagcuuagagaaaaugcggaggauaugggaaacggcugcuuuaagauuuaccacaaaugugacaaugccugcaucgggucuauucgcaacggcacauaugaucaugacguguaccgggacgaggcucugaauaacagauuccagaucaagggaguugaacucaaauccggcuacaaggauuggauucuguggaucagcuuugccaucucuugcuuccuucuguguguggcccuccugggguuuauuaugugggcuugccagaaaggaaauauccgcuguaacauuugcaucuga

SEQ ID NO: 201635 - RNA, 1701 nt, Artificial Sequence; identical to SEQ ID NO: 198887
  derived and/or modified CDS sequence (opt5) from hemagglutinin__InfluenzaA__AFN19709

SEQ ID NO: 201636 - RNA, 1701 nt, Artificial Sequence
  derived and/or modified CDS sequence (opt5) from hemagglutinin__InfluenzaA__AFN19719
augaaggccauccuggugguccuccuguacaccuucgcuacagccaacgcggacacgcuuugcauuggcuaucacgcuaauaacagcaccgauacaguugacaccgugcuggagaaaaaugugacagucacccauuccgugaaccuccuggaagauaagcacaaugggaaacuuuguaagcugagaggaguugcuccccuccaucugggcaaaugcaacaucgccggguggauucugggaaauccugagugugaaucucucagcacagccuccucuuggagcuacaucguggagaccuccucuagcgacaacggcacgugcuauccgggggauuuuauugacuacgaagaacugcgggagcagcuuuccagcgucucuuccuucgaacgcuuugagaucuuccccaagaccagcucuuggccuaaucacgauuccaacaagggagugacagccgcuuguccccaugccggcgcgaaaucuuuuuauaagaaucugaucuggcucguuaaaaagggcaacagcuacccuaaacuguccaagagcuauauuaaugacaaggggaaagaagugcuuguccuguggggaauccaccaccccuccaccacagccgaucaacagucucucuaccagaacgcugacaccuacguguucgugggcacgagcagauauuccaagaaauuuaagccugagauugccauccggccgaaaguccgcgaucaggaggggagaaugaauuacuauuggacacugguugaacccggagacaagauuaccuucgaggcuacaggcaaccugguggugccucgguacgccuuugcgauggaacgcaacgccgggagcggaaucauuaucucugauacccccguccaugacugcaauaccacaugucaaacgccuaaaggcgcuaucaacaccucccuccccuuccagaauauucacccgaucacaauuggcaagugcccuaaguaugugaaaagcaccaagcugagacuugccacagggcugcggaacguucccucuauccagagccgcggacucuuuggcgcuauugccggguucaucgagggaggcuggaccgggaugguggacggaugguacggcuaucaucaccagaaugaacaaggcuccggguacgccgcugaucugaaaucuacgcagaacgcgaucgacaagauuacaaauaaagucaacagcgugaucgagaagaugaauacccaguuuaccgccguuggaaaggaguucaaccaccuugagaaaagaauugagaaucugaacaagaaaguggaugacggcuuccucgauaucuggacauacaaugcugaacugcugguccuccuggagaacgaacggacccuugacuaucaugauuccaaugugaagaaccuguacgagaaaguccgcacacagcucaagaacaaugccaaggagauugggaacggauguuuugaguucuaucacaaaugcgacaauacguguauggaaagcgugaagaacggcaccuacgauuauccuaaauacucugaagaggccaagcugaauagagaagagaucgacgggguuaaacuugaguccacacggguguaucaaauccuggcuauuuacagcaccgucgccucuucccucgugcugguugugagccugggcgcgaucuccuuuuggaugugcucuaacggaagccuccagugccgcauuuguaucuga

SEQ ID NO: 201637 - RNA, 1701 nt, Artificial Sequence; identical to SEQ ID NO: 198507
  derived and/or modified CDS sequence (opt5) from hemagglutinin__InfluenzaA__AFN19730

SEQ ID NO: 201638 - RNA, 1701 nt, Artificial Sequence; identical to SEQ ID NO: 198887
  derived and/or modified CDS sequence (opt5) from hemagglutinin__InfluenzaA__AFN19736

SEQ ID NO: 201639 - RNA, 1701 nt, Artificial Sequence
  derived and/or modified CDS sequence (opt5) from hemagglutinin__InfluenzaA__AFN19748
augaaggccauccuggugguccuccuguacaccuucgcuacagccaacgcggacacgcuuugcauuggcuaucacgcuaauaacagcaccgauacaguugacaccgugcuggagaagaaugugacagucacccauuccgugaaccuccuggaagauaagcacaaugggaaacuuuguaagcugagaggaguugcuccccuccaucugggcaaaugcaacaucgccggguggauucugggaaauccugagugugaaucucucagcacagccuccucuuggagcuacaucguggagaccuccucuagcgacaacggcacgugcuauccgggggauuuuauugacuacgaagaacugcgggagcagcuuuccagcgucucuuccuucgaacgcuuugagaucuuccccaagaccagcucuuggccuaaucacgauuccaacaagggagugacagccgcuuguccccaugccggcgcgaaaucuuuuuauaagaaucugaucuggcucguuaaaaccggcaacagcuacccuaagcuguccaaaagcuauauuaaugacaaggggaaggaagugcuuguccuguggggaauccaccaccccuccacaaccgccgaucaacagucucucuaccagaacgcugacacguacguguucgugggcacaagcagauauuccaaaaaguuuaaaccugagauugccauccggccgaagguccgcgaucaggaggggagaaugaauuacuauuggacccugguugaacccggagacaaaauuacauucgaggcuaccggcaaccugguggugccucgguacgccuuugcgauggaacgcaacgccgggagcggaaucauuaucucugauacccccguccaugacugcaauacaacgugucaaaccccuaagggcgcuaucaacacaucccuccccuuccagaauauucacccgaucaccauuggcaaaugcccuaaguauguuaagagcacaaaacugagacuugccaccgggcugcggaacgugcccucuauccagagccgcggacucuuuggcgcuauugccggguucaucgagggaggcuggacggggaugguggacggaugguacggcuaucaucaccagaaugaacaaggcuccggguacgccgcugaucugaagucuacacagaacgcgaucgacaaaauuaccaauaaggucaacagcgugaucgagaaaaugaauacccaguuuacagccguuggaaaggaguucaaccaccuugaaaagagaauugagaaucugaacaaaaagguggaugacggcuuccucgauaucuggaccuacaaugcugaacugcugguccuccuggagaacgaacggacacuugacuaucaugauuccaaugugaaaaaccuguacgagaagguccgcaaccagcucaaaaauaacgccaaggagacggggaauggauguuuugaguucuaucacaagugcgacaacaccuguauggagagcgugaaaaauggcacauacgauuauccuaaguacucugaagaggccaaacugaacagagaagagauugacgggguuaaacuugaguccacccggaucuaucaaauccuggcuauuuacagcacaguggccucuucccucguccuggugguuagccugggcgcgaucuccuuuuggaugugcucuaauggaagccuccagugccgcauuuguaucuga

SEQ ID NO: 201640 - RNA, 1701 nt, Artificial Sequence; identical to SEQ ID NO: 198896
  derived and/or modified CDS sequence (opt5) from hemagglutinin__InfluenzaA__AFN19757

SEQ ID NO: 201641 - RNA, 1701 nt, Artificial Sequence; identical to SEQ ID NO: 198887
  derived and/or modified CDS sequence (opt5) from hemagglutinin__InfluenzaA__AFN19768

SEQ ID NO: 201642 - RNA, 1701 nt, Artificial Sequence
  derived and/or modified CDS sequence (opt5) from hemagglutinin__InfluenzaA__AFN19781
augaaggccauccuggugguccuccuguacaccuucgcuacagccaacgcggacacgcuuugcauuggcuaucacgcuaauaacagcaccgauacaguugacaccgugcuggagaaaaaugugacagucacccauuccgugaaccuccuggaagauaagcacaaugggaaacuuuguaagcugagaggaguugcuccccuccaucugggcaaaugcaacaucgccggguggauucugggaaauccugagugugaaucucucagcacagccuccucuuggagcuacaucguggagaccuccucuagcgacaacggcacgugcuauccgggggauuuuauugacuacgaagaacugcgggagcagcuuuccagcgucucuuccuucgaacgcuuugagaucuuccccaagaccagcucuuggccuaaucacgauuccaacaagggagugacagccgcuuguccccaugccggcgcgaaaucuuuuuauaagaaucugaucuggcucguuaaaaagggcaacagcuacccuaaacuguccaagagcuauauuaaugacaaggggaaagaagugcuuguccuguggggaauccaccaccccuccaccacagccgaucaacagucucucuaccagaacgcugacaccuacguguucgugggcacgagcagauauuccaagaaauuuaagccugagauugccauccggccgaaaguccgcgaucaggaggggagaaugaauuacuauuggacacugguugaacccggagacaagauuaccuucgaggcuacaggcaaccugguggugccucgguacgccuuugcggucgaacgcaacgccgggagcggaaucauuaucucugauacccccgugcaugacugcaauaccacaugucaaacgccuaaaggcgcuaucaacaccucccuccccuuccagaauauucacccgaucacaauuggcaagugcccuaaguauguuaaaagcaccaagcugagacuugccacagggcugcggaacgugcccucuauccagagccgcggacucuuuggcgcuauugccggguucaucgagggaggcuggaccgggauggucgacggaugguacggcuaucaucaccagaaugaacaaggcuccggguacgccgcugaucugaaaucuacgcagaacgcgaucgacaagauuacaaauaaagugaacagcguuaucgagaagaugaauacccaguuuaccgccgugggaaaggaguucaaccaccuugagaaaagaauugagaaucugaacaagaaagucgaugacggcuuccucgauaucuggacauacaaugcugaacugcuggugcuccuggagaacgaacggacccuugacuaucaugauuccaaugucaagaaccuguacgagaaagugcgcaaccagcucaagaauaacgccaaggagauugggaauggauguuuugaguucuaucacaaaugcgacaacacauguauggaaagcguuaagaauggcacguacgauuauccuaaauacucugaagaggccaagcugaacagagaagagaucgacggggugaaacuugaguccacccggaucuaucaaauucuggcuaucuacagcacagucgccucuucccucgugcugguugugagccugggcgcgauuuccuuuuggaugugcucuaauggaagccuccagugccgcaucuguauuuga

SEQ ID NO: 201643 - RNA, 1701 nt, Artificial Sequence
  derived and/or modified CDS sequence (opt5) from hemagglutinin__InfluenzaA__AFN19791
augaaggccauccuggugguccuccuguacaccuucgcuauugccaacgcggacacacuuugcaucggcuaucacgcuaauaacagcacggauaccguugacacagugcuggagaaaaaugugaccgucacacauuccgugaaccuccuggaagauaagcacaaugggaaacuuuguaagcugagaggaguugcuccccuccaucugggcaaaugcaacauugccggguggauccugggaaauccugagugugaaucucucagcaccgccuccucuuggagcuacauuguggagacauccucuagcgacaacggaaccugcuauccgggggauuuuaucaauuacgaagaacugcgggagcagcuuuccagcgucucuuccuucgaacgcuuugagaucuuccccaagacgagcucuuggccuaaccacgacuccaauaagggagugaccgccgcuuguccccaugccggcgcgaaaucuuuuuauaagaaccugauuuggcucguuaaaaagggcaauagcuacccuaaacuguccaagagcuauaucaacgauaaggggaaagaagugcuuguccuguggggcauucaccaccccuccacaucugccgaccaacagagccucuaccagaaugcugaugccuacguguucgugggcaccuccaaguauagcaaaaaguuuaaaccugagaucgcugucagaccgaagguucgggaccaggaggggcgcaugaacuacuauuggacacugguggaacccggagauaaaauuaccuucgaggccacgggcaaccugcucgugccuagauacgcguuugccauggaacggaaugcugggucuggaaucauuaucuccgacacacccguccaugauugcaacaccacaugucaaaccccugagggcgccaucaauaccagccugcccuuccagaacauucacccgaucacaauuggcaagugcccuaaguaugugaaaucuacgaaacuucgccuggcuaccgggcucagaaauguucccagcauccagucccggggacuguuuggcgccauugccggguucaucgaaggaggcuggacagggaugguggacggaugguacggcuaucaucaccagaacgagcaaggcucuggguacgcugcggaccuuaagagcacccagaaugccaucgauaagauuacaaacaaagucaauuccgugaucgagaagaugaacacccaguuuacggcuguuggaaaggaguucaaucaccuggagaaacgcauugaaaaccucaauaagaaaguggacgauggcuuccuggacaucuggacauacaacgccgagcugcucguccugcuugaaaaugagagaacccuggauuaucaugacagcaacgugaagaaccucuacgagaaaguccggucucagcugaagaauaacgccaaggaaauugggaauggauguuuugaguucuaucacaaaugcgauaacaccuguauggaauccgugaagaauggcacauacgacuauccuaaauacagcgaggaagcuaaacuuaaccgcgaggagaucgaugggguuaagcuggaaucuaccagaaucuaucaaauucucgccaucuacuccacaguggcgagcucccugguccugauugugucucucggcgcuaucagcuuuuggaugugcuccaauggaucucugcagugccggauuuguaucuga

SEQ ID NO: 201644 - RNA, 1701 nt, Artificial Sequence; identical to SEQ ID NO: 198887
  derived and/or modified CDS sequence (opt5) from hemagglutinin__InfluenzaA__AFN19806

SEQ ID NO: 201645 - RNA, 1701 nt, Artificial Sequence
  derived and/or modified CDS sequence (opt5) from hemagglutinin__InfluenzaA__AFN19808
augaaggccauccuggugguccuccuguacaccuucgcuacagccaacgcggacacgcuuugcauuggcuaucacgcuaauaacagcaccgauacaguugacaccgugcuggagaagaaugugacagucacccauuccgugaaccuccuggaagauaagcacaaugggaaacuuuguaagcugagaggaguugcuccccuccaucugggcaaaugcaacaucgccggguggauucugggaaauccugagugugaaucucucagcacagccaacuccuggucuuacaucguggagaccagcuccucugacaauggcacgugcuauccgggggauuuuauugacuacgaagaacugcgggagcagcuuagcuccgucagcucuuucgaacgcuuugagaucuuccccaagaccaacuccuggccuaaucacgauagcaacaagggagugacagccgcuuguccccaugccggcgcgaaaucuuuuuauaagaaucugaucuggcucguuaaaaagggcaacuccuacccuaaacugagcaagucuuauauuaaugacaaggggaaagaagugcuuguccuguggggaauccaccaccccuccaccagcgccgaucaacagucccucuaccagaacgcugacgccuacguguucgugggcacaucuagauauagcaagaaauuuaagccugagauugcuauccggccgaaaguccgcgaucaggaggggagaaugaacuacuauuggacccugguugaacccggagacaagauuacguucgaggccacaggcaaucugguggugccucgguacgcguuugccauggaacgcaacgcuggguccggaaucauuaucagcgauacccccgcccaugacugcaauacaaccugucaaaccccuaaaggcgcuaucaacacaucucuccccuuccagaauauucacccgaucacgauuggcaagugcccuaaguaugucaacuccaccaaacugagacuugccacagggcugcggaaugugcccagcauccagucucgcggacucuuuggcgccauugcuggguucaucgagggaggcuggaccgggaugguugacggaugguacggcuaucaucaccagaacgaacaaggcagcggguacgcggccgaucugaaguccacacagaaugcuaucgacaaaauuaccaacaaggucaauucugugaucgagaaaaugaacacgcaguuuacagccgugggaaaggaguucaaucaccuugaaaagagaauugagaaccugaauaaaaagguugaugacggcuuccucgauaucuggaccuacaacgccgaacugcuggugcuccuggagaacgaacggacccuugacuaucaugauagcaaugucaaaaaccuguacgagaaggugcgcucccagcucaaaaauaacgcuaaggagauugggaauggauguuuugaguucuaucacaagugcgacaacacauguauggagagcgucaaaaauggcaccuacgauuauccuaaguacucugaagaggccaaacugaacagagaagagaucgacggggugaaacuugaguccacacggaucuaucaaauucuggcgaucuacagcacgguugcuucuucccucgugcuggucgugagccugggcgccauuuccuuuuggaugugcucuaauggaagccuccagugccgcaucuguauuuga

SEQ ID NO: 201646 - RNA, 1701 nt, Artificial Sequence; identical to SEQ ID NO: 198896
  derived and/or modified CDS sequence (opt5) from hemagglutinin__InfluenzaA__AFN19814

SEQ ID NO: 201647 - RNA, 1701 nt, Artificial Sequence
  derived and/or modified CDS sequence (opt5) from hemagglutinin__InfluenzaA__AFN19816
augaaggccauccuggugguccuccuguacaccuucgcuacagccaacgcggacacgcuuugcauuggcuaucacgcuaauaacagcaccgauacaguugacaccgugcuggagaaaaaugugacagucacccauuccgugaaccuccuggaagauaagcacaaugggaaacuuuguaagcugagaggaguugcuccccuccaucugggcaaaugcaacaucgccggguggauucugggaaauccugagugugaaucucucagcacagccuccucuuggagcuacaucguggagaccuccucuagcgacaacggcacgugcuauccgggggauuuuauugacuacgaagaacugcgggagcagcuuuccagcgucucuuccuucgaacgcuuugagaucuuccccaagaccagcucuuggccuaaucacgauuccaacaagggagugacagccgcuuguccccaugccggcgcgaaaggcuuuuauaagaaucugaucuggcucguuaaaaaggggaacagcuacccuaaacugucuaaguccuauauuaaugacaagggaaaagaagugcuuguccuguggggcauccaccaccccagcaccacagccgaucaacagucccucuaccagaacgcugacaccuacguguucguggggacgucuagauauagcaagaaauuuaagccugagauugccauccggccgaaaguccgcgaucaggagggaagaaugaauuacuauuggacacugguugaacccggcgacaagauuaccuucgaggcuacagggaaccugguggugccucgguacgccuuugcgauggaacgcgaugccggauccggcaucauuaucagcgacacccccguccaugacugcaacaccacaugucaaacgccuaaaggcgcuaucaauaccucucuccccuuccagaacauucacccgaucacaauugggaagugcccuaaguaugugaaauccaccaagcugagacuugccacaggacugcggaauguucccagcauccagucucgcggccucuuuggggcuauugccggauucaucgagggcggguggaccggaaugguggauggcugguacggcuaucaucaccagaacgaacaagggagcggauacgccgcugaccugaaauccacgcagaaugcgaucgauaagauuacaaacaaagucaauucugugaucgagaagaugaacacccaguuuaccgccguuggcaaggaguucaaucaccuugagaaaagaauugagaaccugaauaagaaaguggacgauggguuccucgacaucuggacauacaacgcugaacugcugguccuccuggagaaugaacggacccuugauuaucaugacagcaacgugaagaaucuguacgagaaaguccgcaaccagcucaagaacaaugccaaggagauuggaaacggcuguuuugaguucuaucacaaaugcgauaauacauguauggaauccgugaagaacgggacguacgacuauccuaaauacagcgaagaggccaagcugaauagagaagagaucgauggcguuaaacuugagucuacccggaucuaucaaauucuggcuaucuacuccacaguggccagcucucucguccuggugguuucccugggagcgauuagcuuuuggaugugcuccaacggcucucuccagugccgcaucuguauuuga

SEQ ID NO: 201648 - RNA, 1701 nt, Artificial Sequence
  derived and/or modified CDS sequence (opt5) from hemagglutinin__InfluenzaA__AFN19821
augaaggccauccuggugguccuccuguacaccuucgcuacagccaacgcggacacgcuuugcauuggcuaucacgcuaauaacagcaccgauacaguugacaccgugcuggagaaaaaugugacagucacccauuccgugaaccuccuggaagauaagcacaaugggaaacuuuguaagcugagaggaguugcuccccuccaucugggcaaaugcaacaucgccggguggauucugggaaauccugagugugaaucucucagcacagccuccucuuggagcuacaucguggagaccuccucuagcgacaacggcacgugcuauccgggggauuuuauugacuacgaggaacugcgggagcagcuuuccagcgucucuuccuucgaacgcuuugagaucuuccccaagaccagcucuuggccuaaucacgauuccaacaagggagugacagccgcuuguccccaugccggcgcgaaaucuuuuuauaagaaucugaucuggcucguuaaaaagggcaacagcuacccuaaacuguccaagagcuauauuaaugacaaggggaaagaagugcuuguccuguggggaauccaccaccccuccaccacagccgaucaacagucucucuaccagaacgcugacaccuacguguucgugggcacgagcagauauuccaagaaacugaagccugagauugccauccggccgaaaguccgcgaucaggaggggagaaugaauuacuauuggacacugguugaacccggaggcaagauuaccuuugaggcuacagggaaccucguggugccucgguacgccuucgcgauggaacgcaacgccggaagcggcaucauuaucucugacacccccguccaugauugcaauaccacaugucaaacgccuaaaggcgcuaucaacaccucccugcccuuucagaauauucacccgaucacaauugggaagugcccuaaguaugugaaaagcaccaaacuuagacuggccacaggacuccggaacguucccucuauccagagccgcggccuguucggggcuauugccggauuuaucgagggcggguggaccggaaugguggacggcugguacggcuaucaucaccagaaugaacaaggguccggauacgccgcugaccuuaaaucuacgcagaacgcgaucgauaagauuacaaauaaagucaacagcgugaucgagaagaugaauacccaguucaccgccguuggcaaggaguuuaaccaccuggaaaagagaauugagaaucucaacaagaaaguggacgauggguuccuggacaucuggacauacaaugcugaacugcucguccugcuugagaacgaacggacccuggauuaucaugacuccaaugugaagaaccucuacgagaaaguccgcaaccagcugaagaauaacgccaaggagauuggaaauggcuguuucgaauuuuaucacaaaugcgauaacacauguauggagagcgugaagaaugggacguacgacuauccuaaauacucugaagaggccaaacuuaacagagaagagaucgauggcguuaagcuggaguccacccggaucuaucaaauucucgcuaucuacagcacaguggccucuucccugguccuggugguuagccucggagcgauuuccuucuggaugugcucuaauggcagccugcagugccgcaucuguauuuga

SEQ ID NO: 201649 - RNA, 1701 nt, Artificial Sequence; identical to SEQ ID NO: 198507
  derived and/or modified CDS sequence (opt5) from hemagglutinin__InfluenzaA__AFN19831

SEQ ID NO: 201650 - RNA, 1701 nt, Artificial Sequence
  derived and/or modified CDS sequence (opt5) from hemagglutinin__InfluenzaA__AFN19849
augaaggccauccuggugguccuccuguacaccuucgcuacagccaacgcggacacgcuuugcauuggcuaucacgcuaauaacagcaccgauacaguugacaccgugcuggagaaaaaugugacagucacccauuccgugaaccuccuggaagauaagcacaaugggaaacuuuguaagcugagaggaguugcuccccuccaucugggcaaaugcgacaucgccggguggauucugggaaacccugagugugaaucucucagcacagccuccucuuggagcuacaucguggagaccuccucuagcgauaauggcacgugcuauccgggggacuuuauuaacuacgaggaacugcgggagcagcuuuccagcgucucuuccuucgaacgcuuugagaucuuccccaagaccagcucuuggccuaaucacgauuccaacaagggagugacagccgcuuguccccaagccggcgcgaaaucuuuuuauaagaaucugaucuggcucguuaaaaagggcaacagcuacccuaaacuguccaagagcuauauuaaugacaaggggaaagaagugcuuguccuguggggaauccaucaccccuccaccucugccgaucagcagagccucuaccagaacgcugacgccuacguguucgugggcacauccaaguauagcaaaaaguuuaaaccugagauugcugucagaccgaagguucgggaucaagaggggcgcaugaauuacuauuggacccugguggaacccggagacaaaaucacguucgaggccacaggcaaccugcucgugccuagauacgcguuugccauggaacggaacgcugggucuggaauuaucauuuccgauacccccguccacgacugcaauacaaccugucagaccccuaagggcgccaucaacacaagccugcccuuccagaauauccauccgauuacgaucggcaagugcccuaaauaugugaagucuaccaaacuucgccuggcuacagggcucagaaacguucccagcauucagucccggggacuguuuggcgccaucgccggguucauugagggaggcuggaccgggaugguggacggaugguacggcuaucaccaucaaaaugcucagggcucuggguacgcggccgaucuuaagagcacacagaacgcuaucgacaaaaucaccaauaaggucaacuccgugauugaaaagaugaauacgcaguuuacagccguuggaaaagaguucaaccaccuggagaagcgcaucgaaaaucucaacaaaaagguggaugacggcuuccuggauauuuggaccuacaaugccgagcugcucguccugcuugaaaacgagagaacccuggacuaucacgauagcaaugugaaaaaccucuacgaaaagguccggucucaacugaagaacaaugcuaaagagaucggggacggauguuuugaguucuaucauaagugcgauaacacauguauggaauccgugaaaaauggcaccuacgacuauccuaaguacagcgaggaagccaaacuuaaccgcgaggaaauugaugggguuaagcuggagucuacaagaaucuaucagauccucgcgauuuacuccacgguggcuagcucccugguccuggugguuucucucggcgccaucagcuuuuggaugugcuccaauggaucucugcagugccggauuuguaucuga

SEQ ID NO: 201651 - RNA, 1701 nt, Artificial Sequence
  derived and/or modified CDS sequence (opt5) from hemagglutinin__InfluenzaA__AFN19865
augaaggccauccuggugguccuccuguacaccuucgcuacagccaacgcggacacgcuuugcauuggcuaucacgcuaauaacagcaccgauacaguugacaccgugcuggagaaaaaugugacagucacccauuccgugaaccuccuggaagauaagcacaaugggaaacuuuguaagcugagaggaguugcuccccuccaucugggcaaaugcaacaucgccggguggauucugggaaauccugagugugaaucucucagcacagccuccucuuggagcuacaucguggagaccuccucuagcgacaacggcacgugcuauccgggggauuuuauugacuacgaagaacugcgggagcagcuuuccagcgucucuuccuucgaacgcuuugagaucuuccccaagaccagcucuuggccuaaucacgauuccaacaagggagugacagccgcuuguccccaugccggcgcgaaaucuuuuuauaagaaucugaucuggcucguuaaaaagggcaacagcuacccuaaacuguccaagagcuauauuaaugacaaggggaaagaagugcuuguccuguggggaauccaccaccccuccaccacagccgaucaacagucucucuaccagaacgcugacgccuacguguucgugggcaccagcagauauuccaagaaauuuaagccugagauugcuauccggccgaaaguccgcgaucaggaggggagaaugaauuacuauuggacgcugguugaacccggagacaagauuacauucgaggccaccggcaaccugguggugccucgguacgcguuugccauggaacgcaacgcugggagcggaaucauuaucucugauacacucguccaugacugcaauaccaccugucaaacacccaaaggcgccaucaacacgucccugccuuuccagaauauucaccccaucaccauuggcaagugcccgaaguaugugaaaagcacaaaacuuagacuggcuaccgggcuccggaacguuccuucuauccagagccgcggacuguuuggcgccauugccggguucaucgagggaggcuggacagggaugguggacggaugguacggcuaucaucaccagaaugaacaaggcuccggguacgcugcggaucuuaaaucuacccagaacgccaucgacaagauuacgaauaaagucaacagcgugaucgagaagaugaauacacaguuuaccgcuguuggaaaggaguucaaccaccuggaaaagagaauugagaaucucaacaagaaaguggaugacggcuuccuggauaucuggaccuacaaugccgaacugcucguccugcuugagaacgaacggacacuggacuaucaugauuccaaugugaagaaccucuacgagaaaguccgcaaccagcugaagaauaacgccaaggagauugggaauggauguuuugaguucuaucacaaaugcgacaacaccuguauggagagcgugaagaauggcacauacgauuaucccaaauacucugaagaggcuaaacuuaacagagaagagaucgacgggguuaagcuggaguccacgcggaucuaucaaauucucgccaucuacagcaccguggcgucuucccugguccuggugguuagccucggcgcuauuuccuuuuggaugugcucuaauggaagccugcagugccgcaucuguauuuga

SEQ ID NO: 201652 - RNA, 1701 nt, Artificial Sequence
  derived and/or modified CDS sequence (opt5) from hemagglutinin__InfluenzaA__AFN19875
augaaggccauccuggugguccuccuguacaccuucgcuacagccaacgcggacacgcuuugcauuggcuaucacgcuaauaacagcaccgauacaguugacaccgugcuggagaaaaaugugacagucacccauuccgugaaccuccuggaagauaagcacaaugggaaacuuuguaagcugagaggaguugcuccccuccaucugggcaaaugcaacaucgccggguggauucugggaaauccugagugugaaucucucagcacagccuccucuuggagcuacaucguggagaccuccucuagcgacaacggcacgugcuauccgggggauuuuauuaauuacgaagaacugcgggagcagcuuuccagcgucucuuccuucgaacgcuuugagaucuuccccaagaccagcucuuggccuaaccacgacuccaauaagggagugacagccgcuuguccccaugccggcgaaaagagcuuuuauaaaaaccugaucuggcucguuaaaaagggcaauucuuacccuaaacuguccaagagcuauauuaacgauaaggggaaagaggugcuuguccuguggggaauccaccaccccuccaccucugcggaccaacagagccucuaccagaaugccgaugcuuacguguucgugggcacauccaaguauagcaaaaaguuuaaaccugagauugccgucagaccgaagguucgggaccaggaagggcgcaugaacuacuauuggacccugguggagcccggagauaaaaucacguucgaagcuacaggcaaccugcucgugccuagauacgccuuugcgauggagcggaaugccgggucuggaauuaucauuuccgacacccccguccaugauugcaacacaaccugucaaaccccuaagggcgcuaucaauacaagccugcccuuccagaacauccacccgauuacgaucggcaagugcccuaaauaugugaagucuaccaaacuucgccuggccacagggcucagaaauguucccagcauucagucccggggacuguuuggcgcuaucgccggguucauugaaggaggcuggaccgggaugguggacggaugguacggcuaucaucaccagaacgagcaaggcucuggguacgccgcugaccuuaagagcacacagaaugcgaucgauaaaaucaccaacaaggucaauuccgugauugagaagaugaacacgcaguuuacagccguuggaaaagaguucaaucaccuggagaagcgcaucgaaaaccucaauaaaaagguggacgauggcuuccuggacauuuggaccuacaacgcugagcugcucguccugcuugaaaaugagagaacccuggauuaucaugacagcaacgugaaaaaccucuacgagaagguccggucucagcugaagaauaacgccaaagaaaucgggaauggauguuuugaguucuaucacaagugcgauaacacauguauggaauccgugaaaaauggcaccuacgacuauccuaaguacagcgaggaagccaaacuuaaccgcgaggagauugaugggguuaagcuggaaucuacaagaaucuaucaaauccucgcuauuuacuccacgguggccagcucccugguccuggugguuucucucggcgcgaucagcuuuuggaugugcuccaauggaucucugcagugccggauuuguaucuga

SEQ ID NO: 201653 - RNA, 1701 nt, Artificial Sequence
  derived and/or modified CDS sequence (opt5) from hemagglutinin__InfluenzaA__AFN19895
augaaggccauccuggugguccuccuguacaccuucgcuacagccaacgcggacacgcuuugcauuggcuaucacgcuaauaacagcaccgauacaguugacaccgugcuggagaaaaaugugacagucacccauuccgugaaccuccuggaagauaagcacaaugggaaacuuuguaagcugagaggaguugcuccccuccaucugggcaaaugcaacaucgccggguggauucugggaaauccugagugugaaucucucagcacagccuccucuuggagcuacaucguggagaccuccucuagcgacaacggcacgugcuauccgggggauuuuauugacuacgaagaacugcgggagcagcuuuccagcgucucuuccuucgaacgcuuugagaucuuccccaagaccagcucuuggccuaaucacgauuccaacaagggagugacagccgcuuguccccaugccggcgcgaaaucuuuuuauaagaaucugaucuggcucguuaaaaagggcaacagcuacccuaaaauuuccaagagcuauaucaaugacaaggggaaagaagugcugguccuuuggggcauucaccaccccuccaccacagccgaucaacagucucuguaccagaacgcugacaccuacguguucgugggaacgagcagauauuccaagaaauuuaagccugagaucgccauucggccgaaaguccgcgaucaggaggggagaaugaauuacuauuggacacucguugaacccggagacaagaucaccuucgaggcuacaggcaaccugguggugccucgguacgccuuugcgauggaacgcaacgccgggagcggaauuaucaucucugauacccccguccaugacugcaauaccacaugucaaacgccuaaaggcgcuauuaacaccucccugcccuuccagaauauccacccgauuacaaucggcagaugcccuaaguauguuaagagcaccaaacuccggcuggccacagggcuucgcaacgugcccucuauucagagcagaggacuguuuggcgcuaucgccggguucaucgagggaggcuggaccgggaugguggacggaugguacggcuaucaucaccagaaugaacaaggcuccggguacgccgcugaucucaagucuacgcagaacgcgauugacaaaaucacaaauaaggucaacagcgugauugagaaaaugaauacccaguuuaccgccguuggaaaggaguucaaccaccuggaaaagcggaucgagaaucuuaacaaaaagguggaugacggcuuccuggauauuuggacauacaaugcugaacuccugguccugcucgagaacgaacgcacccuggacuaucaugauuccaaugugaaaaaccuuuacgagaaggucagaaaccagcugaaaaauaacgccaaggagacagggaauggauguuuugaguucuaucacaagugcgacaacacguguauggagagcgugaaaaauggcaccuacgauuauccuaaguacucugaagaggccaaacucaaccgggaaguuaucgacggggugaagcuggaguccacacgcaucuaucaaauucuugcuaucuacagcaccgucgccucuucccuggugcucguugugagccugggcgcgauuuccuuuuggaugugcucuaauggaagccugcagugcagaaucuguauuuga

SEQ ID NO: 201654 - RNA, 1701 nt, Artificial Sequence
  derived and/or modified CDS sequence (opt5) from hemagglutinin__InfluenzaA__AFN19905
augaaggccauccuggugguccuccuguacaccuucgcuacagccaacgcggacacgcuuugcauuggcuaucacgcuaauaacagcaccgauacaguugacaccgugcuggagaaaaaugugacagucacccauuccgugaaccuccuggaagauaagcacaaugggaaacuuuguaagcugagaggaguugcuccccuccaucugggcaaaugcaacaucgccggguggauucugggaaauccugagugugaaucucucagcacagccuccucuuggagcuacaucguggagaccuccucuagcgacaacggcacgugcuauccgggggauuuuauugacuacgaagaacugcgggagcagcuuuccagcgucucuuccuucgaacgcuuugagaucuuccccaagaccagcucuuggccuaaucacgauuccaacaagggagugacagccgcuuguccccaugccggcgcgaaaggcuuuuauaagaaucugaucuggcucguuaaaaaggggaacagcuacccuaaacugucuaaguccuauauuaaugacaagggaaaagaagugcuuguccuguggggcauccaccaccccagcaccacagccgaucaacagucccucuaccagaacgcugacaccuacguguucguggggacgucuagauauagcaagaaauuuaagccugagauugccauccggccgaaaguccgcgaucaggagggaagaaugaauuacuauuggacacugguugaacccggcgacaagauuaccuucgaggcuacagggaaccugguggugccucgguacgccuuugcgauggaacgcaacgccggauccggcaucauuaucagcgauacccccguccaugacugcaauaccacaugucaaacgccuaaaggcgcuaucaacaccucucuccccuuccagaauauucacccgaucacaauugggaagugcccuaaguaugugaaauccaccaagcugagacuugccacaggacugcggaacguucccagcauccagucucgcggccucuuuggggcuauugccggauucaucgagggcggguggaccggaaugguggacggcugguacggcuaucaucaccagaaugaacaagggagcggauacgccgcugaucugaaauccacgcagaacgcggucgacaagaucacaaauaaagugaacucuguuauugagaagaugaauacccaguuuaccgccgugggcaaggaguucaaccaccuugaaaagagaaucgagaaucugaacaagaaagucgaugacggguuccucgauauuuggacauacaaugcugaacugcuggugcuccuggagaacgaacggacccuugacuaucaugauagcaaugucaagaaccuguacgagaaagugcgcaaccagcucaagaauaacgccaaggagaucggaaauggcuguuuugaguucuaucacaaaugcgacaacacauguauggaguccguuaagaaugggacguacgauuauccuaaauacagcgaagaggccaagcugaacagagagaaaauugacggcgugaaacuugaaucuacccggaucuaucaaauccuggcuauuuacuccacagucgccagcucucucgugcugaucguuucccugggagcgauuagcuuuuggaugugcuccaauggcucucuccagugccgcaucuguauuuga

SEQ ID NO: 201655 - RNA, 1701 nt, Artificial Sequence
  derived and/or modified CDS sequence (opt5) from hemagglutinin__InfluenzaA__AFN19915
augaaggccauccuggugguccuccuguacaccuucgcuacagccaacgcggacacgcuuugcauuggcuaucacgcuaauaacagcaccgauacaguugacaccgugcuggagaaaaaugugacagucacccauuccgugaaccuccuggaagauaagcacaaugggaaacuuuguaagcugagaggaguugcuccccuccaucugggcaaaugcaacaucgccggguggauucugggaaauccugagugugaaucucucagcacagccuccucuuggagcuacaucguggagaccuccucuagcgacaacggcacgugcuauccgggggauuuuauuaauuacgaagaacugcgggagcagcuuuccagcgucucuuccuucgaacgcuuugagaucuuccccaagaccagcucuuggccuaaccacgacuccaauaagggagugacagccgcuuguccccaagccggcgcgaaaucuuuuuauaagaaccugaucuggcucguuaaaaagggcaauagcuacccuaaacuguccagcuccuauauuaacgauaaggggaaggaagugcuuguccuguggggaauccaucaccccucuaccagcgccgaccagcagucccucuaccagaaugcugaugccuacguguucgugggcacaagcgaguauucuaaaaaguuuaaaccugagauugcugucagaccgaagguucgggaccaagaagggcgcaugaacuacuauuggacccugguggagcccggagauaaaaucacguucgaagccacaggcaaccugcucgugccuagauacgcguuugccauggagcggaaugcuggguccggaauuaucauuagcgacacccccguccacgauugcaacacaaccugucagaccccuaagggcgccaucaauacaucucugcccuuccagaacauccauccgauuacgaucggcaaaugcccuaaguauguuaagagcaccaaacuucgccuggcuacagggcucagaaaugugcccuccauucagucucggggacuguuuggcgccaucgccggguucauugaaggaggcuggaccgggaugguggacggaugguacggcuaucaccaucaaaacgcucagggcagcggguacgcggccgaccuuaaguccacacagaaugcuaucgauaaaaucaccaacaaggucaauagcgugauugagaaaaugaacacgcaguuuacagccguuggaaaggaguucaaucaccuggaaaagcgcaucgagaaccucaauaaaaagguggacgauggcuuccuggacauuuggaccuacaacgccgaacugcucguccugcuugagaaugaaagaacccuggauuaucacgacucuaacgugaaaaaccucuacgagaagguccggucccaacugaaaaauaacgcuaaggagaucgggaauggauguuuugaguucuaucauaagugcgauaacacauguauggagagcgugaaaaauggcaccuacgacuauccuaaguacucugaagaggccaaacuuaaccgcgaagagauugaugggguuaagcuggaguccacaagaaucuaucagauccucgcgauuuacagcacgguggcuuccucucugguccuggugguuagccucggcgccaucuccuuuuggaugugcucuaauggaagccugcagugccggauuuguaucuga

SEQ ID NO: 201656 - RNA, 1701 nt, Artificial Sequence
  derived and/or modified CDS sequence (opt5) from hemagglutinin__InfluenzaA__AFN19922
augaaggccauccugguggucguucucuacaccuucgcuacagccaacgcggacacgcugugcauuggcuaucacgcuaauaacagcaccgauacaguggacaccgugcuugagaaaaaugucacagugacccauuccguuaaccugcucgaagauaagcacaaugggaaacuguguaaacuuagaggaguggcuccccugcaucucggcaagugcaacaucgccggguggauucugggaaauccugagugugaaucucugagcacagccuccucuuggagcuacaucgucgagaccuccucuagcgacaacggcacgugcuauccgggggauuuuauugacuacgaagaacuccgggagcagcuguccagcgugucuuccuucgaacgcuuugagaucuuccccaagaccagcucuuggccuaaucacgauuccaacaagggaguuacagccgcuuguccccaugccggcgcgaaaggcuuuuauaagaaucuuaucuggcuggugaaaaaggggaacagcuacccuaaacucucuagauccuauauuaaugacaagggaaaggaaguccuggugcuuuggggcauccaccaccccagcaccacagccgaucaacagucccuguaccagaacgcugacaccuacguguucgucgggacgucucgguauagcaaaaaguuuaaaccugagauugccauccgcccgaagguuagagaucaggagggacggaugaauuacuauuggacacucguggaacccggcgacaaaauuaccuucgaggcuacagggaaccugguggucccucgcuacgccuuugcgauggaaagaaacgccggauccggcaucauuaucagcgauacccccgcucaagacugcaauaccacaugucagacgccuaagggcgccaucaacaccucucugcccuuccagaauauucauccgaucacaauugggaaaugcccuaaguaugugaaguccaccaaacuccggcuggcuacaggacuucgcaacguucccagcauccagucuagaggccuguuuggggccauugccggauucaucgagggcggguggaccggaaugguggacggcugguacggcuaucaccaucaaaaugaacaggggagcggauacgcugcggaucucaaguccacgcagaacgccaucgacaaaauuacaaauaaggucaacucugugaucgagaaaaugaauacccaguuuaccgcuguuggcaaggaguucaaccaccuggaaaagcggauugagaaucuuaacaaaaagguggaugacggguuccuggauaucuggacauacaaugccgaacuccugguccugcucgagaacgaacgcacccuggacuaucacgauagcaaugugaaaaaccuuuacgagaaggucagaaaccaacugaaaaauaacgccaaggagauuggaaauggcuguuuugaguucuaucauaagugcgacaacacauguauggaguccgugaaaaaugggacguacgauuauccuaaguacagcgaagaggcuaaacucaaccgggaagagaucgacggcguuaagcuggagucuacccgcaucuaucagauucuugccaucuacuccacaguggcgagcucucugguccucgugguuucccugggagcuauuagcuuuuggaugugcuccaauggcucucugcagugcagaaucuguauuuga

SEQ ID NO: 201657 - RNA, 1701 nt, Artificial Sequence; identical to SEQ ID NO: 198526
  derived and/or modified CDS sequence (opt5) from hemagglutinin__InfluenzaA__AFN19931

SEQ ID NO: 201658 - RNA, 1701 nt, Artificial Sequence
  derived and/or modified CDS sequence (opt5) from hemagglutinin__InfluenzaA__AFN19941
augaaggccauccuggugguccuccuguacaccuucgcuacagccaacgcggacacgcuuugcauuggcuaucacgcuaauaacagcaccgauacaguugacaccgugcuggagaaaaaugugacagucacccauuccgugaaccuccuggaagauaagcacaaugggaaacuuuguaagcugagaggaguugcuccccuccaucugggcaaaugcaacaucgccggguggauucugggaaauccugagugugaaucucucagcacagccuccucuuggagcuacaucguggagaccuccauuucugacaacggcacgugcuauccgggggauuuuaucaauuacgaggaacugcgggagcagcuuagcuccgucagcucuuucgaacgcuuugagaucuuccccaagaccuccagcuggccuaaccacgacucuaauaagggagugacagccgcuuguccccaagccggcgcgaaauccuuuuauaagaaccugauuuggcucguuaaaaagggcaauagcuacccuaaacugucuaaguccuauaucaacgauaaggggaaagaagugcuuguccuguggggcauucaucaccccagcaccuccgccgaccagcagucucucuaccagaaugcugaugccuacguguucgugggaacaagcaaguauuccaaaaaguuuaaaccugagaucgcugucagaccgaagguucgggaccaagaggggcgcaugaacuacuauuggacccugguggaacccggagauaaaauuacguucgaggccacaggcaaccugcucgugccuagauacgcguuugccauggaacggaaugcugggagcggaaucauuaucucugacacccccguccacgauugcaacacaaccugucagaccccuaagggcgccaucaauacaucccugcccuuccagaacauucauccgaucacgauuggcaagugcccuaaauauguuaagagcaccaaacuucgccuggcuacagggcucagaaaugugcccucuauccagagccggggacuguuuggcgccauugccggguucaucgagggaggcuggaccgggaugguggacggaugguacggcuaucaccaucaaaacgcucagggcuccggguacgcggccgaccuuaagucuacacagaaugcuaucgauaaaauuaccaacaaggucaauagcgugaucgaaaagaugaacacgcaguuuacagccguuggaaaagaguucaaucaccuggagaagcgcauugaaaaccucaauaaaaagguggacgauggcuuccuggacaucuggaccuacaacgccgagcugcucguccugcuugaaaaugagagaacccuggauuaucacgacuccaacgugaaaaaccucuacgaaaagguccggagccaacugaagaauaacgcuaaagagauugggaauggauguuuugaguucuaucauaagugcgauaacacauguauggaaucugugaaaaauggcaccuacgacuauccuaaguacuccgaggaagccaaacuuaaccgcgaggaaaucgaugggguuaagcuggagagcacaagaaucuaucagauucucgcgaucuacucuacgguggcuuccagccugguccuggugguuucccucggcgccauuucuuuuuggaugugcagcaauggaucccugcagugccggaucuguauuuga

SEQ ID NO: 201659 - RNA, 1701 nt, Artificial Sequence
  derived and/or modified CDS sequence (opt5) from hemagglutinin__InfluenzaA__AFN19951
augaaggccauccuggugguccuccuguacaccuucgcuacagccaacgcggacacgcuuugcauuggcuaucacgcuaauaacagcaccgauacaguugacaccgugcuggagaaaaaugugacagucacccauuccgugaaccuccuggaagauaagcacaaugggaaacuuuguaagcugagaggaguugcuccccuccaucugggcaaaugcaacaucgccggguggauucugggaaauccugagugugaaucucucagcacagccuccucuuggagcuacaucguggagaccuccucuagcgacaacggcacgugcuauccgggggauuuuauugacuacgaagaacugcgggagcagcuuuccagcgucucuuccuucgaacgcuuugagaucuuccccaagaccagcucuuggccuaaucacgauuccaacaagggagugacagccgcuuguccccaugccggcgcgaaaucuuuuuauaagaaucugaucuggcucguuaaaaagggcaacagcuacccuaaacuguccaagagcuauauuaaugacaaggggaaagaagugcuuguccuguggggaauccaccaccccuccaccacagccgaucaacagucucucuaccagaacgcugacaccuacguguucgugggcacgagcagauauuccaagaaauuuaagccugagauugccauccggccgaaaguccgcgaucaggaggggagaaugaauuacuauuggacacugguugaacccggagacaagauuaccuucgaggcuacaggcaaccugguggugccucgguacgccuuugcgauggaacgcaacgccgggagcggaaucauuaucucugauacccccguccaugacugcaauaccacaugucaaacgccuaaaggcgcuaucaacaccucccuccccuuccagaauauucacccgaucacaauuggcaagugcccuaaguaugugaaaagcaccaagcugagacuugccacagggcugcggaacguucccucuauccagagccgcggacucuuuggcgcuauugccggguucaucgagggaggcuggaccgggaugguggacggaugguacggcuaucaucaccagaaugaacaaggcuccggguacgccgcugaucugaaaucuacgcagaacgcgaucgacaagauuacaaauaaagucaacagcgugaucgagaagaugaauacccaguuuaccgccguuggaaaggaguucaaccaccuugagaaaagaauugagaaucugaacaagaaaguggaugacggcuuccucgauaucuggacauacaaugcugaacugcugguccuccuggagaacgaacggacccuugacuaucaugauuccaaugugaagaaccuguacgagaaaguccgcaaccagcucaagaauaacgccaaggagacagggaauggauguuuugaguucuaucacaaaugcgacaacacguguauggaaagcgugaagaauggcaccuacgauuauccuaaauacucugaagaggccaagcugaacagagaagagauugacgggguuaaacuugaguccacacggaucuaucaaauccuggcuauuuacagcaccgccgcgucuucccucgugcuggucgugagccugggcgcuaucuccuuuuggaugugcucuaauggaagccuccagugccgcauuuguaucuga

SEQ ID NO: 201660 - RNA, 1701 nt, Artificial Sequence; identical to SEQ ID NO: 198887
  derived and/or modified CDS sequence (opt5) from hemagglutinin__InfluenzaA__AFN19966

SEQ ID NO: 201661 - RNA, 1701 nt, Artificial Sequence
  derived and/or modified CDS sequence (opt5) from hemagglutinin__InfluenzaA__AFN19972
augaaggccauccuggugguccuccuguacaccuucgcuacagccaacgcggacacgcuuugcauuggcuaucacgcuaauaacagcaccgauacaguugacaccgugcuggagaaaaaugugacagucacccauuccgugaaccuccuggaagauaagcacaaugggaaacuuuguaagcugagaggaguugcuccccuccaucugggcaaaugcaacaucgccggguggauucugggaaauccugagugugaaucucucagcacagccuccucuuggagcuacaucguggagaccuccucuagcgacaacggcacgugcuauccgggggauuuuauugacaaugaagaacugcgggagcagcuuuccagcgucucuuccuucgaacgcuuugagaucuuccccaagaccagcucuuggccuaaccacgauuccaauaagggagugacagccgcuuguccccaugccggcgcgaaaucuuuuuacaagaaccugaucuggcucguuaaaaagggcaauagcuauccuaaacuguccaagagcuacauuaacgacaaggggaaagaagugcuuguccuguggggaauccaccaccccuccaccacagccgaucaacagucucucuaucagaaugcugacaccuacguguucgugggcacgagcagauacuccaagaaauuuaagccugagauugccauccggccgaaaguccgcgaucaggaggggagaaugaacuauuacuggacacugguugaacccggagacaagauuaccuucgaggcuacaggcaaccugguggugccucgguaugccuuugcgauggaacgcaaugccgggagcggaaucauuaucucugauacccccguccaugacugcaacaccacaugucaaacgccuaaaggcgcuaucaauaccucccuccccuuccagaacauucacccgaucacaauuggcaagugcccuaaguacgugaaaagcaccaagcugagacuugccacagggcugcggaauguucccucuauccagagccgcggacucuuuggcgcuauugccggguucaucgagggaggcuggaccgggaugguggacggaugguauggcuaccaucaccagaacgaacaaggcuccggguaugccgcugaucugaaaucuacgcagaaugcgaucgacaagauuacaaacaaagucaauagcgugaucgagaagaugaacacccaguuuaccgccguuggaaaggaguucaaucaccuugagaaaagaauugagaaccugaauaagaaaguggaugacggcuuccucgauaucuggacauacaacgcugaacugcugguccuccuggagaaugaacggacccuugacuaccaugauuccaacgugaagaaccuguaugagaaaguccgcaaucagcucaagaacaaugccaaggagauugggaacggauguuuugaguucuaccacaaaugcgacaauacauguauggaaagcgugaagaacggcacguaugauuacccuaaauauucugaagaggccaagcugaauagagaagagaucgacgggguuaaacuugaguccacccggguguaccaaauccuggcuauuuauagcacagucgccucuucccucgugcugguugugagccugggcgcgaucuccuuuuggaugugcucuaacggaagccuccagugccgcauuuguaucuga

SEQ ID NO: 201662 - RNA, 1701 nt, Artificial Sequence
  derived and/or modified CDS sequence (opt5) from hemagglutinin__InfluenzaA__AFN19978
augaaggccauccugguggucaugcucuacaccuucgcuacagccaacgcggacacgcugugcauuggcuaucacgcuaauaacagcaccgauacaguugacaccgugcuugagaaaaaugugacagucacccauuccgugaaccugcucgaagauaagcacaaugggaaacuguguaaacuuagaggaguugcuccccugcaucucggcaaaugcaacaucgccggguggauucugggaaauccugagugugaaucucugagcacagccuccucuuggagcuacaucguggagaccuccucuagcgacaacggcacgugcuauccgggggauuuuauugacuacgaagaacuccgggagcagcuguccagcgucucuuccuucgaacgcuuugagaucuuccccaagaccagcucuuggccuaaucacgauuccaacaagggagugacagccgcuuguccccaugccggcgcgaaaggcuuuuauaagaaucuuaucuggcugguuaaaaaggggaacagcuacccuaaacucucuaaguccuauauuaaugacaagggaaaagaagugcugguccuuuggggcauccaccaccccagcaccacagccgaucaacagucccuguaccagaacgcugacaccuacguguucguggggacgucuagauauagcaagaaauuuaagccugagauugccauccggccgaaaguccgcgaucaggagggaagaaugaauuacuauuggacacucguugaacccggcgacaagauuaccuucgaggcuacagggaaccugguggugccucgguacgccuuugcgauggaacgcaacgccggauccggcaucauuaucagcgauacccccguccaugacugcaauaccacaugucaaacgccuaaaggcgcuaucaacaccucucugcccuuccagaauauucacccgaucacaauugggaagugcccuaaguaugugaaauccaccaagcucagacuggccacaggacuucggaacguucccagcauccagucucgcggccuguuuggggcuauugccggauucaucgagggcggguggaccggaaugguggacggcugguacggcuaucaucaccagaaugaacaagggagcggauacgccgcugaucucaaauccacgcagaacgcgaucgacaagauuacaaauaaagucaacucugugaucgagaagaugaauacccaguuuaccgccguuggcaaggaguucaaccaccuggaaaagagaauugagaaucuuaacaagaaaguggaugacggguuccuggauaucuggacauacaaugcugaacuccugguccugcucgagaacgaacggacccuggacuaucaugauagcaaugugaagaaccuuuacgagaaaguccgcaaccagcugaagaauaacgccaaggagauuggaaauggcuguuuugaguucuaucacaaaugcgacaacacauguauggaguccgugaagaaugggacguacgauuauccuaaauacagcgaagaggccaagcucaacagagagaaaaucgacggcguuaagcuggaaucuacccggaucuaucaaauucuugcuaucuacuccacaguggccagcucucugguccucgugguuucccugggagcgauuagcuuuuggaugugcuccaauggcucucugcagugccgcaucuguauuuga

SEQ ID NO: 201663 - RNA, 1701 nt, Artificial Sequence; identical to SEQ ID NO: 198887
  derived and/or modified CDS sequence (opt5) from hemagglutinin__InfluenzaA__AFN19983

SEQ ID NO: 201664 - RNA, 1701 nt, Artificial Sequence
  derived and/or modified CDS sequence (opt5) from hemagglutinin__InfluenzaA__AFN19993
augaaggccauccuggugguccuccuguacaccguugcuacaacgaacgccgacacccuuugcauuggcuaucacgcgaauaacagcacagauaccguggacacagugcuggagaaaaaugucaccgugacacauuccguuaaccuccuggaagauaagcacaaugggaaacuuuguaagcugagaggaguggcuccccuccaucugggcaaaugcaacaucgccggguggauucugggaaauccugagugugaaucucucagcaccgccuccucuuggagcuacaucgucgagacguccucuagcgacaacgggaccugcuauccgggcgauuucauugacuacgaagaacugcgggagcagcuuuccagcgugucuuccuuugaacgcuucgagaucuuucccaagacaagcucuuggccuaaucacgauuccaacaagggaguuaccgcugccuguccccaugcuggcgccaaaggcuucuauaagaaucugaucuggcucgugaaaaaggggaacagcuacccuaaacugucuaaguccuauauuaaugacaagggaaaagaaguccuugugcuguggggcauccaccaccccagcacaaccgcggaucaacagucccucuaccagaacgccgacacguacguguuugucgggacaucuagauauagcaagaaauucaagccugagauugcuauccggccgaaaguucgcgaucaggagggaagaaugaauuacuauuggacccugguggaacccggcgacaagauuacauuugaggccaccgggaaccugguggucccucgguacgcuuucgccauggaacgcaacgcgggauccggcaucauuaucagcgauacccccgugcaugacugcaauacaacgugucaaaccccuaaaggcgccaucaacacaucucuccccuuucagaauauucacccgaucaccauugggaagugcccuaaguauguuaaauccacaaagcugagacuugcuaccggacugcggaacgugcccagcauccagucucgcggccucuucggggccauugcuggauuuaucgagggcggguggacgggaauggucgacggcugguacggcuaucaucaccagaaugaacaagggagcggauacgccgccgaucugaaauccacacagaacgcuaucgacaagauuaccaauaaagugaacucuguuaucgagaagaugaauacccaguucacagcggugggcaaggaguuuaaccaccuugagaaaagaauugagaaucugaacaagaaagucgaugacggguuccucgauaucuggaccuacaaugccgaacugcuggugcuccuggagaacgaacggacacuugacuaucaugauagcaaugucaagaaccuguacgagaaagugcgcaaccagcucaagaauaacgcuaaggagauuggaaauggcuguuucgaauuuuaucacaaaugcgacaacacguguauggaguccguuaagaaugggaccuacgauuauccuaaauacagcgaagaggccaagcugaacagagaagagaucgacggcgugaaacuugagucuacacggaucuaucaaauucuggccaucuacuccaccgucgcuagcucucucgugcugguugugucccugggagccauuagcuucuggaugugcuccaauggcucucuccagugccgcaucuguauuuga

SEQ ID NO: 201665 - RNA, 1701 nt, Artificial Sequence; identical to SEQ ID NO: 198887
  derived and/or modified CDS sequence (opt5) from hemagglutinin__InfluenzaA__AFN20000

SEQ ID NO: 201666 - RNA, 1701 nt, Artificial Sequence; identical to SEQ ID NO: 198894
  derived and/or modified CDS sequence (opt5) from hemagglutinin__InfluenzaA__AFN20006

SEQ ID NO: 201667 - RNA, 1701 nt, Artificial Sequence; identical to SEQ ID NO: 198526
  derived and/or modified CDS sequence (opt5) from hemagglutinin__InfluenzaA__AFN20012

SEQ ID NO: 201668 - RNA, 1701 nt, Artificial Sequence
  derived and/or modified CDS sequence (opt5) from hemagglutinin__InfluenzaA__AFN20018
augaaggccauccuggugguccuccuguacaccuucgcuacagccaacgcggacacgcuuugcauuggcuaucacgcuaauaacagcaccgauacaguugacaccgugcuggagaaaaaugugacagucacccauuccgugaaccuccuggaagauaagcacaaugggaaacuuuguaagcugagaggaguugcuccccuccaucugggcaaaugcaacaucgccggguggauucugggaaauccugagugugaaucucucagcacagccuccucuuggagcuacaucguggagaccuccucuagcgacaacggcacgugcuauccgggggauuuuauuaauuacgaggaacugcgggagcagcuuuccagcgucucuuccuucgaacgcuuugagaucuuccccaagaccagcucuuggccuaaccacgacuccaauaagggagugacagccgcuuguccccaagccggcgcgaaaucuuuuuauaagaaccugaucuggcucguuaaaaagggcaauagcuacccuaaacuguccaacagcuauauuaaugauaaggggaaggaagugcuuguccuguggggaauccaucaccccuccaccucugccgaccagcagagccucuaccagaacgcugaugccuacguguucgugggcacauccaaauauagcaagaaauuuaagccugagauugcugucagaccgaaaguucgggaccaagaggggcgcaugaacuacuauuggacccugguggaacccggagauaagaucacguucgaggccacaggcaaucugcucgugccuagauacgcguuugccauggaacggaacgcugggucuggaauuaucauuuccgacacccccguccacgauugcaauacaaccugucagaccccuaaaggcgccaucaacacaagccugcccuuccagaauauccauccgauuacgaucggcaagugcccuaaguaugugaaaucuaccaaacuucgccuggcuacagggcucagaaacguucccagcauucagucccggggacuguuuggcgccaucgccggguucauugagggaggcuggaccgggaugguggacggaugguacggcuaucaccaucaaaaugcucagggcucuggguacgcggccgaccuuaagagcacacagaacgcuaucgauaagaucaccaauaaagucaacuccgugauugaaaagaugaauacgcaguuuacagccguuggaaaggaguucaaccaccuggagaaacgcaucgaaaaucucaacaagaaaguggacgauggcuuccuggacauuuggaccuacaaugccgagcugcucguccugcuugaaaacgagagaacccuggauuaucacgacagcaacgugaagaaucucuacgaaaaaguccggucucaacugaagaacaaugcuaaggagaucgggaacggauguuuugaguucuaucauaaaugcgauaauacauguauggaauccgugaagaacggcaccuacgacuauccuaaauacagcgaggaagccaaacuuaaucgcgaggaaauugaugggguuaagcuggagucuacaagaaucuaucagauccucgcgauuuacuccacgguggcuagcucccugguccuggugguuucucucggcgccaucagcuuuuggaugugcuccaacggaucucugcagugccggauuuguaucuga

SEQ ID NO: 201669 - RNA, 1701 nt, Artificial Sequence; identical to SEQ ID NO: 198896
  derived and/or modified CDS sequence (opt5) from hemagglutinin__InfluenzaA__AFN20019

SEQ ID NO: 201670 - RNA, 1701 nt, Artificial Sequence; identical to SEQ ID NO: 198526
  derived and/or modified CDS sequence (opt5) from hemagglutinin__InfluenzaA__AFN20021

SEQ ID NO: 201671 - RNA, 1701 nt, Artificial Sequence; identical to SEQ ID NO: 198896
  derived and/or modified CDS sequence (opt5) from hemagglutinin__InfluenzaA__AFN20034

SEQ ID NO: 201672 - RNA, 1701 nt, Artificial Sequence; identical to SEQ ID NO: 198887
  derived and/or modified CDS sequence (opt5) from hemagglutinin__InfluenzaA__AFN20040

SEQ ID NO: 201673 - RNA, 1701 nt, Artificial Sequence; identical to SEQ ID NO: 201659
  derived and/or modified CDS sequence (opt5) from hemagglutinin__InfluenzaA__AFN20046

SEQ ID NO: 201674 - RNA, 1701 nt, Artificial Sequence; identical to SEQ ID NO: 198896
  derived and/or modified CDS sequence (opt5) from hemagglutinin__InfluenzaA__AFN20052

SEQ ID NO: 201675 - RNA, 1701 nt, Artificial Sequence; identical to SEQ ID NO: 198896
  derived and/or modified CDS sequence (opt5) from hemagglutinin__InfluenzaA__AFN20061

SEQ ID NO: 201676 - RNA, 1701 nt, Artificial Sequence
  derived and/or modified CDS sequence (opt5) from hemagglutinin__InfluenzaA__AFN20076
augaaggccauccuggugguccuccuguacaccuucgcuacagccaacgcggacacgcuuugcauuggcuaucacgcuaauaacagcaccgauacaguugacaccgugcuggagaaaaaugugacagucacccauuccgugaaccuccuggaagauaagcacaaugggaaacuuuguaagcugagaggaguugcuccccuccaucugggcaaaugcaacaucgccggguggauucugggaaauccugacugugagucucucagcacagccuccucuuggagcuacaucguggaaaccuccucuagcgauaacggcacgugcuauccgggggacuuuauugauuacgaggaacugcgggagcagcuuuccagcgucucuuccuucgagcgcuuugaaaucuuccccaagaccagcucuuggccuaaucacgacuccaacaagggagugacagccgcuuguccccaugccggcgcgaaaucuuuuuauaagaaucugaucuggcucguuaaaaagggcaacagcuacccuaaacuguccaagagcuauauuaaugauaaggggaaagaggugcuuguccuguggggaauccaccaccccuccaccacagccgaccaacagucucucuaccagaacgcugauaccuacguguucgugggcacgagcagauauuccaagaaauuuaagccugaaauugccauccggccgaaaguccgcgaccaggaggggagaaugaauuacuauuggacacugguugagcccggagauaagauuaccuucgaagcuacaggcaaccugguggugccucgguacgccuuugcgauggagcgcaacgccgggagcggaaucauuaucucugacacccccguccaugacugcaauaccacaugucaaacgccuaaaggcgcuaucaacaccucccuccccuuccagaauauucacccgaucacaauuggcaagugcccuaaguaugugaaaagcaccaagcugagacuugccacagggcugcggaacguucccucuauccagagccgcggacucuuuggcgcuauugccggguucaucgaaggaggcuggaccgggaugguggauggaugguacggcuaucaucaccagaaugagcaaggcuccggguacgccgcugaccugaaaucuacgcagaacgcgaucgauaagauuacaaauaaagucaacagcgugaucgaaaagaugaauacccaguuuaccgccguuggaaaggaguucaaccaccuugagaaaagaauugaaaaucugaacaagaaaguggacgauggcuuccucgacaucuggacauacaaugcugagcugcugguccuccuggaaaacgagcggacccuugauuaucaugacuccaaugugaagaaccuguacgaaaaaguccgcaaccagcucaagaauaacgccaaggagacagggaauggauguuuugaguucuaucacaaaugcgauaacacguguauggaaagcgugaagaauggcaccuacgacuauccuaaauacucugaggaagccaagcugaacagagaggaaauugaugggguuaaacuugaguccacacggaucuaucaaauccuggcuauuuacagcaccguggccucuucccucguccuggugguuagccugggcgcgaucuccuuuuggaugugcucuaauggaagccuccagugccgcauuuguaucuga

SEQ ID NO: 201677 - RNA, 1701 nt, Artificial Sequence
  derived and/or modified CDS sequence (opt5) from hemagglutinin__InfluenzaA__AFN20081
augaaggccauccuggugguccuccuguacaccuucgcuacagccaacgcggacacgcuuugcauuggcuaucacgcuaauaacagcaccgauacaguugacaccgugcuggagaaaaaugugacagucacccauuccgugaaccuccuggaagauaagcacaaugggaaacuuuguaagcugagaggaguugcuccccuccaucugggcaaaugcaacaucgccggguggauucugggaaauccugagugugaaucucucagcacagccuccucuuggagcuacaucguggagaccuccucuagcgacaacggcacgugcuauccgggggauuuuauugacuacgaagaacugcgggagcagcuuuccagcgucucuuccuucgaacgcuuugagaucuuccccaagaccagcucuuggccuaaucacgauuccaacaagggagugacagccgcuuguccccaugccggcgcgaaaucuuuuuauaagaaucugaucuggcucguuaaaaagggcaacagcuacccuaaaauuuccaagagcuauaucaaugacaaggggaaagaagugcugguccuuuggggcauucaccaccccuccaccacagccgaucaacagucucuguaccagaacgcugacaccuacguguucgugggaacgagcagauauuccaagaaauuuaagccugagaucgccauucggccgaaaguccgcgaucaggaggggagaaugaauuacuauuggacacucguugaacccggagacaagaucaccuucgaggcuacaggcaaccuggugauuccucgguacgccuuugcgauggaacgcaacgccgggagcggaaucaucauuucugauacccccgugcaugacugcaauaccacaugucaaacgccuaaaggcgcuaucaacaccucccugcccuuccagaauauucacccgaucacaauuggcagaugcccuaaguaugucaagagcaccaaacuccggcuggccacagggcuucgcaacgugcccucuauccagagcagaggacuguuuggcgcuaucgccggguucauugagggaggcuggaccgggaugguugacggaugguacggcuaucaucaccagaaugaacaaggcuccggguacgccgcugaucucaagucuacgcagaacgcgaucgacaaaauuacaaauaaggugaacagcgucaucgagaaaaugaauacccaguuuaccgccgugggaaaggaguucaaccaccuggaaaagcggauugagaaucuuaacaaaaagguugaugacggcuuccuggauaucuggacauacaaugcugaacuccuggugcugcucgagaacgaacgcacccuggacuaucaugauuccaaugucaaaaaccuuuacgagaaggugagaaaccagcugaaaaauaacgccaaggagacagggaauggauguuuugaguucuaucacaagugcgacaacacguguauggagagcgucaaaaauggcaccuacgauuauccuaaguacucugaagaggccaaacucaaccgggaagugaucgacgggguuaagcuggaguccacacgcauuuaucaaauccuugcuauuuacagcaccguggccucuucccugguccucgugguuagccugggcgcgaucuccuuuuggaugugcucuaauggaagccugcagugcagaauuuguaucuga

SEQ ID NO: 201678 - RNA, 1701 nt, Artificial Sequence; identical to SEQ ID NO: 198896
  derived and/or modified CDS sequence (opt5) from hemagglutinin__InfluenzaA__AFN20092

SEQ ID NO: 201679 - RNA, 1701 nt, Artificial Sequence; identical to SEQ ID NO: 201658
  derived and/or modified CDS sequence (opt5) from hemagglutinin__InfluenzaA__AFN20099

SEQ ID NO: 201680 - RNA, 1701 nt, Artificial Sequence
  derived and/or modified CDS sequence (opt5) from hemagglutinin__InfluenzaA__AFN20112
augaaggccauccuggugguccuccuguacaccuucgcuacagccaacgcggacacgcuuugcauuggcuaucacgcuaauaacagcaccgauacaguugacaccgugcuggagaaaaaugugacagucacccauuccgugaaccuccuggaagauaagcacaaugggaaacuuuguaagcugagaggaguugcuccccuccaucugggcaaaugcaacaucgccggguggauucugggaaauccugaguguaagucucucagcacagccuccucuuggagcuacaucguggaaaccuccucuagcgacaacggcacgugcuauccgggggauuuuauugacuacgaggaacugcgggagcagcuuuccagcgucucuuccuucgagcgcuuugaaaucuuccccaagaccagcucuuggccuaaucacaaccccaauaaaggagugacagccgcuuguccucaugccggcgcgaaguccuuuuauaaaaaccugaucuggcucguuaagaauggcaacagcuaccccaaacugaauaccucuuauauuaacgauaaggggaaggaggugcuuguccuguggggaauccaccacccuuccacaagcgccgaccaacagucccucuaccagaacgcugaugccuacgcuuucgugggcaccucuagauauagcaaaaaguuuaaaccggaaauugccauccggcccaaggugcgcgaccaggaggggagaaugaauuacuauuggacgcuggucgagccuggagauaaaauuacauucgaagcgaccggcaaccugguugugccccgguacgccuuugcuauggagcgcaaugccggguccggaaucauuaucagcgacacaucugugcaugauugcaacaccaccugucaaacaccuaagggcgcuaucaauacgucccuccccuuccagaacguccacccgauuaccaucggcaaaugcccuaaguauguuaagagcacaaaacugagacuugccaccgggcugcggaaugugcccucuauucagagccgcggacucuuuggcgccaucgcuggguucauugaaggaggcuggacagggaugguggacggaugguacggcuaucaucaccagaacgagcaaggcuccggguacgcggccgaccugaagucuacccagaaugcuuuugauaaaaucacgaacaaggucaauagcgugaucgaaaagaugaacacacaguucaccgccguuggaaaggaguucaaucaccuugagaagagaauugaaaaccugaauaaaaagguggacgauggcuuucucgacaucuggaccuacaacgccgagcugcugguccuccuggaaaacgagcggacacuugauuaucaugacuccaaugugaaaaaccuguacgaaaagguccgcagccagcucaaaaccaaugcuaaggagauugggaacggauguuucgaguuuuaucacaagugcgauaauacauguauggaaucugugaaaaacggcacguacgacuauccuaaguacuccgaggaagccaaacugaauagagaggaaaucgaugggguuaaacuugagagcacccggauuuaucaaauccuggcgaucuacucuacaguggcuuccagccucguccuggugguuucccugggcgccauuucuuucuggaugugcagcaacggaucccuccagugccgcaucuguauuuga

SEQ ID NO: 201681 - RNA, 1701 nt, Artificial Sequence
  derived and/or modified CDS sequence (opt5) from hemagglutinin__InfluenzaA__AFN87924
augaaggccauccuggugguccuccuguacaccuucgcuacagccaacgcggacacgcuuugcauuggcuaucacgcuaauaacagcaccgauacaguugacaccgugcuggagaaaaaugugacagucacccauuccgugaaccuccuggaagauaagcacaaugggaaacuuuguaagcugagaggaguugcuccccuccaucugggcaaaugcaacaucgccggguggauucugggaaauccugagugugaaucucucagcacagccuccucuuggagcuacaucguggagaccuccucuagcgacaacggcacgugcuauccgggggauuuuauugacuacgaggagcugcgggagcagcuuuccagcgucucuuccuucgaacgcuuugagaucuuccccaagaccagcucuuggccuaaucacgaucccaacaagggagugacagccgcuuguccucaugccggcgcgaaauccuuuuauaagaaucugaucuggcucguuaaaaagggcaacagcuaccccaaacugucuaccuccuauauuaaugacaagagaaaggaagugcuuguccugugggggauccaccacccuagcacauccgccgaucaacagucucucuaccagaacgcugacgccuacgcuuucgugggaaccagccgguauuccaaaaaguuuaaaccggagauugccauccgccccaaggugagagaucaggagggccggaugaauuacuauuggacgcuggucgaaccuggggacaaaauuacauucgaggcgaccggaaaccugguugugccccgcuacgccuuugcuauggaaagaaacgccggcagcgggaucauuaucucugauacauccgugcaugacugcaauaccaccugucaaacaccuaagggagcuaucaacacgagccuccccuuccagaauguccacccgauuaccaucggcaaaugcccuaaguaugugaagucuacaaaacugcggcuugccaccggccugcgcaacguucccagcauucaguccagagggcucuuuggagccaucgcuggcuucauugaagggggauggacaggcaugguggacgggugguacggauaucaucaccagaaugaacaaggcucuggcuacgcggccgaucuuaagagcacccagaacgcuuuugacaaaaucacgaauaaggucaacuccgugaucgagaaaaugaauacacaguucaccgccguugggaaggaguucaaccaccuugaaaagcggauugagaaucugaacaaaaagguggaugacggauuucucgauaucuggaccuacaaugccgaacugcugguccuccuggagaacgaacgcacacuugacuaucaugauagcaaugugaaaaaccuguacgagaaggucagaucucagcucaaaaacaaugcuaaggagauuggcaacggguguuucgaauuuuaucacaagugcgacaauaccuguauggaguccgugaaaaacggaacauacgauuauccuaaguacagcgaagaggccaaacugaaucgggaagagaucgacggcguuaagcuggagucuacgcgcauuuaucaaauccuggcgaucuacuccaccguggcuagcucccucguccuggugguuucucugggggccauuagcuucuggaugugcuccaacggcucucuccagugcagaaucuguauuuga

SEQ ID NO: 201682 - RNA, 1701 nt, Artificial Sequence; identical to SEQ ID NO: 194741
  derived and/or modified CDS sequence (opt5) from hemagglutinin__InfluenzaA__AFN87926

SEQ ID NO: 201683 - RNA, 1701 nt, Artificial Sequence
  derived and/or modified CDS sequence (opt5) from hemagglutinin__InfluenzaA__AFN87927
augaaggccauccuggugguccuccuguacaccuucgcuacagccaacgcggacacgcuuugcauuggcuaucacgcuaauaacagcaccgauacaguugacaccgugcuggagaagaaugugacagucacccauuccgugaaccuccuggaagauaagcacaaugggaaacuuuguaagcugagaggaguugcuccccuccaucugggcaaaugcaacaucgccggguggauucugggaaauccugagugugaaucucucagcacagccuccucuuggagcuacaucguggagaccuccucuagcgacaacggcacgugcuauccgggggauuuuauugacuacgaagaacugcgggagcagcuuuccagcgucucuuccuucgaacgcuuugagaucuuccccaagaccagcucuuggccuaaucacgauuccaacaagggagugacagccgcuuguccccaugccggcgcgaaaucuuuuuauaagaaucugaucuggcucguuaaaaagggcaacagcuacccuaaacuguccaagagcuauauuaaugacaagagaaaagaagugcuuguccugugggggauccaccaccccuccaccucugccgaucaacagagccucuaccagaacgcugacgccuacguguucgugggaacaucccgguauagcaagaaauuuaagccugagauugcuauccgcccgaaagucagagaucaggagggccggaugaauuacuauuggacccugguugaacccggggacaagauuacguucgaggccacaggaaaccugguggugccucgcuacgcguuugccauggaaagaaacgcuggcucugggaucauuaucuccggaacccccguccaugauugcaauacaaccugucaaaccccuaaaggcgccaucaacacaagccuccccuuccagaauauucacccgaucacgauuggcaagugcccuaaguaugugaaaucuaccaagcugcggcuugcuacagggcugcgcaacguucccagcauccaguccagaggacucuuuggcgccauugccggguucaucgagggaggcuggaccgggaugguggacggaugguacggcuaucaucaccagaaugaacaaggcucuggguacgcugcggaccugaaaagcacacagaacgccaucgauaagauuaccaaucgggucaacuccgugaucgagaaaaugaauacgcaguuuacagcuguuggaaaggaguucaaccaccuugaaaagcgcauugagaaucugaacaaaaagguggacgauggcuuccucgacaucuggaccuacaaugccgaacugcugguccuccuggagaacgaaagaacccuugauuaucaugacagcaaugugaaaaaccuguacgagaagguccggucucagcucaaaaacaaugccaaggagauugggaacggauguuuugaguucuaucacaagugcgauaauacauguauggaguccgugaaaaacggcaccuacgacuauccuaaguacagcgaagaggcuaaacugaaucgcgaagagaucgaugggguuaaacuugagucuacaagaaucuaucaaauucuggccaucuacuccacgguggcgagcucccucguccuggugguuucucugggcgcuauuagcuuuuggaugugcuccaacggaucucuccagugccggaucuguauuuga

SEQ ID NO: 201684 - RNA, 1701 nt, Artificial Sequence
  derived and/or modified CDS sequence (opt5) from hemagglutinin__InfluenzaA__AFN87928
augaaggccauccuggugguccuccuguacaccuucgcuacagccaacgcggacacgcuuugcauuggcuaucacgcuaauaacagcaccgauacaguugacaccgugcuggagaaaaaugugacagucacccauuccgugaaccuccuggaagauaagcacaaugggaaacuuuguaagcugagaggaguugcuccccuccaucugggcaaaugcaacaucgccggguggauucugggaaauccugagugugaaucucucagcacagccuccucuuggagcuacaucguggagaccuccucuagcgacaacggcacgugcuauccgggggauuuuauugacuacgaagaacugcgggagcagcuuuccagcgucucuuccuucgaacgcuuugagaucuuccccaagaccagcucuuggccuaaucacgauuccaacaagggagugacagccgcuuguccccaugccggcgcgaaaucuuuuuauaagaaucugaucuggcucguuaaaaagggcaacagcuacccuaaacuguccaagagcuauauuaaugacaaggggaaagaagugcuuguccuguggggaauccaccaccccuccaccucugccgaucaacagagccucuaccagaacgcugacgccuacguguucgugggcacauccagauauagcaagaaauuuaagccugagauugcuauccggccgaaaguccgcgauagagaggggcggaugaauuacuauuggacccugguugaacccggagacaagauuacguucgaggccacaggcaaccugguggugccucgcuacgcguuugccauggaaagaaacgcugggucuggaaucauuaucuccgauacccccguccaugacugcaauacaaccugucagaccccuaaaggcgccaucaacacaagccuccccuuccaaaauauucacccgaucacgauuggcaagugcccuaaguaugugaaaucuaccaagcugcggcuugcuacagggcugcgcaacguucccagcauccaguccagaggacucuuuggcgccauugccggguucaucgagggaggcuggaccgggaugguggacggaugguacggcuaucaucaccagaaugaacagggcucuggguacgcugcggaucugaaaagcacacaaaacgccaucgacaagauuaccaauaaagucaacuccgugaucgagaagaugaauacgcaguuuacagcuguuggaaaggaguucaaccaccuugaaaaacggauugagaaucugaacaagaaaguggaugacggcuuccucgauaucuggaccuacaaugccgaacugcugguccuccuggagaacgaacgcacccuugacuaucaugauagcaaugugaagaaccuguacgagaaagucagaucucagcucaagaacaaugccaaggagauugggaacggauguuuugaguucuaucacaaaugcgacaauacauguauggaguccgugaagaacggcaccuacgauuauccuaaauacagcgaagaggcuaagcugaaucgggaagagaucgacgggguuaaacuugagucuacacgcaucuaucagauucuggccaucuacuccacgguggcgagcucccucguccuggcugugucucugggcgccauuagcuuuuggaugugcuccaacggaucucuccaaugcagaaucuguauuuga

SEQ ID NO: 201685 - RNA, 1701 nt, Artificial Sequence; identical to SEQ ID NO: 195905
  derived and/or modified CDS sequence (opt5) from hemagglutinin__InfluenzaA__AFN87929

SEQ ID NO: 201686 - RNA, 1701 nt, Artificial Sequence; identical to SEQ ID NO: 195905
  derived and/or modified CDS sequence (opt5) from hemagglutinin__InfluenzaA__AFN87930

SEQ ID NO: 201687 - RNA, 1701 nt, Artificial Sequence
  derived and/or modified CDS sequence (opt5) from hemagglutinin__InfluenzaA__AFN87931
augaaggccauccuggugguccuccuguacaccuucgcuacagccaacgcggacacgcuuugcauuggcuaucacgcuaauaacagcaccgauacaguugacaccgugcuggagaaaaaugugacagucacccauuccgugaaccuccuggaagagaagcacaaugggaaacuuuguaagcugagaggaguugcuccccuccaucugggcaaaugcaacaucgccggguggauucugggaaauccugaaugugagucucucagcacagccuccucuuggagcuacaucguggaaaccuccucuagcgauaacggcacgugcuauccgggggacuuuauugauuacgaggagcugcgggaacagcuuuccagcgucucuuccuucgagcgcuuugaaaucuuccccaagaccagcucuuggccuaaucacgacuccaacaagggagugacagccgcuuguccccaugccggcgcgaaaucuuuuuauaagaaucugaucuggcucguuaaaaagggcaacagcuacccuaaacuguccaagagcuauauuaaugauaaggggaaagaggugcuuguccuguggggaauccaccaccccuccaccucugccgaccaacagagcauuuaccagaacgcugaugccuacguguucgugggcacauccagauauagcaagaaauuuaagccugagaucgcuauucggccgaaaguccgcgaccaggaagggagaaugaauuacuauuggacccucguugagcccggagauaagaucacguucgaagccacaggcaaccugguggugccucgguacgcguuuaccauggagcgcaacgccgggucuggaauuaucaucuccgacacacccguccaugauugcaauaccaccugucaaacaccuaaaggcgcuauuaacacgagccugcccuuccagaauauccacccgauuaccaucggcaagugcccuaaguaugugaaaucuacaaagcucagacuggccaccgggcuucggaacguucccagcauucagucccgcggacuguuuggcgcuaucgccggguucaucgaaggaggcuggacagggaugguggacggaugguacggcuaucaucaccagaaugagcaaggcucuggguacgccgcugaccucaaaagcacccagaacgcgauugauaagaucacgaauaaagucaacuccgugauugagaagaugaauacacaguuuaccgccguuggaaaggaauuuaaccaccuggagaaaagaaucgaaaaucuuaacaagaaaguggacgauggcuuccuggacauuuggaccuacaaugcugagcuccugguccugcucgaaaacgagcggacacuggauuaucaugacagcaaugugaagaaccuuuacgagaaaguccgcucucagcugaagaacaaugccaaggaaaucgggaacggauguuucgaguucuaucacaaaugcgauaauaccuguauggaauccgugaagaacggcacauacgacuauccuaaauacagcgaggaagccaagcucaauagagaggagaucgaugggguuaaacuggaaucuacgcggauuuaucaaauccuugcuauuuacuccaccguggccagcucccugguccucgugguuucucugggcgcgaucagcuuuuggaugugcuccaacggaucucugcagugccgcauuuguaucuga

SEQ ID NO: 201688 - RNA, 1701 nt, Artificial Sequence
  derived and/or modified CDS sequence (opt5) from hemagglutinin__InfluenzaA__AFN87932
auggaggccauccuggugguccuccuguacaccuucgcuacagccaacgcggacacgcuuugcauuggcuaucacgcuaauaacagcaccgauacaguugacaccgugcuggaaaagaaugugacagucacccauuccgugaaccuccuggaggauaaacacaaugggaaacuuuguaagcugagaggaguugcgccccuccaucugggcaagugcaacaucgccggguggauucugggaaauccugaaugugagucucucagcacagcuuccucuuggagcuacaucguggaaaccuccucuagcgacaacggcacgugcuauccgggggauuuuauugacuacgaggagcugcgggaacagcuuuccagcgucucuuccuucgagcgcuuugaaaucuuccccaaaaccagcucuuggccuaaucacgauuccaacaagggagugacagccgcuuguccccaugccggcgccaagagcuuuuauaaaaaucugaucuggcucguuaagaaaggcaacucuuacccuaagcuguccaaaagcuauauuaaugacaaggggaaggaggugcuuguccuguggggaauccaccaccccuccaccucugccgaucaacagagccucuaccagaacgcugacgccuacguguucgugggcuccagcagauauucuaaaaaguuuaaaccugagauugcuauccggccgaagguccgcgauagagaagggcggaugaauuacuauuggacacugguugagcccggagacaaaauuaccuucgaagccacgggcaaccugguggugccucgcuacgcguuugccauggagagaaacgcuggguccggaaucauuaucagcgauacacccguccaugacugcaauaccacaugucagaccccuaagggcgccaucaacaccucucuccccuuccacaauauucauccgaucacaauuggcaaaugcccuaaguauguuaagagcacgaaacugcggcuugcuaccgggcugcgcaacgugcccuccauccaaucuagaggacucuuuggcgccauugccggguucaucgaaggaggcuggacagggaugguggacggaugguacggcuaucaccaccagaaugagcagggcagcggguacgcugcggaucugaaguccacccagaacgccaucgacgagauuacaaauaaagucaacagcgugaucgaaaagaugaauacccaauuuacggcuguuggaaaagaguucaaccaucuugaaaagcggauugagaaucugaacaagaaaguggaugacggcuuccucgauaucuggacauacaaugccgaacugcugguccuccuggagaacgagcgcacccuugacuaucacgauucuaaugugaagaaccuguacgaaaaagucagaucccagcucaagaacaaugccaaagagauugggaacggauguuuugaguucuaucauaagugcgacaauaccuguauggaaagcgugaagaacggcacauacgauuauccuaaauacucugaagaggcuaagcugaaucgggaggaaaucgacgggguuaaacuugaguccacccgcaucuaucagauucuggccaucuacagcacaguggcguccucucucguccuggugguuagccugggcgcuauuuccuuuuggaugugcucuaacggaagccuccagugcagaaucuguauuuga

SEQ ID NO: 201689 - RNA, 1701 nt, Artificial Sequence; identical to SEQ ID NO: 195905
  derived and/or modified CDS sequence (opt5) from hemagglutinin__InfluenzaA__AFN87933

SEQ ID NO: 201690 - RNA, 1701 nt, Artificial Sequence
  derived and/or modified CDS sequence (opt5) from hemagglutinin__InfluenzaA__AFN87934
augaaggccauccugguggucaugcucuacaccuucgcuacagccaacgcggacacgcugugcauuggcuaucacgcuaauaacagcaccgauacaguugacaccgugcuugagaaaaaugugacagucacccauuccgugaaccugcucgaagauaagcacaaugggaaacuguguaaacuuagaggaguugcuccccugcagcucggcaaaugcaacaucgccggguggauucugggaaauccugagugugaaucucugagcacagccuccucuuggagcuacaucguggagaccuccucuagcgacaacggcacgugcuauccgggggauuuuauugacuacgaagaacuccgggagcaacuguccagcgucucuuccuucgaacgcuuugagaucuuccccaagaccagcucuuggccuaaucaugauuccaacaagggagugacagccgcuuguccccacgccggcgcgaaaggcuuuuauaagaaucuuaucuggcugguuaaaaaggggaacagcuacccuaaacucucuaaguccuauauuaaugacaagggaaaagaagugcugguccuuuggggcauccaucaccccagcaccuccgccgaucagcagucucuguaccagaacgcugacacauacguguucguggggaccagcagauauuccaagaaauuuaagccugagauugccauccggccgaaaguccgcgaucaagagggaagaaugaauuacuauuggacgcucguugaacccggcgacaagauuacauucgaggcuaccgggaaccugguggugccucgguacgccuuugcgauggaacgcaacgccggaagcggcaucauuaucucugauacacccguccacgacugcaauaccaccugucagacaccuaaaggcgcuaucaacacgucccugcccuuccagaauauucauccgaucaccauugggaagugcccuaaguaugugaaaagcacaaagcucagacuggccaccggacuucggaacguucccucuauccagagccgcggccuguuuggggcuauugccggauucaucgagggcggguggacaggaaugguggacggcugguacggcuaucaccaucaaaaugaacagggguccggauacgccgcugaucucaaaucuacccagaacgcgaucgacaagauuacgaauaaagucaacagcgugaucgagaagaugaauacacaguuuaccgccguuggcaaggaguucaaccaccuggaaaagagaauugagaaucuuaacaagaaaguggaugacggguuccuggauaucuggaccuacaaugcugaacuccugguccugcucgagaacgaacggacacuggacuaucacgauuccaaugugaagaaccuuuacgagaaaguccgcagccaacugaagaacaaugccaaggagauuggaaacggcuguuuugaguucuaucauaaaugcgacaauaccuguauggagucugugaagaacgggacauacgauuauccuaaauacuccgaagaggccaagcucaauagagaagagaucgacggcguuaaacuggagagcacgcggaucuaucagauucuugcuaucuacucuaccguggccuccagccugguccucgugguuucccugggagcgauuucuuuuuggaugugcagcaacggcucccugcagugccgcaucuguauuuga

SEQ ID NO: 201691 - RNA, 1701 nt, Artificial Sequence
  derived and/or modified CDS sequence (opt5) from hemagglutinin__InfluenzaA__AFN87936
augaaggccauccuggugguccuccuguacaccuucgcuacagccaacgcggacacgcuuugcauuggcuaucacgcuaauaacagcaccgauacaguugacaccgugcuggagaagaaugugacagucacccauuccgugaaccuccuggaagauaagcacaaugggaaacuuuguaagcugagaggaguugcuccccuccaucugggcaaaugcaacaucgccggguggauucugggaaauccugagugugaaucucucagcacagccuccucuuggagcuacaucguggagaccuccauuucugacaacggcacgugcuauccgggggauuuuaucgacuacgaggaacugcgggagcagcuuagcuccgucagcucuuucgaacgcuuugagaucuuccccaagaccuccagcuggccuaaucacgaucccaacaagggagugacagccgcuuguccucaugccggcgcgaaaucuuuuuauaagaaucugauuuggcucguuaaaaagggcaacuccuaccccaaacugagcaccucuuauaucaaugacaaggggaaggaagugcuuguccuguggggcauucaccacccuuccacaagcgccgaucaacagucccucuaccagaacgcugacgccuacgcuuucgugggaaccucuagauauagcaaaaaguuuaaaccggagaucgccauucggcccaaggugcgcgaucaggaggggagaaugaauuacuauuggacgcuggucgaaccuggagacaaaaucacauucgaggcgaccggcaaccugguugugccccgguacgccuuugcuauggaacgcaacgccggguccggaauuaucaucagcgauacaucugugcaugacugcaauaccaccugucaaacaccuaagggcgcuauuaacacgucccuccccuuccagaauguccacccgaucaccauuggcaaaugcccuaaguauguuaagagcacaaaacugagacuugccaccgggcugcggaucgugcccucuauucagagccgcggacucuuuggcgccaucgcuggguucaucgagggaggcuggacagggaugguggacggaugguacggcuaucaucaccagaacgaacaaggcuccggguacgcggccgaucugaagucuacccagaaugcuuuugacaaaauuacgaacaaggucaauagcgugaucgagaaaaugaacacacaguucaccgccguuggaaaggaguucaaucaccuugaaaagagaauugagaaccugaauaaaaagguggaugacggcuuucucgauaucuggaccuacaacgccgaacugcugguccuccuggagaaugaacggacacuugacuaucaugauuccaacgugaaaaaucuguacgagaagguccgcagccagcucaaaaacaacgcuaaggagauugggaauggauguuucgaauuuuaucacaagugcgacaacaccuguauggagucugugaaaaauggcacauacgauuauccuaaguacuccgaagaggccaaacugaacagagaagagaucgacgggguuaaacuugagagcacgcggaucuaucaaauucuggcgaucuacucuaccguggcuuccagccucguccuggugguuucccugggcgccauuucuuucuggaugugcagcaauggaucccuccagugccgcaucuguauuuga

SEQ ID NO: 201692 - RNA, 1701 nt, Artificial Sequence
  derived and/or modified CDS sequence (opt5) from hemagglutinin__InfluenzaA__AFN87938
augaaggccauccuggugguccuccuguacaccuucgcuacagccaacgcggacacgcuuugcauuggcuaucacgcuaauaacagcaccgauacaguugacaccgugcuggagaagaaugugacagucacccauuccgugaaccuccuggaagauaagcacaaugggaaacuuuguaagcugagaggaguugcuccccuccaucugggcaaaugcaacaucgccggguggauucugggaaauccugagugugaaucucucagcacagccuccucuuggagcuacaucguggagaccuccucuagcgacaacggcacgugcuauccgggggauuuuauugacuacgaagaacugcgggagcagcuuuccagcgucucuuccuucgaacgcuuugagaucuuccccaagaccagcucuuggccuaaucacgaucccaacaagggagugacagccgcuuguccucaugccggcgcgaaauccuuuuauaagaaucugaucuggcucguuaaaaagggcaacagcuaccccaaacugucuaaguccuauauuaaugacaaggggaaagaagugcuuguccuguggggaauccaccacccuagcaccuccgccgaucaacagucucucuaccagaacgcugacgccuacguguucgugggcacaagcagauauuccaagaaauuuaagccggagauugcuauccggcccaaaguccgcgaucaggaggggagaaugaauuacuauuggacccugguugaaccuggagacaagauuacguucgaggccacaggcaaccugguggugccccgguacgcguuugccauggaacgcaacgcugggagcggaaucauuaucucugauaccccuguccaugacugcaauacaaccugucaaaccuccaaaggcgccaucaacacaagccuccccuuccagaauauucacccgaucacgauuggcaagugcccuaaguaugugaaaucuaccaagcugagacuugcuacagggcugcggaacguucccagcauccagucccgcggacucuuuggcgccauugccggguucaucgagggaggcuggaccgggaugguggacggaugguacggcuaucaucaccagaaugaacaaggcucuggguacgcugcggaucugaaaagcacacagaacgccaucgacgagauuaccaauaaggucaacuccgugaucgagaaaaugaauacgcaguuuacagcuguuggaaaggaguucaaccaccuugagaagagaauugaaaaucugaacaaaaagguggaugacggcuuccucgauaucuggaccuacaaugccgagcugcugguccuccuggaaaacgagcggacccuugacuaucaugauagcaaugugaaaaaccuguacgagaagguccgcaaccagcucaaaaauaacgccaaggaaauugggaauggauguuuugaguucuaucacaagugcgacaacacauguauggaaucugugaaaaauggcaccuacgauuauccuaaguacuccgaggaagcuaaacugaacagagaggagaucgacgggguuaaacuugaaagcacacggaucuaucaaauucuggccaucuacucuacgguggcguccagccucguccuggugguuucccugggcgcuauuucuuuuuggaugugcagcaauggaucccuccagugccgcaucuguauuuga

SEQ ID NO: 201693 - RNA, 1701 nt, Artificial Sequence
  derived and/or modified CDS sequence (opt5) from hemagglutinin__InfluenzaA__AFN87939
augaaggccauccuggugguccuccuguacaccuucgcuacagccaacgcggacacgcuuugcauuggcuaucacgcuaauaacagcaccgauacaguugacaccgugcuggagaaaaaugugacagucacccauuccgugaaccuccuggaagauaagcacaaugggaaacuuuguaagcugagaggaguugcuccccuccaucugggcaaaugcaacaucgccggguggauucugggaaauccugagugugaaucucucagcacagccuccucuuggagcuacaucguggagaccuccucuagcgacaacggcacgugcuauccgggggauuuuauugacuacgaagaacugcgggagcagcuuuccagcgucucuuccuucgaacgcuuugagaucuuccccaagaccagcucuuggccuaaucacgaucccaacaagggagugacagccgcuuguccucaugccggcgcgaaauccuuuuauaagaaucugaucuggcucguuaaaaagggcaacagcuaccccaaacugucuaccuccuauauuaaugacaaggggaaggaagugcuuguccuguggggaauccaccacccuagcacauccgccgaucaacagucucucuaccagaacgcugacgccuacgcuuucgugggcaccagcagauauuccaaaaaguuuaaaccggagauugccauccggcccaaggugcgcgaucaggaggggagaaugaauuacuauuggacgcuggucgaaccuggagacaaaauuacauucgaggcgaccggcaaccugguugugccccgguacgccuuugcuauggaacgcaacgccgggagcggaaucauuaucucugauacauccgugcaugacugcaauaccaccugucaaacaccuaagggcgcuaucaacacgagccuccccuuccagaauguccacccgauuaccaucggcaaaugcccuaaguaugugaagucuacaaaacugagacuugccaccgggcugcggaacguucccagcauucagucccgcggacucuuuggcgccaucgcuggguucauugagggaggcuggacagggaugguggacggaugguacggcuaucaucaccagaaugaacaaggcucuggguacgcggccgaucuuaagagcacccagaacgcuaucgacgagaucacgaauaaagucaacuccgugauugagaagaugaauacacaguuuaccgccguuggaaaagaguucaaccaccuggagaagagaaucgaaaaucugaacaagaaaguggaugacggcuuccucgauauuuggaccuacaaugccgagcugcugguccuccuggaaaacgagcggacacuugacuaucaugauagcaaugugaagaaccuguacgagaaaguccgcucucagcucaagaacaaugcuaaagaaaucgggaacggauguuuugaguucuaucacaagugcgacaauaccuguauggaauccgugaagaacggcacauacgauuauccuaaauacagcgaggaagccaagcugaauagagaggagauugacgggguuaaacuugaaucuacgcggaucuaucaaauccuggcgauuuacuccaccguggcuagcucccucguccuggugguuucucugggcgccaucagcuuuuggaugugcuccaacggaucucuccagugccgcauuuguaucuga

SEQ ID NO: 201694 - RNA, 1701 nt, Artificial Sequence
  derived and/or modified CDS sequence (opt5) from hemagglutinin__InfluenzaA__AFN87941
augaaggccauccuggugguccuccuguacaccuucgcuacagccaacgcggacacgcuuugcauuggcuaucacgcuaauaacagcaccgauacaguugacaccgugcuggagaagaaugugacagucacccauuccgugaaccuccuggaagauaagcacaaugggaaacuuuguaagcugagaggaguugcuccccuccaucugggcaaaugcaacaucgccggguggauucugggaaauccugagugugaaucucucagcacagccuccucuuggagcuacaucguggagaccuccucuagcgacaacggcacgugcuauccgggggauuuuauugacuacgaagaacugcgggagcagcuuuccagcgucucuuccuucgaacgcuuugagaucuuccccaagaccagcucuuggccuaaucacgaucccaacaagggagugacagccgcuuguccucaugccggcgcgaaauccuuuuauaagaaucugaucuggcucguuaaaaagggcaacagcuaccccaaacugucuaaguccuauauuaaugacaaggggaaagaagugcuuguccuguggggaauccaccacccuagcaccuccgccgaucaacagucucucuaccagaacgcugacgccuacguguucgugggcacaagcagauauuccaagaaauuuaagccggagauugcuauccggcccaaaguccgcgaucaggaggggagaaugaauuacuauuggacccugguugaaccuggagacaagauuacguucgaggccacaggcaaccugguggugccccgguacgcguuugccauggaacgcaacgcugggagcggaaucauuaucucugauaccccuguccaugacugcaauacaaccugucaaacccccaaaggcgccaucaacacaucccucccguuccagaauauucacccuaucacgauuggcaagugccccaaguaugugaaaagcaccaagcugagacuugcuacagggcugcggaacguuccuucuauccagagccgcggacucuuuggcgccauugccggguucaucgagggaggcuggaccgggaugguggacggaugguacggcuaucaucaccagaaugaacaaggcuccggguacgcugcggaucugaaaucuacacagaacgccaucgacgagauuaccaauaaggucaacagcgugaucgagaaaaugaauacgcaguuuacagcuguuggaaaggaguucaaccaccuugagaagagaauugaaaaucugaacaaaaagguggaugacggcuuccucgauaucuggaccuacaaugccgagcugcugguccuccuggaaaacgagcggacccuugacuaucaugauuccaaugugaaaaaccuguacgagaagguccgcaaccagcucaaaaauaacgccaaggaaauugggaauggauguuuugaguucuaucacaagugcgacaacacauguauggaaagcgugaaaaauggcaccuacgauuaucccaaguacucugaggaagcuaaacugaacagagaggagaucgacgggguuaaacuugaauccacacggaucuaucaaauucuggccaucuacagcacgguggcgucuucccucguccuggugguuagccugggcgcuauuuccuuuuggaugugcucuaauggaagccuccagugccgcaucuguauuuga

SEQ ID NO: 201695 - RNA, 1701 nt, Artificial Sequence
  derived and/or modified CDS sequence (opt5) from hemagglutinin__InfluenzaA__AFN87943
augaaggccauccuggugguccuccuguacaccuucgcuacagccaacgcggacacgcuuugcauuggcuaucacgcuaauaacagcaccgauacaguugacaccgugcuggagaaaaaugugacagucacccauuccgugaaccuccuggaagauaagcacaaugggaaacuuuguaagcugagaggaguugcuccccuccaucugggcaaaugcaacaucgccggguggauucugggaaauccugagugugaaucucucagcacagccuccucuuggagcuacaucguggagaccuccauuucugacaacggcacgugcuauccgggggauuuuaucgacuacgaagaacugcgggagcagcuuagcuccgucagcucuuucgaacgcuuugagaucuuccccaagaccuccagcuggccuaaucacgaucccaacaagggagugacagccgcuuguccucaugccggcgcgaaaucuuuuuauaagaaucugauuuggcucguuaaaaagggcaacuccuaccccaaacugagcaccucuuauaucaaugacaaggggaaggaagugcuuguccuguggggcauucaccacccuuccacaagcgccgaucaacagucccucuaccagaacgcugacgccuacgcuuucgugggaaccucuagauauagcaaaaaguuuaaaccggagaucgccauucggcccaaggugcgcgaucaggaggggagaaugaauuacuauuggacgcuggucgaaccuggagacaaaaucacauucgaggcgaccggcaaccugguugugccccgguacgccuuugcuauggaacgcaacgccggguccggaauuaucaucagcgauacaucugugcaugacugcaauaccaccugucaaacaccuaagggcgcuauuaacacgucccuccccuuccagaauguccacccgaucaccauuggcaaaugcccuaaguauguuaagagcacaaaacugagacuugccaccgggcugcggaacgugcccucuauccagagccgcggacucuuuggcgccauugcuggguucaucgagggaggcuggacagggaugguggacggaugguacggcuaucaucaccagaaugaacaaggcuccggguacgcggccgaucugaagucuacccagaacgcuaucgacgagauuacgaauaaagucaacagcgugaucgagaagaugaauacacaguuuaccgccguuggaaaagaguucaaccaccuugagaagagaauugaaaaucugaacaagaaaguggaugacggcuuccucgauaucuggaccuacaaugccgagcugcugguccuccuggaaaacgagcggacacuugacuaucaugauuccaaugugaagaaccuguacgagaaaguccgcagccagcucaagaacaaugcuaaagaaauugggaacggauguuuugaguucuaucacaagugcgacaauaccuguauggaaucugugaagaacggcacauacgauuauccuaaauacuccgaggaagccaagcugaauagagaggagaucgacgggguuaaacuugaaagcacgcggaucuaucaaauucuggcgaucuacucuaccguggcuuccagccucguccuggugguuucccugggcgccauuucuuuuuggaugugcagcaacggaucccuccagugccgcaucuguauuuga

SEQ ID NO: 201696 - RNA, 1701 nt, Artificial Sequence
  derived and/or modified CDS sequence (opt5) from hemagglutinin__InfluenzaA__AFN87945
augaaggccauccuggugguccuccuguacaccuucgcuacagccaacgcggacacgcuuugcauuggcuaucacgcuaauaacagcaccgauacaguugacaccgugcuggagaaaaaugugacagucacccauuccgugaaccuccuggaagauaagcacgacgggaaacuuuguaagcugagaggaguugcuccccuccaucugggcaaaugcaauaucgccggguggauucugggaaacccugagugugaaucucucagcacagccuccucuuggagcuacaucguggagaccuccucuagcgauaauggcacgugcuauccgggggacuuuauugauuacgaagaacugcgggagcagcuuuccagcgucucuuccuucgaacgcuuugagaucuuccccaagaccagcucuuggccuaaccacgacuccaauaagggagugacagccgcuuguccccaugccggcgcgaaaucuuuuuauaagaaccugaucuggcucguuaaaaagggcaauagcuacccuaaacugucccaaagcuauauuaacgauaaggggaaggaagugcuuguccuguggggaauccaccaccccuccaccucugccgaccagcagagccucuaccagaaugcugaugccuacguguucgugggcacauccagauauagcaaaaaguuuaaaccugagauugcuauccggccgaagguccgcgaccaagaggggagaaugaacuacuauuggacccugguugaacccggagauaaaauuacguucgaggccacaggcaaucugguggugccucgguacgcguuugccauggaacgcaacgcugggucuggaaucauuaucuccgacacccccguccaugacugcaacacaaccugucagaccccuaagggcgccaucaauacaagccuccccuuccagaacauucacccgaucacgauuggcaaaugcccuaaguaugugaagucuaccaaacugagacuugcuacagggcugcggaauguucccagcauccagucccgcggacucuuuggcgccauugccggguucaucgagggaggcuggaccgggaugguggauggaugguacggcuaucaucaccaaaacgaacagggcucuggguacgcugcggaccuuaagagcacacagaaugccaucgauaaaauuaccaacaaggucaauuccgugaucgagaaaaugaacacgcaguuuacagcuguuggaaaggaguucaaucaccuugaaaagagaauugagaaccugaauaaaaagguggacgauggcuuccucgacaucuggaccuacaacgccgaacugcugguccuccuggagaaugaacggacccuugauuaucaugacagcaacgugaaaaaucuguacgagaagguccgcucucaacucaaaaacaacgccaaggagauugggaauggauguuuugaguucuaucacaagugcgauaacacauguauggaguccgugaaaaauggcaccuacgacuauccuaaguacagcgaagaggcuaaacugaacagagaagagaucgaugggguuaagcuggagucuacacggaucuaucagauucuggccaucuacuccacgguggcgagcucccucguccuggugguuucucugggcgcuauuagcuuuuggaugugcuccaauggaucucuccagugccgcaucuguauuuga

SEQ ID NO: 201697 - RNA, 1701 nt, Artificial Sequence
  derived and/or modified CDS sequence (opt5) from hemagglutinin__InfluenzaA__AFN87947
augaaggccauccuggugguccuccuguacaccuucgcuacagccaacgcggacacgcuuugcauuggcuaucacgcuaauaacagcaccgauacaguugacaccgugcuggagaaaaaugugacagucacccauuccgugaaccuccuggaagauaagcacaaugggaaacuuuguaagcugagaggaguugcuccccuccaucugggcaaaugcaacaucgccggguggauucugggaaauccugagugugaaucucucagcacagccuccucuuggagcuacaucguggagaccuccucuagcgacaacggcacgugcuauccgggggauuuuauugacuacgaagaacugcgggagcagcuuuccagcgucucuuccuucgaacgcuuugagaucuuccccaagaccagcucuuggccuaaucacgaucccaacaagggagugacagccgcuuguccucaugccggcgcgaaauccuuuuauaagaaucugaucuggcucguuaaaaagggcaacagcuaccccaaacugucuaccuccuauauuaaugacaaggggaaggaagugcuuguccuguggggaauccaccacccuagcacauccgccgaucaacagucucucuaccagaacgcugacgccuacgcuuucgugggcaccagcagauauuccaaaaaguuuaaaccggagauugccauccggcccaaggugcgcgaucaggaggggagaaugaauuacuauuggacgcuggucgaaccuggagacaaaauuacauucgaggcgaccggcaaccugguugugccccgguacgccuuugcuauggaacgcaacgccgggagcggaaucauuaucucugauacauccgugcaugacugcaauaccaccugucaaacaccuaagggcgcuaucaacacgagccuccccuuccagaauguccacccgauuaccaucggcaaaugcccuaaguaugugaagucuacaaaacugagacuugccaccgggcugcggaacguucccagcauucagucccgcggacucuuuggcgccaucgcuggguucauugagggaggcuggacagggaugguggacggaugguacggcuaucaucaccagaaugaacaaggcucuggguacgcggccgaucuuaagagcacccagaacgcuuuugacgagaucacgaauaaagucaacuccgugaucgagaagaugaauacacaguucaccgccguuggaaaagaguucaaccaccuggagaagagaauugaaaaucugaacaagaaaguggaugacggcuuucucgauaucuggaccuacaaugccgagcugcugguccuccuggaaaacgagcggacacuugacuaucaugauagcaaugugaagaaccuguacgagaaaguccgcucucagcucaagaacaaugcuaaagaaauugggaacggauguuucgaguuuuaucacaagugcgacaauaccuguauggaauccgugaagaacggcacauacgauuauccuaaauacagcgaggaagccaagcugaauagagaggagaucgacgggguuaaacuugaaucuacgcggauuuaucaaauccuggcgaucuacuccaccguggcuagcucccucguccuggugguuucucugggcgccauuagcuucuggaugugcuccaacggaucucuccagugccgcaucuguauuuga

SEQ ID NO: 201698 - RNA, 1701 nt, Artificial Sequence
  derived and/or modified CDS sequence (opt5) from hemagglutinin__InfluenzaA__AFN87949
augaaggccauccugguggucaugcucuacaccuucgcuacagccaacgcggacacgcugugcauuggcuaucacgcuaauaacagcaccgauacaguugacaccgugcuugagaaaaaugugacagucacccauuccgugaaccugcucgaagauaagcacaaugggaaacuguguaaacuuagaggaguugcuccccugcaucucggcaaaugcaacaucgccggguggauucugggaaauccugagugugaaucucugagcacagccuccucuuggagcuacaucguggagaccuccucuagcgacaacggcacgugcuauccgggggauuuuauugacuacgaagaacuccgggagcagcuguccagcgucucuuccuucgaacgcuuugagaucuuccccaagaccagcucuuggccuaaucacgauuccaacaagggagugacagccgcuuguccccaugccggcgcgaaaggcuuuuauaagaaucuuaucuggcugguuaaaaaggggaacagcuacccuaaacucucuaaguccuauauuaaugacaagggaaaagaagugcugguccuuuggggcauccaccaccccagcaccuccgccgaucaacagucucuguaccagaacgcugacacauacguguucguggggaccagcagauauuccaagaaauuuaagccugagauugccauccggccgaaaguccgcgaucaggagggaagaaugaauuacuauuggacgcucguugaacccggcgacaagauuacauucgaggcuaccgggaaccugguggugccucgguacgccuuugcgauggaacgcaacgccggaagcggcaucauuaucucugauacacccguccaugacugcaauaccaccugucaaacaccuaaaggcgcuaucaacacgucccugcccuuccagaauauucacccgaucaccauugggaagugcccuaaguaugugaaaagcacaaagcucagacuggccaccggacuucggaacguucccucuauccagagccgcggccuguuuggggcuauugccggauucaucgagggcggguggacaggaaugguggacggcugguacggcuaucaucaccagaaugaacaaggguccggauacgccgcugaucucaaaucuacccagaacgcgaucgacaagauuacgaauaaagucaacagcgugaucgagaagaugaauacacaguuuaccgccguuggcaaggaguucaaccaccuggaaaagagaauugagaaucuuaacaagaaaguggaugacggguuccuggauaucuggaccuacaaugcugaacuccugguccugcucgagaacgaacggacacuggacuaucaugauuccaaugugaagaaccuuuacgagaaaguccgcagccagcugaagaacaaugccaaggagauuggaaacggcuguuuugaguucuaucacaaaugcgacaauaccuguauggagucugugaagaacgggacauacgauuauccuaaauacuccgaagaggccaagcucaauagagaagagaucgacggcguuaaacuggagagcacgcggaucuaucaaauucuugcuaucuacucuaccguggccuccagccugguccucgugguuucccugggagcgauuucuuuuuggaugugcagcaacggcucccugcagugccgcaucuguauuuga

SEQ ID NO: 201699 - RNA, 1701 nt, Artificial Sequence; identical to SEQ ID NO: 199012
  derived and/or modified CDS sequence (opt5) from hemagglutinin__InfluenzaA__AFN87951

SEQ ID NO: 201700 - RNA, 1701 nt, Artificial Sequence
  derived and/or modified CDS sequence (opt5) from hemagglutinin__InfluenzaA__AFN87953
augaaggccauccuggugguccuccuguacaccuucgcuacagccaacgcggacacgcuuugcauuggcuaucacgcuaauaacagcaccgauacaguugacaccgugcuggagaaaaaugugacagucacccauuccgccaaccuccuggaagauaagcacaaugggaaacuuuguaagcugagaggaguggcuccccuccaucugggcaaaugcaacaucgccggguggauucugggaaauccugagugugaaucucucagcacagccuccucuuggagcuacaucguugagaccuccucuagcgacaacggcacgugcuauccgggggauuuuauugacuacgaagaacugcgggagcagcuuuccagcgugucuuccuucgaacgcuuugagaucuuccccaagaccagcucuuggccuaaucacgaucugaacaagggagucacagcugccuguccccaugcgggcgccaaauccuuuuauaagaaucucaucuggcuggugaaaaagggcaacagcuacccuaaacuuucuaaguccuauauuaaugacaaggggaaagaaguucuggugcucuggggaauccaccaccccagcaccuccgcugaucaacagucucuguaccagaacgccgacgcuuacgucuucgugggcacaagcagauauuccaagaaauuuaagccugagauugccauccggccgaaagugcgcgaucaggaggggagaaugaauuacuauuggacccuggucgaacccggagacaagauuacguucgaggcgacaggcaaccucguugugccucgguacgccuuugcuauggaacgcaacgccgggagcggaaucauuaucucugauacccccgugcaugacugcaauacaaccugucaaaccccuaaaggcgcuaucaacacaucccugcccuuccagaauauucacccgaucacgauuggcaagugcccuaaguaugucaaaagcaccaaacuuagacuggccacagggcuccggaacgugcccucuauccagagccgcggacuguuuggcgccauugcuggguucaucgagggaggcuggaccgggaugguugacggaugguacggcuaucaucaccagaaugaacaaggcuccggguacgcggccgaucuuaagucuacacagaacgcuaucgacgagauuaccaauaaggugaacagcgucaucgagaaaaugaauacgcaguuuacagccgugggaaaggaguucaaccaccuggagaagagaauugaaaaucucaacaaaaagguugaugacggcuuccuggauaucuggaccuacaaugccgagcugcucgugcugcuugaaaacgagcggacccuggacuaucaugauuccaaugucaaaaaccucuacgagaaggugcgcagccagcugaaaaacaaugcuaaggaaauugggaacggauguuuugaguucuaucacaagugcgacaauacauguauggaaucugucaaaaacggcaccuacgauuauccuaaguacuccgaggaagccaaacuuaauagagaggagaucgacggggugaagcuggaaagcacacggaucuaucaaauucucgcgaucuacucuacgguugcuuccagccuggugcuggucgugucccucggcgccauuucuuuuuggaugugcagcaacggaucccugcagugccgcaucuguauuuga

SEQ ID NO: 201701 - RNA, 1701 nt, Artificial Sequence
  derived and/or modified CDS sequence (opt5) from hemagglutinin__InfluenzaA__AFN87955
augaaggccauccugguggucaugcucuacaccuucgcuacagccaacgcggacacgcugugcauuggcuaucacgcuaauaacagcaccgauacaguugacaccgugcuugagaaaaaugugacagucacccauuccgugaaccugcucgaagauaagcacaaugggaaacuguguaaacuuagaggaguugcuccccugcaucucggcaagugcaacaucgccggguggauucugggaaauccugagugugaaucucugagcacagccuccucuuggagcuacaucguggagaccuccucuagcgacaacggcacgugcuauccgggggauuuuauugacuacgaagaacuccgggagcagcuguccagcgucucuuccuucgaacgcuuugagaucuuccccaagaccagcucuuggccuaaucacgauuccaacaagggagugacagccgcuuguccccaugccggcgcgaaaggcuuuuauaagaaucuuaucuggcugguuaaaaaggggaacagcuacccuaaacucucuaaguccuauauuaaugacaagggaaaagaagugcugguccuuuggggcauccaccaccccagcaccacagccgaucaacagucccuguaccagaacgcugacaccuacguguucguggggacgucuagauauagcaagaaauuuaagccugagauugccauccggccgaaaguccgcgaucaggagggaagaaugaauuacuauuggacacucguugaacccggcgacaagauuaccuucgaggcuacagggaaccugguggugccucgguacgccuuugcgauggaacgcaacgccggauccggcaucauuaucagcgauacccccguccaugacugcaauaccacaugucaaacgccuaaaggcgcuaucaacaccucucugcccuuccagaauauucacccgaucacaauugggaagugcccuaaguaugugaaauccaccaagcucagacuggccacaggacuucggaacguucccagcauccagucucgcggccuguuuggggcuauugccggauucaucgagggcggguggaccggaaugguggacggcugguacggcuaucaucaccagaaugaacaagggagcggauacgccgcugaucucaaauccacgcagaacgcgaucgacgagauuacaaauaaggucaacucugugaucgagaaaaugaauacccaguuuaccgccguuggcaaggaguucaaccaccuggagaagagaauugaaaaucuuaacaaaaagguggaugacggguuccuggauaucuggacauacaaugcugagcuccugguccugcucgaaaacgagcggacccuggacuaucaugauagcaaugugaaaaaccuuuacgagaagguccgcucccagcugaaaaacaaugccaaggaaauuggaaacggcuguuuugaguucuaucacaagugcgacaauacauguauggaaagcgugaaaaacgggacguacgauuauccuaaguacucugaggaagccaaacucaauagagaggagaucgacggcguuaagcuggaauccacccggaucuaucaaauucuugcuaucuacagcacaguggccucuucccugguccucgugguuagccugggagcgauuuccuuuuggaugugcucuaacggcagccugcagugccgcaucuguauuuga

SEQ ID NO: 201702 - RNA, 1701 nt, Artificial Sequence
  derived and/or modified CDS sequence (opt5) from hemagglutinin__InfluenzaA__AFN87957
augaaggccauccuggugguccuccuguacaccuucgcuacagccaacgcggacacgcuuugcauuggcuaucacgcuaauaacagcaccgauacaguugacaccgugcuggagaagaaugugacagucacccauuccgugaaccuccuggaagauaagcacaaugggaaacuuuguaagcugagaggaguugcuccccuccaucugggcaaaugcaacaucgccggguggauucugggaaauccugagugugaaucucucagcacagccuccucuuggagcuacaucguggagaccuccauuucugacaacggcacgugcuauccgggggauuuuaucgacuacgaagaacugcgggagcagcuuagcuccgucagcucuuucgaacgcuuugagaucuuccccaagaccuccagcuggccuaaucacgaucccaacaagggagugacagccgcuuguccucaugccggcgcgaaaucuuuuuauaagaaucugauuuggcucguuaaaaagggcaacuccuaccccaaacugagcaccucuuauaucaaugacaaggggaaggaagugcuuguccuguggggcauucaccacccuuccacaagcgccgaucaacagucccucuaccagaacgcugacgccuacgcuuucgugggaaccucuagauauagcaaaaaguuuaaaccggagaucgccauucggcccaaggugcgcgaucaggaggggagaaugaauuacuauuggacgcuggucgaaccuggagacaaaaucacauucgaggcgaccggcaaccugguugugccccgguacgccuuugcuauggaacgcaacgccggguccggaauuaucaucagcgauacaucugugcaugacugcaauaccaccugucaaacaccuaagggcgcuauuaacacgucccuccccuuccagaauguccacccgaucaccauuggcaaaugcccuaaguauguuaagagcacaaaacugagacuugccaccgggcugcggaacgugcccucuauccagagccgcggacucuuuggcgccauugcuggguucaucgagggaggcuggacagggaugguggacggaugguacggcuaucaucaccagaaugaacaaggcuccggguacgcggccgaucugaagucuacccagaacgcuuuugacgagaucacgaauaaagucaacagcgugauugagaagaugaauacacaguucaccgccguuggaaaagaguucaaccaccuugagaagagaaucgaaaaucugaacaagaaaguggaugacggcuuucucgauauuuggaccuacaaugccgagcugcugguccuccuggaaaacgagcggacacuugacuaucaugauuccaaugugaagaaccuguacgagaaaguccgcagccagcucaagaacaaugcuaaagaaaucgggaacggauguuucgaguuuuaucacaagugcgacaauaaguguauggaaucugugaaaaacggcaccuacgauuauccuaaguacuccgaggaagccaaacugaauagagaggagauugacgggguuaaacuugaaagcacacggaucuaucaaauccuggcgauuuacucuacgguggcuuccagccucguccuggugguuucccugggcgccaucucuuucuggaugugcagcaacggaucccuccagugccgcauuuguaucuga

SEQ ID NO: 201703 - RNA, 1701 nt, Artificial Sequence
  derived and/or modified CDS sequence (opt5) from hemagglutinin__InfluenzaA__AFN87959
augaaggccauccugguggucaugcucuacaccuucgcuacagccaacgcggacacgcugugcauuggcuaucacgcuaauaacagcaccgauacaguugacaccgugcuugagaaaaaugugacagucacccauuccgugaaccugcucgaagauaagcacaaugggaaacuguguaaacuuagaggaguugcuccccugcaucucggcaaaugcaacaucgccggguggauucugggaaauccugagugugaaucucugagcacagccuccucuuggagcuacaucguggagaccuccucuagcgacaacggcacgugcuauccgggggauuuuauugacuacgaagaacuccgggagcagcuguccagcgucucuuccuucgaacgcuuugagaucuuccccaagaccagcucuuggccuaaucacgauuccaacaagggagugacagccgcuuguccccaugccggcgcgaaaggcuuuuauaagaaucuuaucuggcugguuaaaaaggggaacagcuacccuaaacucucuaaguccuauauuaaugacaagggaaaagaagugcugguccuuuggggcauccaccaccccagcaccuccgccgaucaacagucucuguaccagaacgcugacacauacguguucguggggaccagcagauauuccaagaaauuuaagccugagauugccauccggccgaaaguccgcgaucaggagggaagaaugaauuacuauuggacgcucguugaacccggcgacaagauuacauucgaggcuaccgggaaccugguggugccucgguacgccuuugcgauggaacgcaacgccggaagcggcaucauuaucucugauacacccguccaugacugcaauaccaccugucaaacaccuaaaggcgcuaucaacacgucccugcccuuccagaauauucacccgaucaccauugggaagugcccuaaguaugugaaaagcacaaagcucagacuggccaccggacuucggaacguucccucuauccagagccgcggccuguuuggggcuauugccggauucaucgagggcggguggacaggaaugguggacggcugguacggcuaucaucaccagaaugaacaaggguccggauacgccgcugaucucaaaucuacccagaacgcgaucgacaagauuacgaauaaagucaacagcgugaucgagaagaugaauacacaguuuaccgccguuggcaaggaguucaaccaccuggaaaagagaauugagaaucuuaacaagaaaguggaugacggguuccuggauaucuggaccuacaaugcugaacuccugguccugcucgagaacgaacggacacuggacuaucaugauuccaaugugaagaaccuuuacgagaaaguccgcaaccagcugaagaauaacgccaaggagauuggaaauggcuguuuugaguucuaucacaaaugcgacaacaccuguauggagagcgugaagaaugggacauacgauuauccuaaauacucugaagaggccaagcucaacagagaagagaucgacggcguuaaacuggaguccacgcggaucuaucaaauucuugcuaucuacagcaccguggccucuucccugguccucgugguuagccugggagcgauuuccuuuuggaugugcucuaauggcagccugcagugccgcaucuguauuuga

SEQ ID NO: 201704 - RNA, 1701 nt, Artificial Sequence; identical to SEQ ID NO: 195226
  derived and/or modified CDS sequence (opt5) from hemagglutinin__InfluenzaA__AFN87961

SEQ ID NO: 201705 - RNA, 1698 nt, Artificial Sequence
  derived and/or modified CDS sequence (opt5) from hemagglutinin__InfluenzaA__AFO64802
augaaggccaaacugcucgugcugcuuugcaccuucacagcuacguacgccgacaccaucuguauuggcuaucacgcgaacaauagcacagauaccgucgacacaguucuggagaagaacgugaccgugacacauuccgucaaucuccuggaagauucucacaacgggaaacuuugccugcucaagggaaucgcuccccugcagcugggcaauuguagcguggccggguggauucucggaaacccugagugcgaacugcuuaucuccaaagagucuuggagcuacauuguugaaaccccgaaucccgagaacggcacguguuauccuggguacuuugccgacuaugaggaacugagagagcaacucuccucugugagcuccuucgaacgguuugagaucuuccccaaggagagcucuuggccuaaucauaccgucacaggaguguccgcuagcugcucucacaacggcaaguccagcuuuuaccgcaaucugcuuuggcugaccguuaaaaacggccucuaucccaaucugucuaaguccuacgugaacaauaaagggaaggaaguccuggugcucuggggagugcaucacccuagcaacaucagagaucagcgggccauuuaccacacagagaacgcuuaugucuccguugugucuagccauuacucccgcagauucaccccggaaaucgccaaacggcccaaggugcgcgaccaggagggcagaauuaauuauuacuggacgcugcuugaaccuggggauacaaucauuuuugaggcgaacggaaaucugaucgcccccugguaugcuuucgcccucagccggggcuuugggucuggaauuaucaccuccaacgcuccuauggacgagugugaugccaagugccagacaccccaaggcgcgaucaauagcucucugccguuccagaacguccacccugugaccauuggcgaaugucccaaauacguucgcagcgccaaacuuagaauggugaccgggcugcggaauaucccuuccauucagucucgcggacucuuuggcgcuaucgccggguucauugagggaggcuggacagggaugaucgacggaugguauggcuaccaucaccagaacgaacaaggcagcggguacgcugccgaucagaaguccacgcagaaugccaucaacggaauuaccaauaaggucaacagcgugaucgagaaaaugaauacacaguuuaccgcuguuggcaaggaguucaacaaacuggaaagacggauggagaaucugaacaagaagguggacgauggguuccucgacauuuggacauauaacgcggaacugcuuguccugcucgagaaugaacgcacccuggacuuucacgauucuaacgugaaaaaucuuuacgagaaggucaaaucccaacugaagaacaaugccaaagaaaucggaaacggcugcuucgaguuuuaucauaaguguaauaacgagugcauggaaagcgugaagaaugggacguacgacuaucccaaauacucugaggaauccaagcucaacagagagaaaauugauggcguuaagcuggagagcaugggaguguaucagauccuggcuaucuacuccacagucgccucuagccucgugcugcuuguuucccugggcgccauuucuuucuggaugugcagcaaugggucccuccagugucggaucugcauuuga

SEQ ID NO: 201706 - RNA, 1701 nt, Artificial Sequence
  derived and/or modified CDS sequence (opt5) from hemagglutinin__InfluenzaA__AFO64813
augaaggccaagcugcucgugcugcuuugcgcuuucaccgccacagacgcggauacgaucuguauuggcuaccacgcuaacaauagcaccgacacagucgauaccguucuggagaagaacgugacagugacccauuccgucaaucuccuggaagacucucacaacgggaaacuuugcagacugaagggaaucgccccgcuccagcugggcaauuguagcauugccggguggauccugggaaacccugagugcgaaucccucuuuucuaaaaagagcugguccuauauugcugagacacccaauucugaaaacggcaccuguuaccccggguauuucgccgauuacgaggagcugcgggaacaacuuagcuccgugagcucuuuugagcgcuucgaaaucuuuccuaaggaguccagcuggcccaaucauacgguuaccaaaggagugacagcuucuugcucccacaagggcagaagcucuuucuaucggaaccugcucuggcugaccgagaaaaauggcuccuacccuaaccuuagcaaguccuaugucaauaacaaagaaaaggaggugcugguucucuggggagugcaucaccccucuaauauccgcgaccagagagccauuuaccacacagaaaacgcguacgucagcgugguguccagccauuauaaccggcgcuuuaccccugagaucgccaagagaccgaaaguccgggaucaggaagggcgcauuaauuacuauuggacgcugcuggagcccggcgacacaaucauuuucgaggcuaacgggaaucucaucgccccuugguacgcuuuugcccugucuagaggauucggcuccgggauuaucaccagcaacgcgucuauggaugaaugugacgccaagugccagacaccccaaggagcuaucaauagcucccuuccuuuucagaacguucaccccgugaccauuggcgaguguccgaaauaugugcggucuaccaagcugcgcauggucacaggccucagaaauaucccuagcauucagucccgggggcuguucggagccaucgcuggcuuuauugaagggggauggacgggcaugaucgaugggugguacggauaucaucaccagaacgagcaaggcagcggcuacgccgccgaccagaaaucuacccagaaugcuaucaacgggauuacaaauaaggugaacuccguuaucgaaaagaugaauacccaguucacagcggugggaaaggaguucaacaaacuugagcgcagaauggaaaaucugaacaaaaaggucgaugacggcuuucucgacauuuggaccuacaacgccgagcugcuggugcuccuggaaaaugagcggacgcuugauuuccacgacagcaacguuaaaaaucuguaugaaaaggugaaaucucaacucaagaacaaugcuaaggagaucgggaacggaugcuuugaguucuaccauaaauguaauaacgaaugcauggaguccgucaagaauggcacauaugauuaccccaaauauagcgaagaguccaagcugaacagagagaaaauugacggggugaaacuugaaucuaugggcgucuaccagauccuggccaucuauagcaccguggccuccucucucguucugcuggugagccucggagcuauuuccuuuuggaugugcagcaauggcucucugcagugucgcaucugcauuuga

SEQ ID NO: 201707 - RNA, 1701 nt, Artificial Sequence
  derived and/or modified CDS sequence (opt5) from hemagglutinin__InfluenzaA__AFO64824
augaaggccauccugcucgugcugcuuugcgcuuucaccgccacagacgcggauacgauuuguaucggcuaccacgcuaacaauagcaccgacacagucgauaccguucuggagaaaaacgugacagugacccauuccgucaaucuccuggaagacucucacaacgggaaacuuugcagacugaaaggaauugccccgcuccagcugggcaauuguagcaucgccggguggauucugggaaacccugagugcgaaucccucuuuucuaagaaaagcugguccuauaucgcugagacacccaauucugaaaacggcaccuguuaccccggguauuucgccgauuacgaggagcugcgggaacaacuuagcuccgugagcucuuuugagcgcuucgaaaucuuuccuaaggaguccagcuggcccaaucauacgguuaccaagggagugacagcuucuugcucccacaaaggcagaagcucuuucuaucggaaccugcucuggcugaccgagaagaauggccuuuacccuaaccuguccaaaagcuaugucaauaacaaggaaaaagaggugcucguucuguggggagugcaucaccccuccaauauuggggaccagcgcgccaucuaccacacagaaaacgcguacgucucuguggugagcucccauuauaacagacgguuuaccccugagauugccaagcgcccgaaggucagaggccaggaagggcggaucaauuacuauuggacgcugcucgagcccggagauacaauuaucuucgaggcuaacggcaaucugauugccccuugguacgcuuuugcccuuagccgcggguucggaucuggcaucaucaccuccaacgcgagcauggacgaaugugaugccaaaugccagacaccccaaggcgcuauuaauucuagccugccuuuucagaacguucaccccgugaccaucggggaguguccgaaguaugugagauccaccaaacucaagauggucacaggacugcggaauauuccuucuauccagagccgcggccuuuucggggccauugcuggauuuaucgaaggcggguggacgggaaugaucgacggcugguacggcuaucaucaccagaacgagcaaggguccggauacgccgccgaucagaaaagcacccagaaugcuauuaacggcaucacaaauaaggugaacucuguuauugaaaagaugaauacccaguucacagcgguggggaaggaguucaacaagcuggagaaaagaauggaaaaucucaacaagaaagucgacgauggauuucuggacaucuggaccuacaacgccgagcugcucgugcugcuugaaaaugagcggacgcuggacuuccacgauuccaacguuaagaaucucuaugaaaaagugaagaaccaacugaagaauaacgcuaaagagauuggcaaugggugcuuugaguucuaccauaaguguaacaaugaaugcauggagagcgucaaaaacggcacauaugacuaccccaaguauucugaagaguccaaacuuaaucgcgagaagaucgauggagugaagcuggaaagcaugggcgucuaccagauccucgccauuuauuccaccguggccucuagccugguucugcucgugucccugggggcuaucucuuuuuggaugugcagcaacggaucccuucaguguagaauuugcaucuga

SEQ ID NO: 201708 - RNA, 1701 nt, Artificial Sequence
  derived and/or modified CDS sequence (opt5) from hemagglutinin__InfluenzaA__AFO64835
augaaggccaaacugcucgugcugcuuugcgcuuucaccgccacauacgcggacacgaucuguauuggcuaucacgcuaacaauagcaccgauacagucgacaccguucuggagaagaacgugacagugacccauuccgucaaucuccuggaagauucucacaacgggaaacuuugcagacugaagggaaucgcuccccuccagcugggcaauuguagcguggccggguggauucugggaaacccugagugcgaaucccucuuuucuaaagagagcugguccuacaucgccgaaacaccggaccccgagaauggcaccuguuauccuggguacuucgccgauuaugaggaacugcgggagcaacuuucuagcguuuccagcuuugaacgcuucgagauuuuucccaaggagucuuccuggccuaaccauacggugaccaagggagucacagcuagcugcucucacaauggcaaauccagcuucuacagaaaccugcucuggcugaccaagaaaaauggccuuuaucccaaccugucuaaguccuacgugaauaacaaagaaaaggagguucucgugcuguggggaguccaucacccuagcaauaucggggaacagcgggccaucuaccacacagagaacgcguauguguccguggucucuagccauuacucccgcagauuuaccccggaaauugccaagcggcccaaaguucgcgaccaggagggcagaaucaacuauuacuggacgcugcucgagccuggggauacaauuaucuucgaagcuaauggaaaccugauugcccccugguaugcuuuugcccuuagccggggcuucgggucuggaaucauuaccuccaaugcgagcauggacgagugugaugccaagugccagacaccucaaggcgcuaucaacucuagccugcccuuucagaaugugcacccggugaccaucggcgaauguccuaaauacguccgcuccaccaagcucagaauggugacagggcugcggaacauucccucuauccagagccgcggacuuuucggcgccauugcuggguuuaucgagggaggcuggacggggaugauugacggaugguauggcuaccaucaccagaaugaacaaggcuccggguacgccgccgaucagaaaagcacccagaacgcuaucaauggaaucacaaacaagguuaauucugugauugagaaaaugaacacccaguucacagcggucggcaaggaguucaauaagcuggaaagacggauggagaaccucaauaaaaagguggacgauggguuucuggacaucuggaccuauaacgccgaacugcucguucugcuugagaacgaacgcacgcuggacuuccacgauuccaaugugaaaaaccucuacgagaaggucaaaaaucaacugaagaacaaugcuaaggagauuggaaacggcugcuuugaguucuaucauaaauguaauaacgaaugcauggaaagcgugaagaaugggacauacgacuauccuaaauacucugaggaguccaaacuuaacagagaaaagaucgauggcgucaagcuggagagcaugggaguguaucagauucucgccaucuacuccaccguugccucuagccuggugcugcucgucucccugggcgcuaucucuuuuuggaugugcagcaaugggucccuucagugucggauuugcaucuga

SEQ ID NO: 201709 - RNA, 1701 nt, Artificial Sequence
  derived and/or modified CDS sequence (opt5) from hemagglutinin__InfluenzaA__AFO64846
augaaggccaaacugcucgugcugcuuugcgcuuucaccgccacauacgcggacacgaucuguauuggcuaucacgcuaacaauagcaccgauacagucgacaccguucuggagaagaacgugacagugacccauuccgucaaucuccuggaagauucucacaacgggaaacuuugcagacugaagggaaucgcuccccuccagcugggcaauuguagcguggccggguggauucugggaaacccugagugcgaaucccucuuuacaaaagagucuuggagcuacaucgccgaaaccccgaaucccgagaacggcacguguuauccuggguacuucgccgacuaugaggaacugcgggagcaacuuuccucuguuagcuccuuugaacgcuucgagauuuuucccaaggagagcucuuggccuaaucauaccgugacaaagggagucaccgcuuccugcagccacaacggcaaaucuuccuucuacagaaaucugcucuggcugacagaaaagaacggccuuuaucccaaucugagcaaaucuuacgugaacaauaaggagaaagaaguucucgugcuguggggaguccaucacccuuccaacaugggggaucagcgggccaucuaccacaccgagaacgcguaugugagcguggucuccucucauuacagccgcagauuuacgccggaaaucgccaagcggcccaagguucgcggccaggaggggagaauuaauuauuacuggacacugcucgagccuggagacaccaucauuuucgaagcuaacggcaaucugaucgcuccccgguaugccuuugcccuuucccgcggguucggaagcggcauuaucacaucuaacgcguccauggaugagugugacgccaaaugccagaccccucaaggcgcuauuaauagcucucugcccuuucagaacgugcacccggugaccaucggggaauguccuaaguacgucagaagcacaaaacuccggauggugacgggacugcgcaauauccccuccauucagucuagaggccuuuucggggccaucgcuggauuuauugagggcggguggaccggaaugaucgauggcugguauggcuaccaucaccagaacgaacaagggagcggauacgccgccgaccagaaguccacacagaaugcuauuaacggcaucaccaauaaaguuaacagcgugaucgagaagaugaauacacaguucaccgcggucgggaaagaguucaacaagcuggaacggcgcauggagaaucucaacaagaaaguggaugacggauuucuggauauuuggacguauaacgccgaacugcucguucugcuugagaaugaaagaacacuggacuuccacgacucuaacgugaagaaucucuacgagaaagucaagucccaacugaaaaacaaugcuaaggagaucggcaacgggugcuuugaguucuaucauaaguguaauaacgaaugcauggaaagcgugaaaaauggcaccuacgauuauccuaaguacucugaggaguccaaacuuaaccgggaaaagauugacggagucaaacuggagagcaugggcguguaucagauccucgccauuuacuccaccguugccucuagccuggugcugcucgucucccugggggcuaucucuuuuuggaugugcagcaauggaucccuucaguguagaaucugcauuuga

SEQ ID NO: 201710 - RNA, 1701 nt, Artificial Sequence
  derived and/or modified CDS sequence (opt5) from hemagglutinin__InfluenzaA__AFO64857
augaaggccaaacugcucgugcugcuuugcgcuuucaccgccacauacgcggacacgaucuguauuggcuaucacgcuaacaauagcaccgauacagucgacaccguucuggagaagaacgugacagugacccauuccgucaaucuccuggaagauucucacaacgggaaacuuugcagacugaagggaacagcuccccuccagcugggcaauuguagcguggccggguggauccugggaaacccugagugcgaaucccucuuuucuaaagagagcugguccuacauugccgaaaccccgaaucccgagaacggcacguguuauccuggguacuucgccgacuaugaggaacugcgggagcaacuuucuagcguuuccagcuuugaacgcuucgagaucuuucccaaggagucuuccuggccuaaucauaccgugacaaagggagucaccgcuagcugcucucacaacggcaaauccagcuucuacaagaaucugcucuggcugacagagaaaaacggccuuuaucccaaucugucuaaguccuacgugaacaauaaagagaaggaaguucucgugcuguggggaguccaucacccuagcaacauuggggaucagagagccaucuaccacaccgagaacgcguauguguccguggucucuagccauuacucccggcgcuuuacgccggaaaucgccaagagacccaaaguucggggccaggaggggcgcauuaauuauuacuggacacugcucgagccuggagacaccaucauuuucgaagcuaacggcaaucugaucgcccccugguaugcuuuugcccuuagcagaggguucggaucuggcauuaucacauccaccgcgagcaugggcgagugugaugccaagugccagaccccucaaggggcuauuaacucuagccugcccuuucagaaugugcacccggugacaaucggagaauguccuaaauacguccgguccacgaagcuccgcauggugaccggccugagaaacauccccucuauucagagccgggggcuuuucggagccaucgcuggcuuuauugaagggggauggacaggcaugaucgacggcugguauggguaccaucaccagaaugaacaaggauccggcuacgccgccgaucagaaaagcacccagaacgcuauugacgggaucacaaauaagguuaacucugugaucgagaaaaugaauacccaguucacggcggucggaaaggaguucaacaagcuggaacgcagaauggagaaucucaacaaaaagguggaugacggcuuucuggauauuuggacauauaaugccgaacugcucguucugcuugagaacgggcggacccuggacuuccacgacuccaacgugaaaaaucucuacgaaaaggucaaaaaccaacugaagaauaacgcuaaggagaucggcaauggaugcuuugaguucuaucauaaauguaacaaugaaugcauggagagcgugaagaacggcaccuacgauuauccuaaauacucugaagaguccaaacuuaaucgcgagaagauugacggggucaagcuggaaagcaugggaguguaucagauccucgccauuuacuccacaguugccucuagccuggugcugcucgucucccugggcgcuaucucuuuuuggaugugcagcaacgggucccuucaguguagaaucugcauuuga

SEQ ID NO: 201711 - RNA, 1701 nt, Artificial Sequence
  derived and/or modified CDS sequence (opt5) from hemagglutinin__InfluenzaA__AFO64868
augaaggugaaacugcucguccugcuuugcgccuucaccgcuacauacgccgacacgaucuguauuggcuaucacgcgaacaauagcaccgauacaguugacaccgugcuggagaagaacgugacagucacccauuccgugaaucuccuggaagauucucacaacgggaaacuuugcagacugaagggaacagcuccccuccagcugggcaauuguagcguugccggguggauccugggaaacccugagugcgaaucccucuuuucuaaagagagcugguccuacauugccgaaaccccgaaucccgagaacggcacguguuauccugggugcuucgcugacuacgaggaacugcgggagcaacuuucuagcguguccagcuuugaacgcuucgagaucuuucccaaggagucuuccuggccuaaucauaccgucacaaagggagugaccgccagcuguucucacaacggcaaauccagcuucuauaagaaucugcucuggcugacagaaaagaacggccuuuaccccaaucugucuaaguccuauguuaacaauaaagagaaggaagugcucguccuguggggagugcaucacccuagcaacauuagagaucagcgggcuaucuaccacaccgagaacgccuacguguccgucguuucuagccauuauucccgcagauuuacgccggaaaucgcgaagcggcccaaagugcgcgggcaggagggcagaauuaauuacuauuggacacugcucgagccuggggacaccaucauuuucgaagccaacggaaaucugaucgcucccugguacgccuuugcucuuagccggggcuucgggucuggaauuaucacauccaacgccagcaugggcgagugcgaugcgaagugucagaccccucaaggcgccauuaauucuagccugcccuuucagaacgugcacccggucaccaucggggaaugcccuaaauaugugcgcuccacaaagcucagaaugguuacgggacugcggaauauccccucuauucagagccgcggccuuuucggggcuaucgccggauuuauugagggcggguggaccggaaugaucgacggcugguacggcuaucaucaccagaacgaacaaggguccggauacgcugccgaucagaaaagcacacagaaugccauugacggcaucaccaacaaggucaauucugugaucgagaaaaugaacacacaguucaccgcuguggggaaggaguucaauaagcuggaaagacggauggagaaccucaauaaaaagguugaugacggauuucuggauauuuggacguacaacgcggaacugcucgugcugcuugagaacgaacgcacacuggacuuccacgacuccaaugucaaaaaccucuaugagaaggugaaaaaucaacugaagaacaaugccaaggagaucggcaacggguguuuugaguucuaccauaaaugcaauaacgaaugcauggaaagcgucaagaauggcaccuaugauuacccuaaauauucugaggaguccaaacuuaacagagagaaaauugacggagugaagcuggaaagcaugggcguuuaccagauccucgcuauuuauuccaccguggccucuagccugguccugcucgugucccugggggccaucucuuuuuggauguguagcaauggaucccuucagugccggaucuguauuuga

SEQ ID NO: 201712 - RNA, 1698 nt, Artificial Sequence
  derived and/or modified CDS sequence (opt5) from hemagglutinin__InfluenzaA__AFO64879
augaaggccaaacugcucgugcugcuuugcaccuucacagcuacguacgccgacaccaucuguauuggcuaucacgcgaacaauagcacagauaccgucgacacaguucuggagaagaacgugaccgugacacauuccgucaaucuccuggaagauucucacaacgggaaacuuugccugcucaagggaaucgcuccccugcagcugggcaauuguagcguggccggguggauucucggaaacccugagugcgaaucccugaucuuuaaagagucuuggagcuacauuguugaaaccccgaaucccgagaacggcacguguuauccuggguacuucgccgacuaugaggaacuuagagagcaacuguccucugugagcuccuuugaacgguucgagaucuuucccaaggagagcucuuggccuaaucauaccgucacaggaguguccgcuagcugcucucacaacggcaaguccagcuucuaccgcaaucuccuguggcuuaccgagaaaaacggccuguaucccaaucucucuaaguccuacguuaacaauaaagaaaaggaagugcugguccuguggggagugcaucacccuagcaacaucagagaucagcgggccauuuaccacacagagaacgcuuauguguccgucguuucuagccauuacucccgcagauuuaccccggaaaucgccaaacggcccaaggugcgcgggcaggagggcagaauuaauuauuacuggacgcuccuggagccuggggacacaaucauuuucgaagcgaacggaaaucuuaucgcccccugguaugcuuuugcccugagccggggcuucgggucuggaauuaucaccuccaacgcuccuauggaugagugugacgccaagugccagacaccccaaggcgcgaucaauagcucucucccguuucagaacgugcacccugucaccauuggcgaaugucccaaauacgugcgcagcgccaagcugagaaugguuaccgggcuucggaauaucccuuccauucagucucgcggacuguucggcgcuaucgccggguuuauugagggaggcuggacagggaugaucgauggaugguauggcuaccaucaccagaacgaacaaggcagcggguacgcugccgaccagaaauccacgcagaaugccaucaacggaauuaccaauaaggugaacagcgucaucgagaaaaugaauacacaguucaccgcugugggcaaggaguucaacaaacucgaaagacggauggagaaucugaacaagaagguugaugacggguuucuggauauuuggacauauaacgcggaacuccuggugcuucuggagaaugaacgcacccucgacuuccacgacucuaacgucaaaaaucuguacgagaaggugaaaucccaacuuaagaacaaugccaaagagaucggaaacggcugcuuugaguucuaucauaaguguaauaacgaaugcauggaaagcgucaagaaugggacguacgauuaucccaaauacucugaggaguccaagcugaacagagagaaaauugacggcgugaagcucgaaagcaugggaguuuaucagauccuggcuaucuacuccacaguggccucuagccugguccuccuggugucccuuggcgccauuucuuuuuggaugugcagcaaugggucccugcagugucggaucugcauuuga

SEQ ID NO: 201713 - RNA, 1698 nt, Artificial Sequence
  derived and/or modified CDS sequence (opt5) from hemagglutinin__InfluenzaA__AFO64890
augaaggccaaacugcucgugcugcuuugcaccuucacagcuacguacgccgacaccaucuguauuggcuaucacgcgaacaauagcacagauaccgucgacacaguucuggagaagaacgugaccgugacacauuccgucaaucuccuggaagauucucacaacgggaaacuuugccugcucaagggaaucgcuccccugcagcugggcaauuguagcguggccggguggauucucggaaacccugagugcgaaucccugaucucuaaagagagcugguccuacauuguugaaaccccgaaucccgagaacggcacguguuauccuggguacuuugccgacuaugaggaacuuagagagcaacugucuagcguguccagcuucgaacgguuugagaucuuccccaaggagucuuccuggccuaaucauaccgucacaggagugagcgcuucuugcucccacaacggcaagagcucuuuuuaccgcaaucuccuguggcuuaccgagaaaaacggccuguaucccaaucucuccaagagcuacguuaacaauaaagaaaaggaagugcugguccuguggggagugcaucacccuuccaacaucagagaucagcgggccauuuaccacacagagaacgcuuaugugucugucguuagcucccauuacagccgcagauucaccccggaaaucgccaaacggcccaaggugcgcgggcaggagggcagaauuaauuauuacuggacgcuccuggagccuggggacacaaucauuuuugaagcgaacggaaaucuuaucgcccccugguaugcuuucgcccugucucggggcuuuggguccggaauuaucaccagcaacgcuccuauggaugagugugacgugaagugccagacaccccaaggcgccaucaauucuagccucccguuccagaacguccacccugugaccauuggcgaaugucccaaauacguucgcuccgcgaagcugagaauggugaccgggcuucggaauaucccuucuauucagagccgcggacuguuuggcgccaucgcuggguucauugagggaggcuggacagggaugaucgauggaugguauggcuaccaucaccagaacgaacaaggcuccggguacgccgcugaccagaaaagcacgcagaaugccaucaacggaauuaccaauaaggucaacucugugaucgagaaaaugaauacacaguuuaccgccguuggcaaggaguucaacaaacucgaaagacggauggagaaucugaacaagaagguggaugacggguuccuggauauuuggacauauaacgcugaacuccugguccuucuggagaaugaacgcacccucgacuuucacgacuccaacgugaaaaaucuguacgagaaggucaaaagccaacuuaagaacaaugcgaaagagaucggaaacggcugcuucgaauuuuaucauaaguguaauaacgagugcauggaaucugugaagaaugggacguacgauuaucccaaauacuccgaggagagcaagcugaacagagagaaaauugacggcguuaagcucgaauccaugggaguguaucagauccuggccaucuacucuacagucgcuagcucccuggugcuccugguuucucuuggcgccauuagcuucuggaugugcuccaaugggagccugcagugucggaucugcauuuga

SEQ ID NO: 201714 - RNA, 1701 nt, Artificial Sequence
  derived and/or modified CDS sequence (opt5) from hemagglutinin__InfluenzaA__AFO64901
augaaggccaaacugcucgugcugcuuugcgcuuucaccgccacauacgcggacacgaucuguauuggcuaucacgcuaacaauagcaccgauacagucgacaccguucuggagaagaacgugacagugacccauuccgucaaucuccuggaagauucucacaacgggaaacuuugcagacugaagggaacagcuccccuccagcugggcaauuguagcaucgccggguggauucugggaaacccugagugcgaaucccucuuuucuaaagagagcugguccuacaucgccgaaaccccgaaucccgagaacggcacguguuauccuggguacuucgccgacuaugaggaacugcgggagcaacuuucuagcguguccagcuuugaacgcuucgagauuuuucccaaggagucuuccuggccuaaucauaccguuacaaagggagugaccgcuagcugcucucacaacggcaaauccagcuucuacaagaaucugcucuggcugacagaaaagaacggccuuuaucccaaucugucuaaguccuacgucaacaauaaaaagaaggaggugcucguucuguggggagugcaucacccuagcaacaucggggaucagagagccaucuaccacaccgaaaacgcguaugucuccguggugucuagccauuacucccggcgcuuuacgccggagauugccaaaagacccaagguccggaaucaggaaggccgcaucaacuauuacuggacacugcucgagccuggggacaccauuaucuucgaggcuaauggaaaccugauugcccccugguaugcuuuugcccuuagcagaggcuucgaaucugggaucauuacauccaaugcgagcaugggagagugugaugccaaaugccagaccccucaaggcgcuaucaacucuagccugcccuuucagaauguucacccggugaccaucggcgaauguccuaaguacgugcgguccacaaaacuccgcauggucacggggcugagaaacauucccucuauccagagccggggacuuuucggcgccauugcuggguuuaucgagggaggcuggaccgggaugauugacggaugguauggcuaccaucaccagaaugaacaaggcuccggguacgccgccgaucaaaagagcacacagaacgcuaucaauggaaucaccaacaaaguuaauucuauuaucgagaagaugaacacacaguucaccgcggugggcaaggaguucaauaaacuggaacgcagaauggagaaccucaacaagaaaguggacgauggguuucuggacauuuggacguauaaugccgaacugcucguccugcuugagaacgaacggacacuggauuuccacgacuccaaugugaagaaccucuacgagaaaguuaagaaucagcugaagaacaaugcuaaagagaucggaaacggcugcuuugaguucuaucauaaguguaauaacgaaugcauggaaagcgugaaaaaugggaccuacgacuauccuaaguacucuaaagaguccaaacuuaaccgcgagaagauugauggcgucaaacuggaaagcaugggaguguaucagauccucgccaucuacuccaccgucgccucuagccuggugcugcucguuucccugggcgcuauuucuuuuuggaugugcagcaaugggucccuucaguguagaaucugcauuuga

SEQ ID NO: 201715 - RNA, 1698 nt, Artificial Sequence
  derived and/or modified CDS sequence (opt5) from hemagglutinin__InfluenzaA__AFO65016
augaaggccaaacugcucgugcugcuuugcaccuucacagcuacguacgccgacaccaucuguauuggcuaucacgcgaacaauagcacagauaccgucgacacaguucuggagaagaacgugaccgugacacauuccgucaaucuccuggaagauucucacaacgggaaacuuugccugcucaagggaaucgcuccccugcagcugggcaauuguagcguggccggguggauucucggaaacccugagugcgaaucccugaucucuaaagagagcugguccuacauuguugaaaccccgaaucccgagaacggcacguguuauccuggguacuuugccgacuaugaggaacuuagagagcaacugucuagcguguccagcuucgaacgguuugagaucuuccccaaggagucuuccuggccuaaucauaccgucacaggagugagcgcuucuugcucccacaacggcaagagcucuuuuuaccgcaaucuccuguggcuuaccaaaaagaacggccuguaucccaaucucuccaaaagcuacguuaacaauaaggaaaaagaggugcugguccuguggggagugcaucacccuuccaacaucggggaucagagaacaauuuaccacaccgaaaacgccuaugugucugucguuagcucccauuacagccggcgcuucacgccggagaucgcuaagagacccaaggugcgggaccaggaaggccgcauuaauuauuacuggacacuccuggagccuggggauaccaucauuuuugaggccaacggaaaucuuaucgcgcccugguaugccuucgcucugucuagaggcuuuggguccggaauuaucacaagcaacgccccuauggacgaaugugaugcuaaaugccagacaccccaaggcgccaucaauucuagccucccguuccagaacgugcacccuauuaccaucggcgagugucccaaguacguccgguccgcgaaacugcgcauggugaccgggcuuagaaauauuccuucuauccagagccggggacuguuuggcgccauugcuggguucaucgaaggaggcuggacggggaugaucgacggaugguauggcuaccaucaccagaacgagcaaggcuccggguacgccgcugaucaaaagagcacccagaaugccauuaacggaaucacaaauaaaguuaacucugugauugaaaagaugaauacccaguuuacagccgucggcaaagaguucaacaaucucgagcgcagaauggaaaaccugaacaagaagguggacgauggguuccuggacaucuggaccuauaaugcugagcuccugguucuucuggaaaacgagcggacgcucgacuuucacgauuccaaugugaaaaaccuguacgaaaaggucaaaagccagcuuaagaauaacgcgaaagagauuggaaauggcugcuucgaguuuuaucauaaguguaacaaugaaugcauggagucugugaagaacgggacauacgacuaucccaaauacuccgaagagagcaagcugaaucgcgagaaaaucgauggcgucaagcucgaauccaugggaguguaucagauccuggccauuuacucuaccguugcuagcucccuggugcuccuggucucucuuggcgccaucagcuucuggaugugcuccaacgggagccugcaguguagaauuugcaucuga

SEQ ID NO: 201716 - RNA, 1698 nt, Artificial Sequence; identical to SEQ ID NO: 194187
  derived and/or modified CDS sequence (opt5) from hemagglutinin__InfluenzaA__AFO65027

SEQ ID NO: 201717 - RNA, 1698 nt, Artificial Sequence
  derived and/or modified CDS sequence (opt5) from hemagglutinin__InfluenzaA__AFO65038
augaaggccaaacugcucgugcugcuuugcaccuucacagcuacguacgccgacaccaucuguauuggcuaucacgcgaacaauagcacagauaccgucgacacaguucuggagaagaacgugaccgugacacauuccgucaaucuccuggaagauucucacaacgggaaacuuugccugcucaagggaaucgcuccccugcagcugggcaauuguagcguggccggguggauucucggaaacccugagugcgaacugcuuaucuccaaagagucuuggagcuacauuguugaaaccccgaaucccgagaacggcacguguuauccuggguacuuugccgacuaugaggaacugagagagcaacucuccucugugagcuccuucgaacgguuugagaucuuccccaaggagagcucuuggccuaaucauaccgucacaggaguguccgcuagcugcucucacaacggcaaguccagcuuuuaccgcaaucugcuuuggcugaccggcaaaaacgggcucuaucccaaucugucuauguccuacguuaacaauaaggaaaaagaggugcugguccucuggggagugcaucacccuccgaacaucggcaaccagagagcccuguaccacacagaaaaugcuuaugugagcgucguuuccucucauuacagccggcgcuucacccccgagauugccaagagaccuaaagugcgggaucaggaagggcgcaucaacuauuacuggacgcuucuggagcccggagacacaauuaucuuugaggcgaauggcaaccucauugccccuugguaugcuuucgcccuguccagaggguuuggaagcggcaucauuaccucuaaugcucccauggaugaaugugacgccaagugccagacaccgcaaggcgcgaucaacuccagccuuccuuuccagaaugugcaccccgucaccaucggggaguguccuaaguacgugcggucugccaaacugcgcaugguuaccggacucagaaacauucccagcauccagucccggggccuguuuggggcuauugccggauucaucgaaggcggguggacaggaaugguggauggcugguauggcuaccaucaccagaaugagcaagggucuggauacgcugccgaccaaaagagcacgcagaacgccauuaauggcaucaccaacaaagucaauuccgugaucgaaaagaugaacacacaguuuaccgcuguugggaaagaguucaauaagcuggagcgcagaauggaaaaccucaacaaaaagguggaugacggauuccuggauauuuggacauauaaugcggagcuucugguccuccuggaaaacgagcggacccuugacuuucacgacagcaaugugaagaaccuguacgaaaaagucaagucucagcucaaaaauaacgccaaggagaucggcaaugggugcuucgaguuuuaucauaaauguaacaaugaaugcauggaguccgugaagaacggcacguacgauuaucccaaguacagcgaagagucuaaacugaaucgcgagaagauugacggaguuaaacuggaauccaugggcguguaucagauccucgcuauuuacagcacagucgccuccucucuggugcuucugguuagccucggggccaucuccuucuggaugugcucuaacggaagccugcaguguagaaucugcauuuga

SEQ ID NO: 201718 - RNA, 1698 nt, Artificial Sequence
  derived and/or modified CDS sequence (opt5) from hemagglutinin__InfluenzaA__AFO66136
augaaggugaaacugcucguccugcuuugcaccuucacagccacguacgcugacaccaucuguauuggcuaucacgccaacaauagcacagauaccguugacacagugcuggagaagaacgugaccgucacacauuccgugaaucuccuggaagauucucacaacgggaaacuuugccugcucaagggaaucgcgccccugcagcugggcaauuguagcguugcuggguggauucucggaaacccugagugcgaacugcuuaucuccaaagagucuuggagcuacauuguggaaaccccgaaucccgagaacggcacguguuauccuggguacuuugccgacuaugaggaacugagagagcaacucuccucugucagcuccuucgaacgguuugagaucuuccccaaggagagcucuuggccuaaucauaccgugacaggaguuuccgccagcugcucucacaacggcaaguccagcuuuuaccgcaaucugcuuuggcugaccggcaaaaacgggcucuaucccaaucugucuaaguccuacgcuaacaauaaagaaaaggaggugcugguccucuggggagugcaucacccuccgaacaucggcaaccagagagcccuguaccacacagaaaaugcuuaugugagcgucguuuccucucauuacagccggcgcuucacccccgagauugccaaaagaccuaaggugcgggaucaggaagggcgcaucaacuauuacuggacgcuucuggagcccggagacacaauuaucuuugaggcgaauggcaaccucauugccccuagauaugcuuucgcccugucccggggguuuggaagcggcaucauuaccucuaaugcucccauggaugaaugugacgccaagugccagacaccgcaaggcgcgaucaacuccagccuuccuuuccagaaugugcaccccgucaccaucggggaguguccuaaauacgugcgcucugccaagcugagaaugguuaccggacuccggaacauucccagcauccagucccgcggccuguuuggggcuauugccggauucaucgaaggcggguggacaggaaugguggauggcugguauggcuaccaucaccagaaugagcaagggucuggauacgcugccgaccagaaaagcacgcagaacgccauuaauggcaucaccaacaaggucaauuccgugaucgaaaagaugaacacacaguuuaccgcuguugggaaagaguucaauaaacuggagagacggauggaaaaccucaacaagaagguggaugacggauuccuggauauuuggacauauaaugcggagcuucugguccuccuggaaaacgagcgcacccuugacuuucacgacagcaaugugaaaaaccuguacgaaaaggucaaaucucaacucaagaauaacgccaaagagaucggcaaugggugcuucgaguuuuaucauaaguguaacaaugaaugcauggaguccgugaagaacggcacguacgauuaucccaaauacagcgaagagucuaagcugaauagagagaaaauugacggaguuaagcuggaauccaugggcguguaucagauccucgcuauuuacagcacagucgccuccucucuggugcuucugguuagccucggggccaucuccuucuggaugugcucuaacggaagccugcagugucggaucugcauuuga

SEQ ID NO: 201719 - RNA, 1701 nt, Artificial Sequence
  derived and/or modified CDS sequence (opt5) from hemagglutinin__InfluenzaA__AFO66147
augaaggccaaacugcucgugcugcuuugcgcuuucaccacaacguacgccgacaccaucuguauuggcuaucacgcgaacaauagcacagauaccgucgacacaguucuggagaagaacgugaccgugacacauuccgucaaucuccuggaagauucucacaacgggaaacuuugcagacugaagggaaccgcuccccuccagcugggcaauuguagcaucgccggguggauucugggaaacccugagugcgaaucccucuuuucuaaagagagcugguccuacaucgccgaaacgccgaaucccaagaacggcaccuguuauccuggguacuucgcugacuaugaggagcugcgggaacaacuuucuagcguguccagcuuugagcgcuucgaaauuuuucccaaggauucuuccuggccuaaucauacaguuaccaaaggagugacagccagcugcucucacaacggcaaguccagcuucuacaaaaaucugcucuggcugaccggcaagaacgggcuuuaucccaaucugucuaaauccuacgucaacaagaagggaaaagaggugcucguucuguggggcgugcaucacccuagcaauaugggggaccagagagcuaucuaccacaaggagaacgccuaugucuccgugcugucuagccauuacucccggcgcuuuacgccggaaaucgcgaaaagacccaaggugcgggaucaggagggacgcauuaacuauuacuggacacuccuggaaccuggcgacaccaucauuuucgaggccaaugggaaccuuaucgcucccugguaugccuuugcucugagcagaggauucggcucuggcauuaucauuuccaaugccagcaugggggaaugugaugcgaaaugccagacaccucaaggagccaucaacucuagccuccccuuucagaauguccacccgguuaccaucggcgaguguccuaaguacgugcgguccaccaaacugcgcauggugacagggcuuagaaacguccccucuauucagagccggggacuguucggcgcuaucgccggguuuauugagggaggcuggacgggcaugaucgacgggugguauggauaccaucaccagaaugaacaaggcuccggguacgcugccgaucagaagucuacccagaacgccauuaauggaaucacaaacaaggugaauagcaucauugagaaaaugaacacccaguucacagcuguuggcaaggaguucaauaaacucgaacgcagaauggaaaaccugaauaagaaaguggacgauggguuucuggacaucuggaccuauaacgcggagcuccugguccuucuggagaacgaacggacgcucgacuuccacgauuccaaugugaagaaccuguacgagaagguuaaaaaucaacuuaagaacaaugccaaagaaauuggcaacggaugcuuugaguucuaucauaaguguaauaacgaaugcauggagagcgugaaaaauggcacauacgacuauccuaaguacucuaaggaguccaaacugaaccgcgaaaagaucgauggggucaaacucgagagcaugggaguguaucagauucuggcuaucuacuccaccgucgccucuagccuggugcuccugguuucccuuggcgccaucucuuuuuggaugugcagcaaugggucccugcaguguagaauuugcaucuga

SEQ ID NO: 201720 - RNA, 1698 nt, Artificial Sequence
  derived and/or modified CDS sequence (opt5) from hemagglutinin__InfluenzaA__AFO66158
augaaggccaaacugcucgugcugcuuugcaccuucacagcuacguacgccgacaccaucuguauuggcuaucacgcgaacaauagcacagauaccgucgacacaguucuggagaagaacgugaccgugacacauuccgucaaucuccuggaagauucucacaacgggaaacuuugccugcucaagggaaucgcuccccugcagcugggcaauuguagcguggccggguggauucucggaaacccugagugcgaacugcuuaucuccaaaggcucuuggagcuacauuguugagaccccgaaucccgaaaacgggacguguuauccuggauacuuugccgacuaugaggagcugagagaacaacucuccucugugagcuccuucgagcgguuugaaaucuuccccaagggcagcucuuggccuaaucauaccgucacaggcguguccgcuagcugcucucacaacgggaaguccagcuuuuaccgcaaucugcuuuggcugaccgggaaaaacggccucuaucccaaucugucuauguccuacguuaacaauaaggagaaagaggugcugguccucuggggagugcaucacccuccgaacaucggaaaccagagagcccuguaccacacagaaaaugcuuaugugagcgucguuuccucucauuacagccggcgcuucacccccgagauugccaagagaccuaaagugcgggaucaggaaggccgcaucaacuauuacuggacgcuucuggagcccggggacacaauuaucuuugaagcgaauggaaaccucauugccccuugguaugcuuucgcccuguccagaggcuuuggcagcgggaucauuaccucuaaugcucccaugggagagugugaugccaagugccagacaccgcaaggcgcgaucaacuccagccuuccuuuccagaaugugcaccccgucaccaucggggaguguccuaaguacgugcggucugccaaacugcgcaugguuaccggacucagaaacauucccagcauccagucccggggccuguuuggggcuauugccggauucaucgaaggcggcuggacagggaugguggacggaugguauggcuaccaucaccagaaugagcaagggucuggauacgcugccgaucaaaagagcacgcagaacgccauuaauggcaucaccaacaaagucaauuccgugaucgaaaagaugaacacacaguuuaccgcuguugggaaagaguucaauaagcuggaacgcagaauggagaaccucaacaaaaagguggacgauggcuuccuggacauuuggacauauaaugcggagcuucugguccuccuggaaaacgagcggacccuugauuuucacgacagcaaugugaagaaccuguacgaaaaagucaagucucagcucaaaaauaacgccaaggagaucggaaauggcugcuucgaauuuuaucauaaauguaacaaugagugcauggaguccgugaagaacgggacguacgacuaucccaaguacagcgaagagucuaaacugaaucgcgaaaagauugauggaguuaaacuggaguccaugggcguguaucagauccucgcuauuuacagcacagucgccuccucucuggugcuucugguuagccucggggccaucuccuucuggaugugcucuaacggaagccugcaguguagaaucugcauuuga

SEQ ID NO: 201721 - RNA, 1698 nt, Artificial Sequence
  derived and/or modified CDS sequence (opt5) from hemagglutinin__InfluenzaA__AFO66169
augaaggugaaacugcucguccugcuuugcaccuucacagccacguacgcugacaccaucuguauuggcuaucacgccaacaauagcacagauaccguugacacagugcuggagaagaacgugaccgucacacauuccgugaaucuccuggaagauucucacaacgggaaacuuugccugcucaagggaaucgcgccccugcagcugggcaauuguagcguugcuggguggauucucggaaacccugagugcgaacugcuuaucuccaaagagucuuggagcuacauuguggaaaccuccaauccggagaacggcacguguuaucccggguacuuuaccgacuaugaggaacugagagagcaacucucuagcgucuccagcuucgaacgguuugagaucuucccuaaggagucuuccuggcccaaucauacagugaccggaguuagcgccucuugcucccacaacggcaagagcucuuuuuacaaaaaucugcuuuggcugacaggcaagaacgggcucuauccuaaucuguccaaaagcuacgccaacaauaaggaaaaagaggugcugguccucuggggagugcaucaucccccuaacaucggcgaucagcgcgcucuguaccacaccgaaaacgccuauguguccgucguuucuagccacuacuccagacgguucacgccggagauugcuaagcgccccaaggugagagaccaggaagggcggaucaauuauuacuggacacuucuggagccuggagauaccauuaucuuugaggccaacggcaaucucauugcgccccgcuaugccuucgcucugagcagaggguuuggaucuggcaucauuacauccaacgccccuauggacgaaugugaugcuaaaugccagacaccccacggcgccaucaauagcucucuuccguuccaaaacgugcauccugucaccaucggggagugucccaaguacgugcggagcgcgaaacugcgcaugguuaccggacucagaaauauuccuuccauccagucucggggccuguuuggggccauugcuggauucaucgaaggcggguggacgggaaugguggacggcugguauggcuaccaccaccagaacgagcaggggagcggauacgccgcugaucaaaaguccacccagaaugccauuaacggcaucacaaauaaagucaacagcgugaucgaaaagaugaauacccaguuuacagccguugggaaagaguucaacaagcuggagcgcagaauggaaaaucucaacaagaaaguggacgauggauucauugacaucuggaccuauaacgcugagcugcuuguccugcucgaaaaugagcggacgcuggacuuucaugauucuaacgugaagaaucuuuacgaaaaagucaagucccagcugaaaaacaaugcgaaggagauuggcaacgggugcuucgaguuuuaucacaaguguaaugacgaaugcauggagagcgugaaaaacggcacauacgauuaucccaaguacucugaagaguccaaacucaaucgcgagaagaucgacggaguuaaacuggaaagcaugggcguguaucaaauucuggccaucuacuccaccgucgcuucuagccucgugcugcuuguuucccugggggccaucucuuucuggaugugcagcaacggaucccuccaguguagaauuugcaucuga

SEQ ID NO: 201722 - RNA, 1698 nt, Artificial Sequence
  derived and/or modified CDS sequence (opt5) from hemagglutinin__InfluenzaA__AFO66180
augaaggccaaacugcucgugcugcuuugcaccuucacagcuacguacgccgacaccaucuguauuggcuaucacgcgaacaauagcacagauaccgucgacacaguucuggagaagaacgugaccgugacacauuccgucaaucuccuggaagauucucacaacgggaaacuuugccugcucaagggaaucgcuccccugcagcugggcaauuguagcguggccggguggauucucggaaacccugagugcgaacugcuuaucuccaaagagucuuggagcuacauuguugaaaccccgaaucccgagaacggcacguguuauccuggguacuuugccgacuaugaggaacugagagagcaacucuccucugugagcuccuucgaacgguuugagaucuuccccaagggaagcucuuggccuaaucauaccgucacaggcguguccgcuagcugcucucacaacggcaaguccagcuuuuaccgcaaucugcuuuggcugaccgggaaaaacggacucuaucccaaucugucuauguccuacguuaacaauaaggagaaagaagugcugguccucuggggcgugcaucacccuccgaacaucggggaucagagagcccuguaccacacagagaacgcuuaugugagcgucguuuccucucauuacagccggcgcuucacccccgaaauugccaagagaccuaaagugcggaaucaggagggacgcaucaacuauuacuggacgcuucuggaacccggcgacacaauuaucuuugaggcgaaugggaaccucauugccccuugguaugcuuucgcccuguccagaggauuuggcagcggcaucauuaccucuaaugcucccaugggggagugugaugccaagugccagacaccgcaaggagcgaucaacuccagccuuccuuuccagaaugugcaccccgucaccaucggcgaauguccuaaguacgugcggucugccaaacugcgcaugguuaccgggcucagaaacauucccagcauccagucccggggacuguuuggcgcuauugccggguucaucgagggaggcuggacaggcaugguggacgggugguauggauaccaucaccagaaugaacaaggcucuggguacgcugccgaucaaaagagcacgcagaacgccauuaauggaaucaccaacaaagucaauuccgugaucgagaagaugaacacacaguuuaccgcuguuggcaaagaguucaauaagcuggaacgcagaauggagaaccucaacaaaaagguggacgauggguuccuggacauuuggacauauaaugcggaacuucugguccuccuggagaacgaacggacccuugauuuucacgacagcaaugugaagaaccuguacgagaaagucaagucucagcucaaaaauaacgccaaggaaaucggcaauggaugcuucgaguuuuaucauaaauguaacaaugagugcauggaauccgugaagaacggcacguacgacuaucccaaguacagcgaggaaucuaaacugaaucgcgagaagauugaugggguuaaacuggaguccaugggaguguaucagauccucgcuauuuacagcacagucgccuccucucuggugcuucugguuagccucggcgccaucuccuucuggaugugcucuaacgggagccugcaguguagaaucugcauuuga

SEQ ID NO: 201723 - RNA, 1698 nt, Artificial Sequence
  derived and/or modified CDS sequence (opt5) from hemagglutinin__InfluenzaA__AFO66191
augaaggccaaacugcucgugcugcuuugcaccuucacagcuacguacgccgacaccaucuguauuggcuaucacgcgaacaauagcacagauaccgucgacacaguucuggagaagaacgugaccgugacacauuccgucaaucuccuggaagauucucacaacgggaaacuuugccugcucaagggaaucgcuccccugcagcugggcaauuguagcguggccggguggauucucggaaacccugagugcgaacugcuuaucuccaaagagucuuggagcuacauuguugaaaccccgaaucccgagaacggcacguguuauccuggguacuuugccgacuaugaggaacugagagagcaacucuccucugugagcuccuucgaacgguuugagaucuuccccaagggaagcucuuggccuaaucauaccgucacaggcguguccgcuagcugcucucacaacggcaaguccagcuuuuaccgcaaucugcuuuggcugaccgggaaaaacggacucuaucccaaucugucuauguccuacguuaacaauaaggagaaagaagugcugguccucuggggcgugcaucacccuccgaacaucgggaaccagagagcccuguaccacacagagaaugcuuaugugagcgucguuuccucucauuacagccggcgcuucacccccgaaauugccaagagaccuaaagugcgggaucaggagggacgcaucaacuauuacuggacgcuucuggaacccggcgacacaauuaucuuugaggcgaaugggaaccucauugccccuugguaugcuuucgcccuguccagaggauuuggcagcggcaucauuaccucuaaugcucccauggaugagugugacgccaagugccagacaccgcaaggggcgaucaacuccagccuuccuuuccagaaugugcaccccgucaccaucggagaauguccuaaguacgugcggucugccaaacugcgcaugguuaccggccucagaaacauucccagcauccagucccgggggcuguuuggagcuauugccggcuucaucgaagggggauggacaggcaugguggauggcugguauggguaccaucaccagaaugaacaaggaucuggcuacgcugccgaccaaaagagcacgcagaacgccauuaaugggaucaccaacaaagucaauuccgugaucgagaagaugaacacacaguuuaccgcuguuggaaaagaguucaauaagcuggagcgcagaauggagaaccucaacaaaaagguggaugacggcuuccuggauauuuggacauauaaugcggaacuucugguccuccuggagaacgaacggacccuugacuuucacgacagcaaugugaagaaccuguacgagaaagucaagucucagcucaaaaauaacgccaaggaaaucgggaauggcugcuucgaguuuuaucauaaauguaacaaugagugcauggaauccgugaagaacggaacguacgauuaucccaaguacagcgaggaaucuaaacugaaucgcgagaagauugacggcguuaaacuggaguccauggggguguaucagauccucgcuauuuacagcacagucgccuccucucuggugcuucugguuagccucggagccaucuccuucuggaugugcucuaacggcagccugcaguguagaaucugcauuuga

SEQ ID NO: 201724 - RNA, 1698 nt, Artificial Sequence; identical to SEQ ID NO: 192584
  derived and/or modified CDS sequence (opt5) from hemagglutinin__InfluenzaA__AFO66202

SEQ ID NO: 201725 - RNA, 1698 nt, Artificial Sequence
  derived and/or modified CDS sequence (opt5) from hemagglutinin__InfluenzaA__AFO66213
augaaggugaaacugcucguccugcuuugcaccuucacagccacguacgcugacaccaucuguauuggcuaucacgccaacaauagcacagauaccguugacacagugcuggagaagaacgugaccgucacacauuccgugaaucuccuggaagauucucacaacgggaaacuuugccugcucaagggaaucgcgccccugcagcugggcaauuguagcguugcuggguggauucucggaaacccugagugcgaacugcuuaucuccaaagagucuuggagcuacauuguggaaaccccgaaucccgagaacggcacguguuauccuggguacuuugccgacuaugaggaacugagagagcaacucuccucugucagcuccuucgaacgguuugagaucuuccccaaggagagcucuuggccuaaucauaccgugacaggaguuuccgccagcugcucucacaacggcaaguccagcuuuuaccgcaaucugcuuuggcugaccggcaaaaacgggcucuaucccaaucugucuaaguccuacgcuaacaauaaaaagaaagaagugcugguccucuggggagugcaucacccuccgaacaucggcaaccagagagcccuguaccacacagagaaugcuuaugugagcgucguuuccucucauuacagccggcgcuucacccccgaaauugccaagagaccuaaggugcgggaucaggaggggcgcaucaacuauuacuggacgcuucuggaacccggagacacaauuaucuuugaggcgaauggcaaccucauugccccuagauaugcuuucgcccugucccggggguuuggaagcggcaucauuaccucuaaugcucccauggaugagugugacgccaaaugccagacaccgcaaggcgcgaucaacuccagccuuccuuuccagaaugugcaccccgucaccaucggggaauguccuaaguacgugcgcucugccaaacugagaaugguuaccggacuccggaacauucccagcauccagucccgcggccuguuuggggcuauugccggauucaucgagggcggguggacaggaaugguggauggcugguauggcuaccaucaccagaaugaacaagggucuggauacgcugccgaccaaaagagcacgcagaacgccauuaauggcaucaccaacaaagucaauuccgugaucgagaagaugaacacacaguuuaccgcuguugggaaagaguucaauaagcuggaaagacggauggagaaccucaacaagaaaguggaugacggauuccuggauauuuggacauauaaugcggaacuucugguccuccuggagaacgaacgcacccuugacuuucacgacagcaaugugaagaaccuguacgagaaagucaagucucagcucaaaaauaacgccaaggaaaucggcaaugggugcuucgaguuuuaucauaaguguaacgaugagugcauggaauccgugaaaaauggcacguacgacuaucccaaguacagcgaggaaucuaaacugaacagagagaagauugauggaguuaaacuggaguccaugggcguguaucagauccucgcuauuuacagcacagucgccuccucucuggugcuucugguuagccucggggccaucuccuucuggaugugcucuaauggaagccugcagugucggaucugcauuuga

SEQ ID NO: 201726 - RNA, 1698 nt, Artificial Sequence
  derived and/or modified CDS sequence (opt5) from hemagglutinin__InfluenzaA__AFO66224
augaaggugaaacugcucguccugcuuugcaccuucacagccacguacgcugacaccaucuguauuggcuaucacgccaacaauagcacagauaccguugacacagugcuggagaagaacgugaccgucacacauuccgugaaucuccuggaagauucucacaacgggaaacuuugccugcucaagggaaucgcgccccugcagcugggcaauuguagcguugcuggguggauucucggaaacccugagugcgaacugcuuaucuccaaagagucuuggagcuacauuguggaaaccccgaaucccgagaacggcacguguuauccuggguacuuugccgacuaugaggaacugagagagcaacucuccucugucagcuccuucgaacgguuugagaucuuccccaaggagagcucuuggccuaaucauaccgugacaggaguuuccgccagcugcucucacaacggcaaguccagcuuuuaccgcaaucugcuuuggcugaccggcaaaaacgggcucuaucccaaucugucuaaguccuacgcuaacaauaaagaaaaggaggugcugguccucuggggagugcaucacccuccgaacaucggcaaccagagagcccuguaccacacagaaaaugcuuaugugagcgucguuuccucucauuacagccggcgcuucacccccgagauugccaaaagaccuaaggugcgggaucaggaagggcgcaucaacuauuacuggacgcuucuggagcccggagacacaauuaucuuugaggcgaauggcaaccucauugccccuagauaugcuuucgcccugucccggggguuuggaagcggcaucauuaccucuaaugcucccauggaugaaugugacgccaagugccagacaccgcaaggcgcgaucaacuccagccuuccuuuccagaaugugcaccccgucaccaucggggaguguccuaaauacgugcgcucugccaagcugagaaugguuaccggacuccggaacauucccagcauccagucccgcggccuguuuggggcuauugccggauucaucgaaggcggguggacaggaaugguggauggcugguauggcuaccaucaccagaaugagcaagggucuggauacgcugccgaccagaaaagcacgcagaacgccauuaauggcaucaccaacaaggucaauuccgugaucgaaaagaugaacacacaguuuaccgcuguugggaaagaguucaauaaacuggagagacggauggaaaaccucaacaagaagguggaugacggauuccuggauauuuggacauauaaugcggagcuucugguccuccuggaaaacgagcgcacccuugacuuucacgacagcaaugugaaaaaccuguacgaaaaggucaaaucucaacucaagaauaacgccaaagagaucggcaaugggugcuucgaguuuuaucauaaguguaacgaugaaugcauggaguccgugaagaauggcacguacgacuaucccaaauacagcgaagagucuaagcugaacagagagaaaauugauggaguuaagcuggaauccaugggcguguaucagauccucgcuauuuacagcacagucgccuccucucuggugcuucugguuagccucggggccaucuccuucuggaugugcucuaauggaagccugcagugucggaucugcauuuga

SEQ ID NO: 201727 - RNA, 1698 nt, Artificial Sequence
  derived and/or modified CDS sequence (opt5) from hemagglutinin__InfluenzaA__AFO66235
augaaggugaaacugcucguccugcuuugcaccuucacagccacguacgcugacaccaucuguauuggcuaucacgccaacaauagcacagauaccguugacacagugcuggagaagaacgugaccgucacacauuccgugaaucuccuggaagauucucacaacgggaaacuuugccugcucaagggaaucgcgccccugcagcugggcaauuguagcguugcuggguggauucucggaaacccugagugcgaacugcuuaucuccaaagagucuuggagcuacauuguggaaaagccgaaucccgagaacggcaccuguuauccugggcauuuugccgacuacgaggaacugagagagcaacucuccucugucagcuccuucgaacgguuugagaucuuccccaaggagagcucuuggccuaaucacacggugaccggaguuuccgccagcugcucucauaacggcaaauccagcuuuuauaagaaucugcuuuggcugacaggcaaaaacgggcucuaccccaaucugucuaaguccuaugcuaacaauaaagaaaaggaggugcugguccucuggggagugcaccacccuccgaacaucggcgugcagcgcgcccuguaccauaccgaaaacgcuuacgucagcguuguguccucucacuauagcagaaaguucacacccgagauugccaaacggccuaaggugcgcgaucaggaagggagaaucaauuacuauuggacccuucuggagcccggagacacgauuaucuuugaggcgaacggcaaucucauugccccucgguacgcuuucgcccugucccgcggguuuggaagcggcaucauuaacucuaaugcucccauggaugaaugugacgccaaaugccagacaccgcaaggcgcgaucaacuccagccuuccuuuccagaauguccaucccgugaccaucggggaguguccuaaguauguuagaucugccaaacugcggauggugacaggacuccgcaacauucccagcauccaguccagaggccuguuuggggcuauugccggauucaucgaaggcggguggaccggaauggucgauggcugguacggcuaucaccaccagaaugagcaagggucuggauacgcugccgaccagaaguccacccagaacgccauuaauggcaucacaaacaaagugaauagcguuaucgaaaagaugaacacgcaguuuaccgcuguggggaaggaguucaauaaacuggagcggcgcauggaaaaccucaacaagaaagucgaugacggauucauugauaucuggacauacaaugcggagcugcuugugcugcucgaaaacgagagaacccuggacuuucaugacagcaaugucaagaaccuuuaugaaaaagugaagucucaacugaagaauaacgccaaagagauuggcaaugggugcuucgaguuuuaccacaaguguaacgaugaaugcauggaguccguuaaaaauggcacauaugacuaccccaaguauagcgaagagucuaaacucaaccgggagaagaucgauggagugaagcuggaauccaugggcgucuaccagauucuggcuaucuauagcaccguggccuccucucucguucugcuugugagccugggggccaucuccuucuggaugugcucuaauggaagccuccagugucgcauuugcaucuga

SEQ ID NO: 201728 - RNA, 1698 nt, Artificial Sequence
  derived and/or modified CDS sequence (opt5) from hemagglutinin__InfluenzaA__AFO66246
augaaggugaaacugcucguccugcuuugcaccuucacagccacguacgcugacaccaucuguauuggcuaucacgccaacaauagcacagauaccguugacacagugcuggagaagaacgugaccgucacacauuccgugaaucuccuggaagauucucacaacgggaaacuuugccugcucaagggaaucgcgccccugcagcugggcaauuguagcguugcuggguggauucucggaaacccugagugcgaacugcuuaucuccaaagagucuuggagcuacauuguggaaaagccgaaucccgagaacggcaccuguuauccugggcauuuugccgacuacgaggaacugagagagcaacucuccucugucagcuccuucgaacgguuugagaucuuccccaaggagagcucuuggccuaaucacacggugaccggaguuuccgccagcugcucucauaacggcaaauccagcuuuuauaagaaucugcuuuggcugacaggcaaaaacgggcucuaccccaaucugucuaaguccuaugcuaacaauaaagaaaaggaggugcugguccucuggggagugcaccacccuccgaacaucggcaaccagcgcgcccuguaccauaccgaaaaugcuuacgugagcgucguuuccucucacuauagcagaaaguucacacccgagauugccaaacggccuaaggugcgcgaucaggaagggagaaucaacuacuauuggacccuucuggagcccggagacacgauuaucuuugaggcgaauggcaaccucauugccccucgguacgcuuucgcccugucccgcggguuuggaagcggcaucauuaauucuaacgcucccauggaugaaugugacgccgagugccagacaccgcaaggcgcgaucaauuccagccuuccuuuccagaacgugcaucccgucaccaucggggaauguccuaaauaugugagaucugccaagcugcggaugguuacaggacuccgcaauauucccagcauccaguccagaggccuguuuggggcuauugccggauucaucgagggcggguggaccggaaugguggauggcugguacggcuaucaccaccagaacgaacaagggucuggauacgcugccgaccagaaaagcacccagaaugccauuaacggcaucacaaauaaggucaacuccgugaucgagaaaaugaauacgcaguuuaccgcuguugggaaggaguucaacaagcuggaacggcgcauggagaaccucaauaaaaagguggaugacggauucauugauaucuggacauacaacgcggaacugcuuguccugcucgagaaugaaagaacccuggacuuucaugacagcaacgugaaaaaucuuuaugagaaggucaaaucucaacugaagaacaaugccaaggagauuggcaacgggugcuucgaauuuuaccacaaauguaaugaugagugcauggaauccgugaagaacggcacauaugacuaccccaaauauagcgaggagucuaagcucaaucgggagaaaaucgauggaguuaagcuggaauccaugggcguguaccagauucuggcuaucuauagcaccgucgccuccucucucgugcugcuuguuagccugggggccaucuccuucuggaugugcucuaacggaagccuccagugucgcauuugcaucuga

SEQ ID NO: 201729 - RNA, 1701 nt, Artificial Sequence
  derived and/or modified CDS sequence (opt5) from hemagglutinin__InfluenzaA__AFP33324
augaaggccaaacugcucgugcugcuuugcaccuucacagcuacguacgccgacaccaucuguauuggcuaucacgcgaacaauagcacagauaccgucgacacaguucuggagaagaacgugaccgugacacauuccgucaaucuccuggaagauucucacaacgggaaacuuugcagacugaagggaaccgcuccccuccagcugggcaauuguagcaucgccggguggauucugggaaacccugagugcgaaucccucuuuucuaaagagagcugguccuacaucgccgaaacgccgaaucccaagaacggcaccuguuauccuggguacuucgcugacuaugaggagcugcgggaacaacuuucuagcguguccagcuuugagcgcuucgaaauuuuucccaaggauucuuccuggccuaaucauacaguuaccaaaggagugacagccagcugcucucacaacggcaaguccagcuucuacaaaaaucugcucuggcugaccggcaagaacgggcuuuaucccaaucugucuaaauccuacgucaacaagaagggaaaagaggugcucguucuguggggcgugcaucacccuagcaauaugggggaccagagagcuaucuaccacaaggagaacgccuaugucuccgugcugucuagccauuacucccggcgcuuuacgccggaaaucgcgaaaagacccaaggugcgggaucaggagggacgcauuaacuauuacuggacacuccuggaaccuggcgacaccaucauuuucgaggccaaugggaaccuuaucgcucccugguaugccuuugcucugagcagaggauucggcucuggcauuaucauuuccaaugccagcaugggggaaugugaugcgaaaugccagacaccucaaggagccaucaacucuagccuccccuuucagaauguccacccgguuaccaucggcgaguguccuaaguacgugcgguccaccaaacugcgcauggugacagggcuuagaaacguccccucuauucagagccggggacuguucggcgcuaucgccggguuuauugagggaggcuggacgggcaugaucgacgggugguauggauaccaucaccagaaugaacaaggcuccggguacgcugccgaucagaagucuacccagaacgccauuaauggaaucacaaacaaggugaauagcaucauugagaaaaugaacacccaguucacagcuguuggcaaggaguucaauaaacucgaacgcagaauggaaaaccugaauaagaaaguggacgauggguuucuggacaucuggaccuauaacgcggagcuccugguccuucuggagaacgaacggacgcucgacuuccacgauuccaaugugaagaaccuguacgagaagguuaaaacacaacuuaagaauaacgccaaagaaauuggcaauggaugcuuugaguucuaucauaaguguaacaaugaaugcauggagagcgugaaaaacggcaccuacgacuauccuaaguacucuaaggaguccaaacugaaucgcgaaaagaucgauggggucaaacucgagagcaugggaguguaucagauucuggcuaucuacuccaccgucgccucuagccuggugcuccugguuucccuuggcgccaucucuuuuuggaugugcagcaacgggucccugcaguguagaauuugcaucuga

SEQ ID NO: 201730 - RNA, 1698 nt, Artificial Sequence
  derived and/or modified CDS sequence (opt5) from hemagglutinin__InfluenzaA__AFP33325
augaaggugaaacugcucguccugcuuugcaccuucacagccacguacgcugacaccaucuguauuggcuaucacgccaacaauagcacagauaccguugacacagugcuggagaagaacgugaccgucacacauuccgugaaucuccuggaagauucucacaacgggaaacuuugccugcucaagggaaucgcgccccugcagcugggcaauuguagcguugcuggguggauucucggaaacccugagugcgaacugcuuaucccgaaagaguccuggucuuacauuguggaaacccccaauccugagaacggcacguguuaucccggguacuuugccgacuaugaggaacugagagagcaacucagcuccgucucuagcuucgaacgguuugagaucuucccuaaggaguccagcuggcccucucauaccgugacaggaguuuccgccagcugcucucacaauggcaaguccagcuuuuaccgcaaccugcuuuggcugaccggcaaaaaugggcucuauccuaaccugucuaaguccuacagcaauaacaaagaaaaggaggugcugguccucuggggagugcaucacccgcccaauaucggcgaucagagagcucuguaccacacagaaaacgccuauguguccgucguuucuagccauuacucccggcgcuucaccccugagauugcuaaaagacccaaggugcgggggcaggaaggacgcaucaacuauuacuggacgcuucuggagccuggcgacacaauuaucuuugaggccaaugggaaccucauugcgcccugguaugccuucgcucugagcagaggauuuggcucuggcaucauuaccuccaaugccccgauggaugaaugugacgcuaagugccagacaccucaaggggccaucaacagcucucuucccuuccagaaugugcacccugucaccaucggagagugucccaaauacgugcggagcgcgaagcugcgcaugguuaccggccucagaaacauucccuccauccagucucgggggcuguuuggagccauugcuggcuucaucgaagggggauggacaggcaugguggauggcugguauggguaccaucaccagaaugagcaaggaagcggcuacgccgcugaccagaaauccacgcagaacgccauuaaugggaucaccaacaaggucaauagcgugaucgaaaagaugaacacacaguuuaccgccguuggaaaagaguucaauaaacuggagcgcagaauggaaaaccucaauaagaagguggaugacggcuuccuggauauuuggacauauaacgcugagcuucugguccuccuggaaaacgagcggacccuugacuuucacgacucuaaugugaaaaaccuguacgaaaaggucaaaucccaacucaagaauaacgcgaaagagaucgggaauggcugcuucgaguuuuaucauaaguguaacgaugaaugcauggagagcgugaagaauggaacguacgacuauccuaaauacucugaagaguccaagcugaaccgcgagaaaauugauggcguuaagcuggaaagcauggggguguaucagauccucgccauuuacuccacagucgcuucuagccuggugcuucugguuucccucggagccaucucuuucuggaugugcagcaauggcucccugcaguguagaaucugcauuuga

SEQ ID NO: 201731 - RNA, 1701 nt, Artificial Sequence
  derived and/or modified CDS sequence (opt5) from hemagglutinin__InfluenzaA__AFQ32573
augaagaccaucauugcccugagcuacauccucugccugguguucgcucagaaacuucccggcaacgacaauuccacagccacgcugugucucgggcaccaugcggucccuaacggaaccauuguuaagacaaucaccaaugaucaaauugaggugacaaacgcuaccgaacuggugcagucuagcuccacaggcgagaucugcaauucuccgcaccagauccuugacggggaaaacuguacccugauugaugcccuccugggagacccccagugcgauggcuuucaaaauaaaaagugggaccuguucgucgagagaagcaaagcccauuccaacuguuauccuuacgaugugcccgacuaugcuucucuccggagccugguugccuccagcgggacgcuugaauuuaauaacgagucuuucaauuggaccggagugacacagaacggcaccuccagcgcuugcauccgcagaucuaauaacuccuuuuucagccggcugaauuggcucacacaccugaacuuuaaguacccugcccuuaacgucaccaugcccaauaacgagcaguucgauaagcuguauauuuggggcgugcaucacccugggacggacaaagaucagaucuuucucuacgcgcaagccucuggacgcauuacaguuuccaccaagagaagccagcaggcugugaucccgaauauuggcucccggccccgcgucagaaacaucccuucucgggugagcaucuauuggacaauugugaaacccggggacauccugcugauuaauuccaccggaaaccucaucgccccucgcggcuacuucaagauuagaagcgggaaaucuuccaucaugcggagcgaugcucccaucggaaaguguaauucugccugcauuaccccgaacggcagcaucccuaaugacaagcccuuucagaacgucaaucgcauuacauacggcgcguguccuagauauguuaaacaaaacacgcugaaacuugccaccgggaugcggaaugugcccgaaaagcagacacgcggaaucuucggcgcuauugccggguuuaucgagaacggaugggaaggcaugguggacgggugguacggauucagacaccaaaauuccgagggccggggccaggcugccgaucugaagucuacccaggccgcuaucgaccagauuaacgggaaacucaacagacugaucggaaagacaaaugagaaauuccaucagauugaaaaggaguuuagcgaagucgagggccgcauccaagaucuugaaaaguaugugggggacaccaaaauugaucugugguccuacaacgcggagcuccugguugcccuggagaaucagcacacgaucgaccucacagauagcgaaaugaacaagcuguucgagaaaaccaagaaacagcuucgggaaaaugcugaggacaugggaaacggcugcuuuaagauuuaucauaagugugauaaugccugcaucgggucuaucagaaacggcaccuacgaccacgauguguaucgcgacgaagcccugaauaaccgguuccagauuaaaggagucgagcucaaguccggcuacaaagacuggauccuguggauuagcuuugcuaucucuugcuuccuucuguguguggcccuccugggguuuauuaugugggcgugccaaaagggaaauaucagauguaacaucugcauuuga

SEQ ID NO: 201732 - RNA, 1701 nt, Artificial Sequence
  derived and/or modified CDS sequence (opt5) from hemagglutinin__InfluenzaA__AFQ37281
augaaggccauccuggugguccuccuguacaccuucgcuacaacgaacgccgacacccuuugcauuggcuaucacgcgaauaacagcacagauaccguugacacagugcuggagaaaaaugugaccgucacacauuccgugaaccuccuggaagauaagcacaaugggaaacuuuguaagcugagaggaguugcuccccuccaucugggcaaaugcaacaucgccggguggauucugggaaauccugagugugaaucucucagcaccgccuccucuuggagcuacaucguggagacguccucuagcgacaacgggaccugcuauccgggcgauuuuauugacuacgaagaacugcgggagcagcuuuccagcgucucuuccuucgaacgcuuugagaucuuccccaagacaagcucuuggccuaaucacgauuccaacaagggagugaccgcugccuguccccaugcuggcgccaagagcuuuuauaagaaucugaucuggcucguuaaaaagggcaacucuuacccuaaacuguccaagagcuauauuaaugacaaggggaaagaagugcuuguccuguggggaauccaccaccccuccacaucuaccgaucaacagagccucuaccagaacgcggacgccuacguguucgugggcacguccagauauagcaagaaauuuaagccugagauugcuauccggccgaaaguccgcgauagagaggggcggaugaauuacuauuggacacugguugaacccggagacaagauuaccuucgaggccacaggcaaccugguggugccucgcuacgcuuuugccauggaaagaaacgcggggucuggaaucauuaucuccgauacccccgcccaugacugcaauaccacaugucagacgccuaaaggcgcuaucaacaccagccuccccuuccaaaauguccacccgauuacaaucggcaagugcccuaaguaugugaaaucuaccaagcugcggcuugccacagggcugcgcaacguucccagcauucaguccagaggacucuuuggcgcuaucgccggguucauugagggaggcuggaccgggaugguggacggaugguacggcuaucaucaccagaaugaacagggcucuggguacgccgcugaucugaaaagcacgcaaaacgcgaucgacaagaucacaaauaaagucaacuccgugauugagaagaugaauacccaguuuaccgccguuggaaaggaguucaaccaccuugaaaaacggaucgagaaucugaacaagaaaguggaugacggcuuccucgauauuuggacauacaaugcugaacugcugguccuccuggagaacgaacgcacccuugacuaucaugauagcaaugugaagaaccuguacgagaaagucagaucucagcucaagaacaaugccaaggagaucgggaacggauguuuugaguucuaucacaaaugcgacgauaaguguauggaguccgugaaaaauggcacauacgacuauccuaaguacagcgaagaggccaaacugaaccgggaagagauugaugggguuaaacuugagucuacgcgcaucuaucagauccuggcuauuuacuccaccgccgcgagcucccucgugcuggucgugucucugggcgcuaucagcuuuuggaugugcuccaauggaucucuccaaugcagaauuuguaucuga

SEQ ID NO: 201733 - RNA, 1707 nt, Artificial Sequence
  derived and/or modified CDS sequence (opt5) from hemagglutinin__InfluenzaA__AFQ55689
augaacacccagauccuggcccucauugcuugcaugcugaucggcgccaagggggacaaaauuugucuuggacaccaugcgguggcuaauggcacaaaggucaacacgcugaccgagagagggaucgaaguugugaaugccacagagaccguggaaacagccaacaccaaaaagauuugcacacaaggaaaacggcccaccgaucucggccagugugggcugcuuggaacgcugaucggcccuccgcagugcgaccaguuccucgaguuugaugcugaccugaucauugaacgcagagagggcaccgaugucuguuaccccgggaaguucacaaaugaggaaagccugcggcaaauccuccgcggauccggcgggauugacaaggagucuaugggauuuaccuauagcggcaucagaacaaacggggccaccuccgcuugccggcgcucuggaagcuccuucuacgccgaaaugaaauggcugcuuucuaauagcgauaacgcggccuuuccucagaugacgaaguccuauagaaauccccggaacaaaccugcucugauuaucuggggcgugcaccauagcggcucugccacagagcagaccaagcucuacggguccggaaauaaacugauuacaguuggcagcucuaaguaucagcaauccuucacccccagcccuggggcucgcccccaggugaacggacagucuggcagaaucgacuuucacuggcuucugcucgauccgaaugacaccgucacauucacguuuaacggggccuucaucgcgccugaucgggccuccuuuuuccgcggagagagcauuggcgugcaguccgacguuccccuggauucuggcugugaaggggacugcuuucauaauggaggcaccaucgugagcucccugccuuuccaaaacauuaaccccagaacagucgggaaguguccgcgguacgugaaacagaccagccuccugcuugcuacaggaaugcgcaaugugccugagaaccccaaggacagaaaaucucggcacagacgcacccggggccuguucggggccaucgcuggcuuuauugaaaauggaugggagggccucaucgaugggugguauggauucagacaccagaacgcccaaggcgaagggacggccgcugacuacaaguccacacagagcgcgaucgaucagauuaccggaaaacugaaucgccuuaucgacaagaccaaccagcaauuugagcugauugauaaugaguucucugaaaucgagcagcagauuggcaacgucaucaauuggacacgggacagcaugaccgaaguuugguccuacaacgccgagcuccugguggcuauggaaaaucagcauacaaucgaucuggccgacucugagaugaacaaacucuaugagagagugcgcaagcaacugcgggaaaaugccgaggaagaugggacgggcugcuuugagauuuuccacaagugugacgaucagugcauggaaagcaucagaaacaauaccuacgaccauacacaguaucgcgcugagucccuucagaaccggauucaaaucgacccugucaaacugagcucuggauacaaggauauuauccucugguuuuccuucggcgccagcugcuuucugcuucuggcgauugcuauggggcucguguucaucuguaucaaaaacggaaauaugagaugcaccauuuguaucuga

SEQ ID NO: 201734 - RNA, 1701 nt, Artificial Sequence; identical to SEQ ID NO: 200258
  derived and/or modified CDS sequence (opt5) from hemagglutinin__InfluenzaA__AFR68153

SEQ ID NO: 201735 - RNA, 1701 nt, Artificial Sequence
  derived and/or modified CDS sequence (opt5) from hemagglutinin__InfluenzaA__AFR68163
augaaggccacccuggugguccuccuguacacauucgcuacggccaacgcggacacccuuugcaucggcuaucacgcuaauaacagcacagauaccguugacacagugcuggagaaaaaugugaccgucacacauuccgccaaccuccuggaagauaagcacaaugggaaacuuuguaagcugagaggaguggcuccccuccaucugggcaaaugcaacauugccggguggauccugggaaauccugagugugaaacccucucuacggccagcuccuggucuuacauuguugagaccagcuccucugacaacggcacaugcuauccgggggauuuuaucgacuacgaagaacugcgggagcagcuuagcuccgugagcucuuucgaacgcuuugagauuuuccccaagaccuccagcuggccuaaucacgauucuaacaagggagucacagcugccuguccccaugcgggcgccaaaggcuuuuauaagaaucugaucuggcucgugaaaaaggggaacuccuacccuaaacugagcaagucuuauaucaaugacaagggaaaagaaguucuugugcuguggggcauucaccaccccuccaccacggcugaucaacagagccucuaccagaacgccgacacauacgucuucguggggaccuccagauauucuaagaaauuuaagccugagaucgcuauucggccgaaagugcgcgaucaggagggaagaaugaauuacuauuggacacuggucgaacccggcgacaagaucaccuucgaggccaccgggaaccugguugugccucgguacgcguuugccauggaacgcgaugcuggaagcggcauuaucauuuccgacacacccgugcaugacugcaacacgaccugucaaacaccuaaaggcgccaucaauaccagccuccccuuccagaacauccacccgauuacaaucgggaagugcccuaaguaugucaaaucuaccaagcugagacuugcuacgggacugcggaaugugcccuccauucagagccgcggccucuuuggggccaucgccggauucauugagggcggguggacaggaaugguugauggcugguacggcuaucaucaccagaacgaacaagggucuggauacgcugcggaccugaaaagcacccagaaugccaucgauaagaucaccaacaaagucaauuccgugauugagaagaugaacacacaguuuaccgcugugggcaaggaguucaaucaccuugagaaaagaaucgagaaccugaauaagaaaguugacgauggguuccucgacauuuggacauacaacgccgaacugcuggugcuccuggagaaugaacggacgcuugauuaucaugacucuaacgucaagaaucuguacgagaaagugcgcaaccagcucaagaacaaugccaaggagaucggaaacggcuguuuugaguucuaucacaaaugcgauaauaccuguauggaaagcgucaagaacgggacauacgacuauccuaaauacuccgaagaggcuaagcugaauagagaagagauugauggcgugaaacuugagagcacccggaucuaucaaauccuggccauuuacucuacagcggcuuccagccucguucugguggucucucugggagccaucuccuuuuggaugugcagcaacggcucccuccagugccgcauuuguaucuga

SEQ ID NO: 201736 - RNA, 1701 nt, Artificial Sequence
  derived and/or modified CDS sequence (opt5) from hemagglutinin__InfluenzaA__AFR68173
augaagaccaucauugcccugagcuacauccucugccugguguucgcucagaaacuucccggcaacgacaauuccacagccacgcugugucucgggcaccaugcggucccuaacggaaccauuguuaagacaaucaccaaugaucaaauugaggugacaaacgcuaccgaacuggugcagucuagcuccacaggcgagaucugcgacucuccgcaccagauccuugauggggaaaauuguacccugauugacgcccuccugggagauccccagugcgacggcuuucaaaacaaaaagugggaucuguucgucgagagaagcaaagccuauuccaauuguuacccuuaugacgugcccgauuacgcuucucuccggagccugguugccuccagcgggacgcuugaauuuaacaaugagucuuucaacuggaccggagugacacagaauggcaccuccagcgcuugcauccgcagaucuaacuccagcuuuuucucucggcugaauuggcucacacaucugaacuuuaaguauccugcccuuaaugucaccaugcccaacaacgagcaguucgacaagcuguacauuuggggcgugcaccauccugggacggauaaagaccagaucuuucucuaugcgcaagccuccggacgcauuacaguuagcaccaagagaucccagcagucugugaucccgaauauuggcagccggccccgcaucagaaacaucccuucccggauuagcaucuacuggacaauugucaaacccggggauauccugcugauuaauucuaccggaaaccucaucgcuccucgcggcuacuucaagaucagauccgggaaaagcucuauuaugcggagcgacgcccccaucggaaaguguaauuccgaaugcauuaccccgaacggcucuaucccuaaugacaagcccuuucagaacgugaaucgcauuacauauggcgcuuguccuagauacgugaaacaaaacacgcugaaacuugccaccgggaugcggaauguccccgagaagcagacacgcggaaucuucggcgcgaucgccggguuuauugaaaacggaugggagggcaugguugaugggugguauggauucagacaccagaauagcgagggccggggccaagcugccgaccugaaguccacccaggcugccaucgaucagauuaacgggaaacucaauagacugaucggaaagacaaacgaaaaauuccaccagauugagaaggaauuuagcgagguggaaggccgcauccaagaccuugagaaguacguggaggauaccaaaauugaccuguggucuuauaacgccgaacuccuggucgcucuggagaaucagcauacgaucgaucucacagacuccgaaaugaacaagcuguucgagaaaaccaagaaacagcuucgggaaaaugcggaggauauggggaacggaugcuuuaagaucuaccacaagugugacaaugccugcauuggcagcaucagaaacgggaccuauaaucaugauguguaccgcgacgaggcucugaacaaucgguuccagauuaaaggcguugaacucaagucuggauacaaagacuggauccuguggauuuccuuugccaucagcugcuuccuucuguguguggcccuccugggcuuuaucaugugggcuugccaaaaggggaacauuagauguaauaucugcauuuga

SEQ ID NO: 201737 - RNA, 1701 nt, Artificial Sequence; identical to SEQ ID NO: 194741
  derived and/or modified CDS sequence (opt5) from hemagglutinin__InfluenzaA__AFR84675

SEQ ID NO: 201738 - RNA, 1701 nt, Artificial Sequence; identical to SEQ ID NO: 195094
  derived and/or modified CDS sequence (opt5) from hemagglutinin__InfluenzaA__AFR84685

SEQ ID NO: 201739 - RNA, 1701 nt, Artificial Sequence; identical to SEQ ID NO: 194921
  derived and/or modified CDS sequence (opt5) from hemagglutinin__InfluenzaA__AFR84694

SEQ ID NO: 201740 - RNA, 1701 nt, Artificial Sequence; identical to SEQ ID NO: 194728
  derived and/or modified CDS sequence (opt5) from hemagglutinin__InfluenzaA__AFR84704

SEQ ID NO: 201741 - RNA, 1701 nt, Artificial Sequence
  derived and/or modified CDS sequence (opt5) from hemagglutinin__InfluenzaA__AFR84714
augaaggccauccuggugguccuccuguacaccuucgcuacagccaacgcggacacgcuuugcauuggcuauagagcuaauaacagcaccgauacaguugacaccgugcuggagaaaaaugugacagucacccacuccgugaacauccucgaagauaagcauaaugggaaacuguguaaacuucggggaguugcuccccugcaccucggcaagugcaacauugccggguggauccugggaaauccugagugugaaucucugagcacagccuccucuuggagcuacauuguggagaccuccucuagcgacaacggcacgugcuauccgggggauuuuaucgacuacgaagaacuccgcgagcagcuguccagcgucucuuccuucgaaagauuugagaucuuccccaagaccagcucuuggccuaaucaugauuccaacaagggagugacagccgcuuguccccacgccggcgcgaaaucuuuuuauaagaaucuuauuuggcugguuaaaaagggcaacagcuacccuaaacucuccaagagcuauaucaaugacaaggggaaagaagugcugguccuuuggggcauucaucaccccuccaccucugccgaucaacagagccuguaccagaacgcugacgccuacguguucgugggauccagccgguauucuaagaaauuuaagccugagaucgcuauucgcccgaaagucagagaucaggaggggcggaugaauuacuauuggacacucguugaacccggagacaagaucaccuucgaggccacgggcaaccugguggugccucgcuacgcguuugccauggaaagaaacgcuggguccggaauuaucaucagcgauacacccguccacgacugcaauaccacaugucaaaccccuaaaggcgccauuaacaccucucugcccuuccagaauauccauccgauuacaaucggcaagugcccuaaguaugugaaaagcacgaagcuccggcuggcuaccgggcuucgcaacguucccuccauucagucuagaggacuguuuggcgccaucgccggguucaucgagggaggcuggacagggaugguggacggaugguacggcuaucaccaucagaaugaacaaggcagcggguacgcugcggaucucaaauccacccagaacgccauugacgagaucacaaauaaggucaacagcgugauugagaaaaugaauacccaguuuacggcuguuggaaaggaguucaaccaccuggagaagcggaucgaaaaucuuaacaaaaagguggaugacggcuuccuggauauuuggacauacaaugccgagcuccugguccugcucgaaaacgagcgcacccuggacuaucacgauucuaaugugaaaaaccuuuacgagaaggucagaucccagcugaaaaacaaugccaaggaaaucgggaacggauguuuugaguucuaucauaagugcgacaauaccuguauggaaagcgugaaaaacggcacauacgauuauccuaaguacucugaggaagcuaaacucaaucgggaggagaucgacgggguuaagcuggaauccacccgcauuuaucaaauccuugccauuuacagcacaguggcguccucucugguccucgugguuagccugggcgcuaucuccuuuuggaugugcucuaacggaagccugcagugcagaauuuguaucuga

SEQ ID NO: 201742 - RNA, 1701 nt, Artificial Sequence; identical to SEQ ID NO: 194921
  derived and/or modified CDS sequence (opt5) from hemagglutinin__InfluenzaA__AFR84724

SEQ ID NO: 201743 - RNA, 1701 nt, Artificial Sequence; identical to SEQ ID NO: 194921
  derived and/or modified CDS sequence (opt5) from hemagglutinin__InfluenzaA__AFR84734

SEQ ID NO: 201744 - RNA, 1701 nt, Artificial Sequence; identical to SEQ ID NO: 194921
  derived and/or modified CDS sequence (opt5) from hemagglutinin__InfluenzaA__AFR84754

SEQ ID NO: 201745 - RNA, 1701 nt, Artificial Sequence; identical to SEQ ID NO: 194921
  derived and/or modified CDS sequence (opt5) from hemagglutinin__InfluenzaA__AFR84764

SEQ ID NO: 201746 - RNA, 1701 nt, Artificial Sequence; identical to SEQ ID NO: 194921
  derived and/or modified CDS sequence (opt5) from hemagglutinin__InfluenzaA__AFR84774

SEQ ID NO: 201747 - RNA, 1701 nt, Artificial Sequence
  derived and/or modified CDS sequence (opt5) from hemagglutinin__InfluenzaA__AFR84784
augaaggccauccuggugggccuccuguacaccuucgcuacagccaacgcggacacgcuuugcauuggguaucacgcuaauaacagcaccgauacagucgacaccguucuggagaaaaaugugacagugacccauuccgucaacauccucgaagauaagcacaauggaaaacuguguaaacuuagaggcguggcuccccugcaucucgggaagugcaacauugccggauggauccugggcaauccugagugugaaucucugagcacagccuccucuuggagcuacauuguugagaccuccucuagcgacaacgggacgugcuauccgggagauuuuaucgacuacgaagaacuccgggagcagcuguccagcgugucuuccuucgaacgcuuugagaucuuccccaagaccagcucuuggccuaaucacgauuccaacaagggcgucacagccgcuuguccccaugccggcgcgaaaucuuuuuauaagaaucuuauuuggcuggugaaaaaggggaacagcuacccuaaacucuccaagagcuauaucaaugacaagggaaaagaaguucuggugcuuuggggcauucaccaccccuccaccucugccgaucaacagagccuguaccagaacgcugacgccuacgucuucgugggguccagcagauauucuaagaaauuuaagccugagaucgcuauucggccgaaagugcgcgaucaggagggaagaaugaauuacuauuggacacucgucgaacccggcgacaagaucaccuucgaggccacggggaaccugguugugccucgguacgcguuugccauggaacgcaacgcuggauccggcauuaucaucagcgauacacccgugcaugacugcaauaccacaugucaaaccccuaaaggcgccauuaacaccucucugcccuuccagaauauccacccgauuacaaucgggaagugcccuaaguaugucaaaagcacgaagcucagacuggcuaccggacuucggaacgugcccuccauucagucucgcggccuguuuggggccaucgccggauucaucgagggcggguggacaggaaugguugacggcugguacggcuaucaucaccagaaugaacaagggagcggauacgcugcggaucucaaauccacccagaacgccauugacgagaucacaaauaaggugaacagcgucauugagaaaaugaauacccaguuuacggcugugggcaaggaguucaaccaccuggagaagagaaucgaaaaucuuaacaaaaagguugaugacggguuccuggauauuuggacauacaaugccgagcuccuggugcugcucgaaaacgagcggacccuggacuaucaugauucuaaugucaaaaaccuuuacgagaaggugcgcucccagcugaaaaacaaugccaaggaaaucggaaacggcuguuuugaguucuaucacaagugcgacaauaccuguauggaaagcgucaaaaacgggacauacgauuauccuaaguacucugaggaagcuaaacucaauagagaggagaucgacggcgugaagcuggaauccacccggauuuaucaaauccuugccauuuacagcacaguugcguccucucuggcucucguggucagccugggagccaucuccuuuuggaugugcucuaacggcagccugcagugccgcauuuguaucuga

SEQ ID NO: 201748 - RNA, 1701 nt, Artificial Sequence; identical to SEQ ID NO: 194921
  derived and/or modified CDS sequence (opt5) from hemagglutinin__InfluenzaA__AFR84794

SEQ ID NO: 201749 - RNA, 1701 nt, Artificial Sequence; identical to SEQ ID NO: 194741
  derived and/or modified CDS sequence (opt5) from hemagglutinin__InfluenzaA__AFR84804

SEQ ID NO: 201750 - RNA, 1701 nt, Artificial Sequence; identical to SEQ ID NO: 194921
  derived and/or modified CDS sequence (opt5) from hemagglutinin__InfluenzaA__AFR84814

SEQ ID NO: 201751 - RNA, 1701 nt, Artificial Sequence; identical to SEQ ID NO: 194741
  derived and/or modified CDS sequence (opt5) from hemagglutinin__InfluenzaA__AFR84824

SEQ ID NO: 201752 - RNA, 1701 nt, Artificial Sequence; identical to SEQ ID NO: 194767
  derived and/or modified CDS sequence (opt5) from hemagglutinin__InfluenzaA__AFR84834

SEQ ID NO: 201753 - RNA, 1701 nt, Artificial Sequence; identical to SEQ ID NO: 199941
  derived and/or modified CDS sequence (opt5) from hemagglutinin__InfluenzaA__AFR84844

SEQ ID NO: 201754 - RNA, 1701 nt, Artificial Sequence; identical to SEQ ID NO: 194983
  derived and/or modified CDS sequence (opt5) from hemagglutinin__InfluenzaA__AFR84854

SEQ ID NO: 201755 - RNA, 1701 nt, Artificial Sequence; identical to SEQ ID NO: 194741
  derived and/or modified CDS sequence (opt5) from hemagglutinin__InfluenzaA__AFR84864

SEQ ID NO: 201756 - RNA, 1701 nt, Artificial Sequence; identical to SEQ ID NO: 194921
  derived and/or modified CDS sequence (opt5) from hemagglutinin__InfluenzaA__AFR84874

SEQ ID NO: 201757 - RNA, 1701 nt, Artificial Sequence; identical to SEQ ID NO: 194728
  derived and/or modified CDS sequence (opt5) from hemagglutinin__InfluenzaA__AFR84893

SEQ ID NO: 201758 - RNA, 1701 nt, Artificial Sequence; identical to SEQ ID NO: 194728
  derived and/or modified CDS sequence (opt5) from hemagglutinin__InfluenzaA__AFR84903

SEQ ID NO: 201759 - RNA, 1701 nt, Artificial Sequence; identical to SEQ ID NO: 194728
  derived and/or modified CDS sequence (opt5) from hemagglutinin__InfluenzaA__AFR84913

SEQ ID NO: 201760 - RNA, 1701 nt, Artificial Sequence; identical to SEQ ID NO: 194728
  derived and/or modified CDS sequence (opt5) from hemagglutinin__InfluenzaA__AFR84923

SEQ ID NO: 201761 - RNA, 1689 nt, Artificial Sequence
  derived and/or modified CDS sequence (opt5) from hemagglutinin__InfluenzaA__AFV53205
auggccaucauuuaccugauccuccuguucgcuaccgugagaggcgaccagauuugcaucggguaucacgccaacaauagcacagagaaggucgauacgauucuugaacggaacguuaccgugacacaugcgaaagacauccuggagaagacccacaauggaaaacucuguaagcugaacggcauucccccucuugaacugggggauugcuccauugcuggauggcuccugggcaauccggagugugaccgccugcucagagugcccgaauggucuuacaucauggagaaagagaacccucgguauagccugugcuaccccgggucccuuaaugauuaugaagaacugaagcaucuccugucuagcguccgccacuuugaaaaggugagaauccuuccuaaagaccgguggacacaacauaccacaaccggagauuccaaggccugugccguuucuggcaaacccagcuucuuucgcaacaugguguggcugacgaagaaaggcccugacuacccggucgcuaagggguccuauaauaacaccagcggagagcagaugcucaucauuuggggcgugcaccaccccaucgaugaggccgaacagagagagcuguaccagaagguugggacauacgugucugcuuccaccagcacacugaauaaacggucuauuccugaaaucgccgcgcgccccgaggucaacggacucagaucccggauggaguucagcuggacccugcuugacgugugggauacgaucaauuuugagucuacaggcaaccugauugccccugaguauggguucaagaucuccaaacgcggaagcuccggcauuaugaagaccgaaggcacacucgggaauugcgagaccaaaugucaaacaccccugggagcuaucaacaccacgcuuccguuucauaacgugcacccucugaccauuggcgaaugccccaaguacgucaaaucugagaagcucguucuggccacagggcugagaaaugugccucagaucgaaagccggggacucuucggcgcuaucgccggguuuauugagggaggcuggcagggcaugguggacgggugguauggauaccaucacuccaacgaucagggcagcggguaugcggccgacaaggagucuacccaaaaggcuuucgacgaaaucacaaauaaagucaacuccgugauugagaaaaugaauacccaguuugaagccguuggaaaggaguucaacaaucuggaaaaacgccuugagaaccugaauaagaagauggaggauggcuuucucgacguguggacguacaacgcugaacugcuuguccugauggagaaugaaagaacacucgauuuccacgacagcaacgugaaaaaucuguaugagaagguucggaugcagcugagagauaacgugaaagagcucgggaauggcuguuucgaauuuuaccauaagugcgacgaugaguguaucaacucugucaaaaacggaaccuacgacuaucccaaguacgaagaggaaagcaagcugaaacgcaaugagauuaagggcgugaaacuuuccucuaugggggucuaucagauccuggccaucuacgccaccguggcuggaagccucucccuggcgauuaugauggccggcaucagcuucuggaugugcucuaacgggucccugcaaugccggauuuguaucuga

SEQ ID NO: 201762 - RNA, 1689 nt, Artificial Sequence
  derived and/or modified CDS sequence (opt5) from hemagglutinin__InfluenzaA__AFV53216
auggccaucauuuaccugauccuccuguucaccgcugugagaggcgaccagauuugcaucggguaucacgccaacaauagcacagagaaggucgauacgauucuugaacggaacguuaccgugacacaugcgaaagacauccuggagaagacccacaauggaaaacucuguaagcugaacggcauucccccucuugaacugggggauugcuccaucgcuggauggcuccugggcaauccggagugugaccgccugcucucugugcccgaauggagcuacaucauggagaaagagaacccuagagaugggcugugcuaucccggauccuuuaaugacuacgaagaacuuaagcaucugcucucuagcgucaagcacuucgaaaaagugaagauucugccuaaagaucgguggacacaacauaccacaaccggcggcucccgcgccugugccguuucugggaaccccagcuuuuucagaaauaugguguggcuuacggagaagggauccaacuauccugucgcuaaaggcagcuacaauaacaccucuggggagcagaugcugaucauuuggggagugcaccacccgaaugacgaaacagagcagcggacccucuaucagaacguuggcacauacguguccgucgggaccagcacgcugaauaagcgcucuacacccgauaucgccaccagaccuaaggugaacggacaaggcggccggauggaauuuuccuggacacugcucgacaugugggauaccauuaacuucgagagcaccgggaaucugaucgcucccgaauacggauuuaaaaucucuaagcgcggcuccagcgggauuaugaaaacagagggaacgcuuggcaacugcgagaccaagugucagacaccucugggggccaucaauaccacacuccccuuccauaacgugcacccgcugaccauuggagaaugcccuaaauaugucaaguccgagaaacuuguucuggcgacgggccucagaaaugugccccagaucgaaucucggggccuguuuggggccauugcuggauucaucgagggcggguggcagggaaugguggacggcugguacggguaucaucacagcaacgaucaaggcuccggauacgccgcugacaaggaaagcacacagaaggccuuugacggcaucaccaauaaagucaacucugugauugagaagaugaauacccaguucgaggcgguugaaaaagaguuuuccaaccuggaacgcagacucgagaaucugaacaagaaaauggaagauggguuccuugacguguggacauauaaugccgagcugcucguccugauggagaacgaacggacccuugauuuccacgacagcaaugugaagaaccuguacgauaagguucgcaugcagcucagagacaacgugaaagagcugggaaauggcuguuuugaguucuaucauaagugcgaugacgaguguaugaacucugucaaaaaugggacauacgauuacccuaaguaugaggaagagagcaaacugaaccggaaugaaaucaagggagugaagcucuccucuaugggcauuuaccaaauccuggcuauuuaugccacggucgcugggagccuuucccuggccaucaugauggccggcaucagcuuuuggaugugcucuaacggaucccuccagugcagaauuuguaucuga

SEQ ID NO: 201763 - RNA, 1689 nt, Artificial Sequence
  derived and/or modified CDS sequence (opt5) from hemagglutinin__InfluenzaA__AFV53227
augaucauuaucuaccugauucuccuguucaccgccgugagaggcgaccagaucugcauuggguaucacgcuaacaauagcacagagaaggucgauacgauccuugaacggaacguuaccgugacacaugccaaagacauccuggagaagacccacaauggaaaacucuguaagcugaacggcauucccccucuugaacugggggauugcuccaucgcgggauggcuccugggcaauccggagugugaccgccugcucagagugcccgaauggucuuacauuauggagaaagagaacccucgguauagccugugcuaccccggguccuuuaaugauuaugaggaacuuaagcaucugcucucuagcgucaagcacuucgaaaaagugaagauccugccuaaagacggauggacacaacauaagaccgauggcggcuccaaggcuugugccguuucugggaaagccagcuuuuuccgcaacaugguguggcuuacaaaggagggacccaauuaccaggucgcuaaaagauccuauaacaauaccagcggcgagcagaugcugauuaucuggggagugcaccacccuaaggacgaagccgagcagauugcucucuaccaaaaaguugggacguacgugucugccuccaccagcacacugaacaagcggucuaccccggaaaucgcggcccgccccgaggucaauggccugggguccagaauggaauuuagcuggacacuccuggaugugugggacaccaucaacuucgagucuacgggaaaucuuguggcuccugaguauggcuuuaaaauuuccaagcggggcagcuccgggaucaugaaaacagaaggaacccugggcaacugcgagacaaagugucagacaccccucggggccauuaacaccacccugccuuuccauaauguccacccccuuacgaucggagaaugcccgaaguacguuaaaucugagaagcuggugcucgcuaccggccugcgcaacgugccucagauugaaagcagagggcuguuuggagccaucgcgggcuucaucgagggcggguggcagggaauggucgauggcugguauggguaccaucacuccaaugaccaaggaagcggcuaugccgcugauaaagagucuacacagaaggccuuugaccggauuaccaacaaaguuaauuccgugaucgaaaagaugaacauucaguucgaggcuguggggaaggaauuuagcaaucucgagaaacgccuggaaaaccuuaauaagaaaauggaggacggcuuccuggaugucuggacauacaacgccgagcuccuggugcuuauggaaaaugagagaacccuggacuuccacgauucuaacguuaagaaucucuaugacaaagugcggaugcagcugcgcgauaacgucaaggaacugggaaauggcuguuuugaguucuaccauaagugcgacgaugaguguaugaacagcgugaaaaacgggacguacgacuaucccaaguacgaagaggaauccaaacucaagagaaaugagaucaaaggagucaagcugucuagcaugggcguguaucaaauucuugccaucuacgcuacaguugcggggucccugagccucgccaucaugauugcuggaaucucuuuuuggaugugcuccaacggcagccugcagugccggguguguauuuga

SEQ ID NO: 201764 - RNA, 1689 nt, Artificial Sequence
  derived and/or modified CDS sequence (opt5) from hemagglutinin__InfluenzaA__AFV53238
auggccaucauuuaccugauccuccuguucaccgcugugagaggcgaccagauuugcaucggguaucacgccaacaauagcacagagaaggucgauacgauucuugaacggaacguuaccgugacacaugcgaaagacauccuggagaagacccacaauggaaaacucuguaagcugaacggcauucccccucuugaacugggggauugcuccaucgcuggauggcuccugggcaauccggagugugaccgccugcucagagugcccgaauggucuuacaucauggagaaagagaacccucgguauagccugugcuaccccggguccuuuaaugauuaugaagaacuuaagcaucugcucucuagcgucaagcacuucgaaaaagugaagauucugccuaaagaccgcuggacacaacauaccacaaccggaggcuccauggccugugccguuucuggcaagcccagcuuuuucagaaacaugguguggcuuacgaccaaagggccuaauuacccggucgcucagggauccuauaacaauacaagcggcgagcagaugcugaucauuuggggagugcaccaccccaacgaugaggccgaacagcgggcucucuaccaaaagguugggaccuacgugucugccuccacaagcacccuguauaagcgcucuaucccugagauugcggccagacccaaagucaauggccuggggucccggauggaauuuagcuggacgcuccuggacaugugggauacaaucaacuucgagucuaccggaaaucuuguggcuccugaauacggcuuuaagaucuccaaacgcggcagcuccgggauuaugaagacagagggaacccuggagaacugcgaaaccaaaugucagacaccccucggcgccaucaacacgacccugccguuccauaaugugcacccucuuacaauuggggagugccccaaguaugucaaaucugaaaagcugguucucgcuaccggacugagaaacgugccucagaucgagagccggggccuguuuggggccauugcgggauucaucgaaggcggcuggcaggggaugguggacggaugguacggcuaucaucacuccaaugaucaagggagcggauacgccgcugacaaggagucuacacagaaagccuuugauggcaucaccaacaaggucaauuccgugauugagaaaaugaacacgcaguucgaagcuguugggaaggaguuuagcaaucucgaaaaacgccuggagaaccuuaauaagaagauggaagacggcuuccuggacguguggacauauaacgccgagcuccugguccuuauggagaaugaaagaacccuggauuuccacgacucuaacgugaaaaaucucuacgauaagguucggaugcagcugcgcgacaacgugaaagagcugggaaauggcuguuuugaguucuaccauaagugcgauaacgaguguauggacagcgucaaaaacgggaccuaugauuaccccaaguaugaggaagaguccaagcucaauagaaacgaaaucaaaggagugaagcugucuagcaugggcgucuaccaaauucuugccaucuaugcuacaguggcggggucccugagccucgccauuaugauggcuggaaucucuuuuuggaugugcuccaauggcagccugcagugccggaucuguauuuga

SEQ ID NO: 201765 - RNA, 1689 nt, Artificial Sequence
  derived and/or modified CDS sequence (opt5) from hemagglutinin__InfluenzaA__AFV53249
auggccaucauuuaccugauccuccuguucgcuaccgugagaggcgaccagauuugcaucggguaucacgccaacaauagcacagagacggucgauaccauucuugaacggaacguuacagugacccaugcgaaggacauccuggagaaaacacacaauggaaagcucuguaaacugaacggcauucccccucuugaacugggggauugcuccaucgcuggauggcuccugggcaauccggagugugaccgccugcucagagugcccgaauggucuuacaucauggagaaggagaacccucgguauagccugugcuaccccgggucccuuaaugauuaugaggaacugaaacaucuccugucuagcgucaagcacuuugaaaaggugcgcauucuuccuaaagacagauggaccaaccauacaaccacgggaggcuccaaggccugugccguuucuggcgagcccagcuucuuucggaauaugguguggcugaccaaaaaggggccuaacuacccggucgcuaaaggauccuauaauaacacaagcggcgagcaaaugcucaucauuuggggagugcaccaccccaaugaugaagccgagcagcgcgcucuguaccagaagguugggaccuacgugucugccuccacaagcacccuguauaagagaucuaucccugaaauugcggcccggcccaaagucaacggccucgggucccgcauggaguucagcuggacgcugcuuaaugugugggacacaaucaacuuugaaucuaccggaaaccugguggcuccugaguacggcuucaagaucuccaaaagaggccggagcgggauuaugaagacagagggaacccucggcaauugcgaaaccaaaugucagacaccccugggggccaucaacacgacccuuccguuucauaauguccacccucugacaauuggagagugccccaaguauguuaaauccgaaaagcucgugcuggcuaccggccugcgcaacgugccucaaaucgagucuagaggacucuucggggccauugcgggcuuuaucgaaggcggguggcagggaauggucgauggcugguacggguaucaucacagcaaugaccagggauccggcuacgccgcugauaaggagagcacacagaaagccuucgacgggaucaccaacaagguuaauucugugauugagaaaaugaacacgcaauuugaagcugugggcaaggaguucaauaaccuggaaaaacggcuugagaaucugaacaagaagauggaagauggauuucucgacgucuggacauauaaugccgagcugcuugugcugauggagaacgaacgcacccucgacuuccacgauuccaauguuaaaaaccuguacgagaaggugagaaugcagcugcgggacaacgucaaagaacucggcaauggguguuucgaguuuuaccauaagugcgaugacgaguguaugaacagcgugaaaaauggaaccuaugauuaccccaaguaugaagaggaaucuaagcugaaaagaaacgagaucaagggcgucaaacuuagcuccauggggguguaccagauucuggccaucuaugcuacaguugcgggaucucucagccuggccauuaugguggcuggcaucuccuucuggaugugcagcaaugggucucugcagugccgcaucuguauuuga

SEQ ID NO: 201766 - RNA, 1698 nt, Artificial Sequence
  derived and/or modified CDS sequence (opt5) from hemagglutinin__InfluenzaA__AFV53260
augaaggccaaacugcucauccugcuuugcgcucugagcgccaccgacgcggauacaauuuguaucggcuaccacgcuaacaauuccacggacaccguggauacaguccucgagaagaacguuaccgugacacauucugugaaucugcuugaagacagccacaacgggaaacugugcagacucaagggaaaagccccgcugcagcugggcaauuguaacauugccggguggguccucggaaauccugagugcgaaucccugcuuucuaaccggagcugguccuauaucgcugagacccccaauucugaaaacggcacauguuaccccggggauuucgccgacuaugaggagcugcgcgaacaacucagcuccgugagcucuuuugagagauucgaaauuuuuccuaaggagcgguccuggcccaaucauaccacgcgcggaguuaccgcugccugcccucacgcgaugaaaagcucuuucuacaagaaccugguguggcuuacagaggccaauggcuccuaucccaaccugagcagaucuuacgucaauaaccaggaaaaggaggugcucguucuguggggcgugcaucacccuuccaacaucgaagaucagcggacccuguaucgcaaagacaaugcuuacgucagcgugguguccucuaacuacaauagacgguuuacaccggagaucgccaagcgccccaaagucagagggcagagcggacggauuaacuauuacuggacccuccuggaaccuggcgauacgaucauuuucgaggcuacagggaaucuuaucgcccccugguaugcguuugcccugucccgcggaccuggcagcgggauuaucaccucuaacgcuccccucgacgagugugauacaaagugccaaaccccgcagggagccauuaauuccagccugccuuuccagaacauccaccccguuaccaucggcgaauguccuaaguacgugagaucuacaaaacuucggauggugacgggccugcgcaauauucccagcuuucaguccagaggacucuucggggcuaucgccggcuuuauugaagggggauggaccggcaugauggacgggugguauggauaccaucaccaaaacgagcagggcucuggcuaugccgcugaucaaaagagcacacagaaugcgaucaacgggauuaccaauaaagucaacuccgugaucgagaagaugaauacacaguucaccgccguuggaaaagaauuuaacaagcuggagaaacggauggagaaccugaauaagaagguggacgacggcuuccucgauaucuggacguacaacgcugaacugcuuguccugcucgagaaugaaagaacacuggacuuccaugauagcaacgugaaaaaucuuuacgagaagguuaaaaaccagcugcgcaauaacgccaaggaacucgggaauggaugcuuugaguucuaucacaaaugugacaacgagugcauggaaucugugaagaauggcaccuacgauuaucccaaguacuccgaggaaagcaaacugaaccgggagaagauugacggggucaaacuggagucuaugggcguguauagaauccucgccauuuacuccaccgucgcuagcucccuggugcuucugguuucucucggagccaucagcuuuuggaugugcuccaauggcucucugcagugucgcauuugcaucuga

SEQ ID NO: 201767 - RNA, 1689 nt, Artificial Sequence
  derived and/or modified CDS sequence (opt5) from hemagglutinin__InfluenzaA__AFV53271
auggccaucaccuaccugauucuccuguucacagcugugagaggcgaccagaucugcauuggguaucacgccaacaauagcacggagaaggucgauaccauccuugaacggaacguuacagugacccaugcgaaagacauucuggagaagacacacaauggaaaacucuguaagcugaacggcauucccccucuugaacugggggauugcuccaucgcuggauggcuccugggcaauccggagugugaccgcuuucugagagugcccgaauggucuuacaucauggagaaagagaacccucgguauagccucugcuaccccggguccuucaaugauuaugaagaacugaagcaucuucugucuagcgucaagcacuuugaaaaagugaagauccucccuaaagacggauggacccaacauacaaccacgggcggcuccauggccugugccguuucugggaagcccagcuucuuucgcaacaugguguggcugaccgagaaaggacagaauuacccugucgcuaagggcuccuauaacaauacaagcggggagcagaugcuuauuaucuggggagugcaccacccgaacgaugaagccgagcagagagcucuguaccaaaagguuggcaccuacgugucugccuccacaagcacccucaauaaacggucuacgcccgaaauugcggcccgcccuaaggucaacgggcugggauccagaauggaguucagcuggacacugcucgacaugugggauaccaucaauuuugaaucuacaggcaaccugguggcucccgaguauggcuucaaaauuuccaagcgggggagcuccggaaucaugaaaaccgagggcacccuugaaaacugcgagacaaagugucagacgccucugggggccaucaauaccacacuccccuuucauaacgugcacccgcugaccauuggagaaugcccuaaauacgucaagucugagaaacuuguucuggcuacaggccuccgcaauaucccccagauugaaagcagagggcuguucggagccaucgcgggcuuuauugagggcggguggcagggaaugguggacggcugguauggguaccaucacuccaacgaucaaggaagcggcuaugccgcugacaaggagucuacccagaaggccuucgaugggaucacgaauaaagugaacuccgucaucgaaaagaugaauacacaguuugaggcugugggcaaagaguucagcaaccuggagaagcggcucgaaaaucugaacaagaaaauggaggacggauuccuugacguuuggaccuacaaugccgagcugcucgugcugauggaaaacgagcgcacccuugauuuucacgacucuaaugucaagaaccuguaugauaaagugagaaugcagcuccgggacaauguuaaggaacugggcaacggguguuucgaguuuuaccauaaaugcgauaacgaguguauggacagcgugaagaauggaacauacgauuauccuaaguacgaagaggaauccaaacugaaccgcaaugagauuaagggcgucaaacucucuagcauggggguguaucaaauccuggccauuuacgcuaccgucgcgggaucccuuagccuggccaucaugauggcuggcauuucuuucuggaugugcuccaacgggagccuccagugcagaaucuguaucuga

SEQ ID NO: 201768 - RNA, 1689 nt, Artificial Sequence
  derived and/or modified CDS sequence (opt5) from hemagglutinin__InfluenzaA__AFV53282
auggccaucauuuaccugauccuccuguucaccgcugugagaggcgaccagauuugcaucggguaucacgccaacaauagcacagagaaggucgauacgauucuugaacggaacguuaccgugacacaugcgaaagacauccuggagaagacccacaauggaaaacucuguaagcugaacggcauucccccucuugaacugggggauugcuccaucgcuggauggcuccugggcaauccggagugugaccgccugcucucugugcccgaauggagcuacaucauggagaaagagaacccuagagaugggcugugcuaucccggauccuuuaaugacuacgaagaacuuaagcaucugcucucuagcgucaagcacuucgaaaaagugaagauucugccuaaagaucgguggacacaacauaccacaaccggcggcucccgcgccugugccguuucugggaaccccagcuuuuucagaaauaugguguggcuuacgaagaaaggaaccaacuauccugucgcuaagggcuccuacaauaacacaagcggggagcagaugcugaucauuuggggagugcaccacccgaaugacgagaccgaacagcggacacucuaucagaacguuggcaccuacgugucugucgggacguccacacugaauaagcgcagcacccccgagaucgccacaagaccuaaagugaacggacugggcucucggauggaauuuuccuggacccuccuggauaugugggacaccauuaacuucgagagcacaggcaaucuuaucgcucccgaauacggguuuaagaucucuaaacgcggauccagcggcauuaugaagacggaggggacccuggagaacugcgaaacaaaaugucaaaccccucucggagccaucaauacaacccugcccuuccauaacgugcacccgcuuacgauuggcgagugcccuaaguaugucaaacuggaaaagcucguucuggcgacagggcugagaaaugugccccagaucgagucccggggacucuuuggcgccauugcuggcuucaucgaagggggauggcagggcaugguggaugggugguacggauaucaucacucuaacgaccagggcagcggguacgccgcugauaaggaguccacccaaaaagccuuugacgucaucaccaauaaggugaacagcguuauugagaaaaugaauacacaguucgaagcggugggcaaggaguuuucuaaccuggaacgcagacuugagaaucugaacaaaaagauggaagacggauuccucgaugucuggaccuauaaugccgagcugcuugugcugauggagaacgaacggacacucgacuuccacgauuccaauguuaagaaccuguacgacaaagugcgcaugcagcugagagauaacgucaaggagcucggcaauggguguuuugaguucuaucauaaaugcgacgaugaguguaugaacagcgugaagaauggaacguacgacuacccuaaauaugaggaagagucuaagcugaaccggaaugaaaucaagggcgucaaacuuagcuccauggggguguaccagauucuggcuaucuaugccaccguugcuggaucucucagccuggccauuaugauggccggcaucuccuuuuggaugugcagcaacgggucucugcaaugcagaaucuguauuuga

SEQ ID NO: 201769 - RNA, 1689 nt, Artificial Sequence
  derived and/or modified CDS sequence (opt5) from hemagglutinin__InfluenzaA__AFV53293
auggccaucauuuaccugauccuccuguucaccagcgugagaggcgaccagauuugcaucggguaucacgcuaacaauuccacagagaaggucgauacgauucuugaacggaacguuaccgugacacaugccaaaaauauccuggagaagacccacaacggaaaacucuguaagcugaauggcauucccccucuugaacugggggacugcucuaucgcgggauggcuccugggcaacccggagugugaucgccugcucagagugcccgaauggagcuacaucauggagaaagagaauccuaaguauucccugugcuaccccgggucuuuuaacgacuaugaggaacuuaagcaucugcucagcuccgucaaacacuucgaaaaggugaaaauucugccuaaggauggauggacacaacauaccacaaauggcggcucucgggcuugugccguuagcgggaaccccuccuuuuuccgcaauaugguguggcuuaccaaaaagggaccuaacuacccggucgccaagggcagcuauaauaacacgucuggggagcagaugcugaucauuuggggagugcaccaccccaaugacgaggcugaacagagagcccucuaccaggagguuggcaccuacguguccgcuagcacaucuacccugaacaaacgguccacaccugaaaucgccgcgcgccccaaggucaacgggcugggaagcagaauggaguuuucuuggacccuccuggauaugugggacacgauuaauuucgaauccacaggcaaccuuguggccccugaguauggcuuuaaaaucagcaagcggggguccucuggagugaugaaaaccgagggcacacuggaaaauugcgagaccaagugucaaacaccccucggggcuaucaacaccacgcugccguuccauaauguccacccucuuaccauuggagaaugccccaaauacguuaagagcgagaagcuggugcucgccacaggccugcgcaacgugccucagaucgaauccagagggcuguuuggagcuauugccggcuucaucgagggcggguggcagggaauggucgauggcugguauggguaccaucacagcaaugaccagggaucuggcuaugcggccgauaaagaguccacccaaaaggcuuuugacgggauuacaaacaaagugaauagcguuaucgaaaagaugaacacccaguucgaggccgugggcaaagaauuuucuaaucucgagaagcggcuggaaaaccuuaauaagaaaauggaggauggauuccuggacgucuggacguacaacgcugagcuccuggugcuuauggaaaaugagcgcacacuggacuuccacgauagcaacguuaagaaccucuaugacaaagugagaaugcagcugcgggauaaugucaaggaacugggcaacggguguuuugaguucuaccauaaaugcgacgaugaguguauggacuccgugaagaauggaaccuacgauuaucccaaguacgaagaggaaucuaaacucaaccgcaaugagaucaagggcgucaaacugagcuccauggggguguaucagauucuugccaucuacgccaccguugcuggaagccugucucucgcgauuaugauggccggcaucuccuuuuggaugugcagcaacgggucucugcaaugcagaauuuguaucuga

SEQ ID NO: 201770 - RNA, 1689 nt, Artificial Sequence
  derived and/or modified CDS sequence (opt5) from hemagglutinin__InfluenzaA__AFV53304
auggccaucauuuaccugauccuccuguucaccgcugugagaggcgaccagauuugcaucggguaucacgccaacaauagcacagagaaggucgauacgauucuugaacaaaacguuaccgugacacaugcgaaagacauccuggagaagacccacaauggaaaacucuguaagcugaacggcauucccccucuugaacugggggauugcuccaucgcuggauggcuccugggcaauccggagugugaccggcugcucucugugcccgaauggagcuacaucauggagaaagagaacccucgcgaugggcugugcuaucccggauccuuuaaugacuacgaagaacuuaagcaucugcucucuagcgucaagcacuucgaaaaagugaagauucugccuaaagauagauggacacagcauaccacaaccggcggcucccgggccugugccguuucugggaaccccagcuuuuuccgcaauaugguguggcuuacgaagaaagaguccaacuauccugucgcuaagggaagcuacaauaacaccucuggcgagcagaugcugaucauuuggggagugcaccacccgaaugacgaaacagagcagagaacccucuaucaaaacguugggacauacguguccgucggcaccagcacgcugaauaagcggucuacacccaacaucgccacccgcccuaaagugaacgggcugggauccagaauggaauuuagcuggacacuccuggauaugugggacaccauuaauuucgagucuaccggcaaccuuaucgcucccgaauacggcuuuaagaucuccaaacgggggagcuccggaauuaugaagacagagggcacgcuggagaauugcgaaaccaaaugucagacaccucucggggccaucaacaccacacugcccuuccauaaugugcacccgcuuaccauuggagagugcccuaaguaugucaaaucugaaaagcugguucucgcgacgggccugcgcaacgugccccagaucgagagcagagggcuguuuggagccauugcuggcuucaucgaaggcggguggcagggaaugguggauggcugguacggguaucaucacuccaaugaccaaggaagcggcuacgccgcugauaaggagucuacacagaaagccuuugacgggaucaccaacaaggucaauuccgugauugagaaaaugaacacccaguucgaagcgguuggcaaggaguuuagcaaucucgaacggcgccuggagaaccuuaauaaaaagauggaagacggauuccuggauguguggacauauaacgccgagcuccugguccuuauggagaaugaaagaacccuggacuuccacgauucuaacgugaagaaccucuacgacaaaguucggaugcagcugcgcgauaaugugaaggagcugggcaacggguguuuugaguucuaucauaaaugcgacgaugaguguaugaauagcgucaagaacggaacauacgacuacccuaaauaugaggaagaguccaagcucaauagaaacgaaaucaagggcgugaaacugucuagcaugggggucuaccaaauucuugcuaucuaugccacgguggcuggaucccugagccucgccauuaugauggccggcaucucuuuuuggaugugcuccaaugggagccugcagugccggaucuguauuuga

SEQ ID NO: 201771 - RNA, 1689 nt, Artificial Sequence
  derived and/or modified CDS sequence (opt5) from hemagglutinin__InfluenzaA__AFV53314
auggccaucauuuaccugauccuccuguucaccgcugugagaggcgacaagauuugcaucggguaucacgccaacaauagcacagagacggucgauaccauucuugaacggaacguuacagugacccaugcgaaagacauccuggagaagacacacaauggaaaacucuguaagcugaacggcauucccccucuugaacugggggauugcuccaucgcuggauggcuccugggcaauccggagugugaccgccugcucucugugcccgaauggagcuacaucauggagaaagagaacccuagaaaugggcugugcuaucccggaaacuuuaaugauuacgaggaacuuaagcaucugcucuccucugucaagcacuucgaaaaagugaagauucugccuaaagaccgguggacccagcauacaaccacgggcggcagccaagccugugccguuuccgggaaccccagcuuuuuccgcaauaugguguggcuuaccgagaaggagucuaacuauccugucgcuaaaggauccuacaauaacacaagcggcgaacagaugcugaucauuuggggagugcaccacccgaucgaugagaccgaacagagaacacucuaucagaauguugggaccuacgugucugucggcacguccacacugaacaagcggagcacccccgagauugccaagcgcccuaaagugaacgggcugggaucuagaauggaauuuuccuggacacuccuggacaugugggauaccaucaccuucgagagcacaggcaaucuuaucgcucccgaguacggcuuuaagauuucuaaacggggguccagcggaaucaugaagacggaaggcacccuggagaacugcgaaacaaaaugucaaaccccucucggggccauuaauacaacccugcccuuccauaacgugcacccgcuuacgaucggagagugcccuaaguaugucaaauccgaaaagcugguucucgcgacaggccugcgcaaugugccccagauugagucuagagggcuguuuggagccaucgcuggcuucaucgagggcggguggcagggaaugguggacggcugguacggguaucaucacagcaacgaucagggauccggcuacgccgcugacaaggaaagcacccaaaaagccuuugaugggauuaccaauaaggucaacgcggugaucgagaaaauuaauacacaguucgaagccguuggcaaggaguuuucuaaccucgaacggcgccuggagaaucuuaacaaaaagauggaggacggauuccuggacguguggaccuauaaugcugaacuccugguccuuauggagaacgaaagaacacuggauuuccacgacuccaaugugaagaaccucuacgauaaaguucggaugcagcugcgcgacaacgugaaggagcugggcaauggguguuuugaguucuaucauaaaugcgaugacgaauguaugaacagcgucaagaauggaacguacgauuacccuaaauaugaggaagagucuaagcucaacagaaaugaaaucaagggcgugaaacugagcuccaugggggucuaccagauucuugccaucuaugcuaccguggccggaucucugagccucgccaucaugauggcuggcauuuccuuuuggaugugcagcaacgggucucugcaaugccggaucuguauuuga

SEQ ID NO: 201772 - RNA, 1689 nt, Artificial Sequence
  derived and/or modified CDS sequence (opt5) from hemagglutinin__InfluenzaA__AFV53325
auggccaucauuuaccugauccuccuguucaccgcugugagaggcgaccagauuugcaucggguaucacgccaacaauagcacagagaaggucgauacgauucuugaacggaacguuaccgugacacaugcgaaagacauccuggagaagacccacaauggaaaacucuguaagcugaacggcauucccccucuugaacugggggauugcuccaucgcuggauggcuccugggcaauccggagugugaccgccugcucucugugcccgaauggagcuacaucauggagaaagagaacccuagagaugggcugugcuaucccggauccuuuaaugacuacgaagaacuuaagcaucugcucucuagcgucaagcacuucgaaaaagugaagauucugccuaaagaucgguggacacaacauaccacaaccggcggcucccgcgccugugccguuucugggaaccccagcuuuuucagaaauaugguguggcuuacgaagaaaggauccaacuauaccgucgcuaagggcagcuacaauaacacaucuggggagcagaugcugaucauuuggggagugcaccacccuaaugacgagaccgaacagcggacacucuaucagaacguuggcaccuacguguccgucagcacgucuacacugaauaagcgcuccaccccggagaucgccacaagacccaaagugaacgggcugggaagccggauggaauuuucuuggacccuccuggauaugugggacaccauuaacuucgaguccacaggcaaucuuaucgcuccugaauacggcuuuaagaucagcaaacgcggguccucuggaauuaugaagacggagggcacccuggagaacugcgaaacaaaaugucaaacaccccucggggccaucaauaccacccugccuuuccauaacgugcacccccuuacgauuggagagugcccgaaguaugucaaaagcgaaaagcugguucucgcgacaggccugagaaaugugccucagaucgagucccgggggcuguuuggagccauugcuggcuucaucgaaggcggguggcagggaaugguggauggcugguacggguaucaucacagcaacgaccagggaucuggcuacgccgcugauaaggaguccacccaaaaagccuuugacgggaucaccaauaaggucaacagcgugauugagaaaaugaauacacaguucgaagcgguuggcaaggaguuuucuaaccucgaacgcagacuggagaaucuuaacaaaaagauggaagacggauuccuggauguguggaccuauaaugccgagcuccugguccuuauggagaacgaacggacacuggacuuccacgauagcaaugugaagaaccucuacgacaaaguucgcaugcagcugagagauaacgugaaggagcugggcaauggguguuuugaguucuaucauaaaugcgacgaugaguguaugaacuccgucaagaauggaacguacgacuaccccaaauaugaggaagagucuaagcucaaccggaaugaaaucaagggcgugaaacugagcuccaugggggucuaccagauucuugcuaucuaugccaccguggcuggaagccugucucucgccauuaugauggccggcaucuccuuuuggaugugcagcaacgggucucugcaaugcagaaucuguauuuga

SEQ ID NO: 201773 - RNA, 1689 nt, Artificial Sequence
  derived and/or modified CDS sequence (opt5) from hemagglutinin__InfluenzaA__AFV53336
auggccaucauuuaccugauccuccuguucaccgcugugagaggcgaccagauuugcaucggguaucacgccaacaauagcacagagaaggucgauacgauucuugaacggaacguuaccgugacacaugcgaaagacauccuggagaagacccacaauggaaaacucuguaagcugaacggcauucccccucuugaacugggggauugcuccaucgcuggauggcuccugggcaauccggagugugaccgccugcucagagugcccgaauggucuuacaucauggagaaagagaacccucgguauagccugugcuaccccggguccuuuaaugauuaugaagaacuuaagcaucugcucucuagcgucaagcaccuggaaaaagugaagauucuuccuaaagacggauggacacaacaugagaccgauggcggcuccaaggccugugccguuucugggaaacccagcuucuuucgcaacaugguguggcugacaaagaagggaccuaauuacccggucgcuaaaagauccuauaacaauaccagcggcgagcagaugcucaucauuuggggagugcaccaccccaacgacgaagccgagcagcgggcucuguaccagaagguugggacguacgugucugccuccaccagcacacugaauaaacgcucuaccccugaaaucgcggccagacccgaggucuccggccucgggagccggauggaguucucuuggacacugcuugaugugugggacaccauuuccuuugagagcacgggaaaccugguggcuccugaguauggcuucaagaucuccaaacgcggcucuagcgggaucaugaagacagaaggaacccucggcaauugcgagacaaaaugucaaacaccccugggggccauuaacaccacccuuccguuucauaacguccacccucugacgaucggagaaugccccaaguacguuaaguccgagaaacucgugcuggcuaccggccugagaaaugugccucagauugaaagccggggacucuucggggccaucgcgggcuuuauugagggcggguggcagggaauggucgauggcugguauggguaccaucacucuaacgaccagggauccggcuaugccgcugauaaggagagcacacaaaaagccuucgaccgcaucaccaauaaggugaacucuguuaucgagaaaaugaauacacaguuugaagcuguggggaaggaguucagcaaccuggaaaagagacuugaaaaucugaacaaaaagauggaggacggcuuucucgaugucuggaccuacaaugccgagcugcuugugcugauggaaaacgagcggauucucgacuuccacgauuccaauguuaaaaaccuguaugacaaggugcgcaugcagcugagagauaaugucaaagaacucggaaacggcuguuucgaguuuuaccauaagugcgacgaugaguguaugaacucugugaagaaugggacguacgacuaucccaaauacgaagaggaaagcaagcugaaacggaacgagaucaagggagucaaacuuuccagcaugggcguguaucagauucuggccaucuacgcuacaguugcggggucucucucccuggccauuaugaucgcuggaaucagcuucuggaugugcucuaauggcucccugcaaugcagaauuuguaucuga

SEQ ID NO: 201774 - RNA, 1701 nt, Artificial Sequence
  derived and/or modified CDS sequence (opt5) from hemagglutinin__InfluenzaA__AFV68720
augaagaccaucauugcccugagcuacauccucugccugguguucgcucagaaacuucccggcaacgacaauuccacagccacgcugugucucgggcaccaugcggucccuaacggaaccauuguuaagacaaucaccaaugaucaaauugaggugacaaacgcuaccgaacuggugcagucuagcuccacaggcgagaucugcgacucuccgcaccagauccuugauggggaaaauuguacccugauugacgcccuccugggagauccccagugcgacggcuuucaaaacaaaaagugggaucuguucgucgagagaagcaaagccuauuccaauuguuacccuuaugacgugcccgauuacgcuucucuccggagccugguugccuccagcgggacgcuugaauuuaacaaugagucuuucaacuggaccggagugacacagaauggcaccuccagcgcuugcauccgcagaucugacuccagcuuuuucucucggcugaacuggcucacacaucugaauuuuaaguauccugcccuuaacgucaccaugcccaauaacgagcaguucgauaagcuguacauuuggggcgugcaccauccugggacggacaaagaucagaucuuucucuaugcgcaagccuccggacgcauuacaguuagcaccaagagaucccagcaggcugugaucccgaacauuggcucucggccccgcaucagaaauaucccuagccggauuuccaucuacuggacaauugucaaacccggggacauccugcugauuaacagcaccggaaaucucaucgccccucgcggcuacuucaagaucagaucugggaaauccagcauuaugcggucugacgcucccaucggaaaguguaacagcgaaugcauuaccccgaauggcuccaucccuaacgauaagcccuuucagaaugugaaccgcauuacauauggcgccuguccuagauacgugaaacaaaauacgcugaagcuggcgaccgggaugcggaacguccccgagaaacagacacgcggaaucuucggcgccaucgcuggguuuauugaaaauggaugggagggcaugguugacgggugguauggauucagacaccagaacucugagggccggggccaagccgcugaucuuaagagcacccaggccgccaucgaccagauuaaugggaaacucaacagacugaucggaaagacaaaugaaaaauuccaccagauugagaaggaauuuuccgagguggaaggccgcauccaagaucuugagaaguacguggaggacaccaaaauugaucuguggagcuauaacgcugaacuccuggucgcgcuggagaaccagcauacgaucgaccucacagauucugaaaugaauaagcuguucgagaaaaccaagaaacagcuucgggaaaacgccgaggacauggggaauggaugcuuuaagaucuaccacaagugugauaacgcuugcauuggcuccaucagaaaugggaccuauaaccaugacguguaccgcgacgaggcccugaauaaccgguuccagauuaaaggcguugaacucaagagcggauacaaagauuggauccuguggauuucuuuugccaucuccugcuuccuucuguguguggcucuccugggcuuuaucaugugggccugccaaaaggggaauauuagauguaacaucugcauuuga

SEQ ID NO: 201775 - RNA, 1701 nt, Artificial Sequence; identical to SEQ ID NO: 194741
  derived and/or modified CDS sequence (opt5) from hemagglutinin__InfluenzaA__AFX96347

SEQ ID NO: 201776 - RNA, 1701 nt, Artificial Sequence
  derived and/or modified CDS sequence (opt5) from hemagglutinin__InfluenzaA__AFX96359
augaaggccauccuggugguccuccuguacaccuucgcuacagccaacgcggacacgcuuugcauuggcuaucacgcuaauaacagcaccgauacaguugacaccgugcuggagaagaaugugacagucacccauuccgugaaccuccuggaagauaagcacaaugggaaacuuuguaagcugagaggaguugcuccccuccaucugggcaaaugcaacaucgccggguggauucugggaaauccugagugugaaucucucagcacagccuccucuuggagcuacaucguggagaccuccucuagcgacaacggcacgugcuauccgggggauuuuauugacuacgaagaacugcgggagcagcuuuccagcgucucuuccuucgaacgcuuugagaucuuccccaagaccagcucuuggccuaaucacgauuccaacaagggagugacagccgcuuguccccaugccggcgcgaaaucuuuuuauaagaaucugaucuggcucguuaaaaagggcaacagcuacccuaaacuguccaagagcuauauuaaugacaaggggaaagaagugcuuguccuguggggaauccaccaccccuccaccucugccgaucaacagagccucuaccagaacgcugacacauacguguucgugggcaccuccagauauagcaagaaauuuaagccugagauugccauccggccgaaaguccgcgaucaggaggggagaaugaauuacuauuggacgcugguugaacccggagacaagauuacauucgaggcuaccggcaaccugguggugccucgguacgccuuugcgauggaacgcaacgccgggucuggaaucauuaucuccgauacacccguccaugacugcaauaccaccugucaaacaccuaaaggcgcuaucaacacgagccuccccuuccagaauauucacccgaucaccauuggcaagugcccuaaguaugugaaaucuacaaagcugagacuugccaccgggcugcggaacguucccagcauccagucccgcggacucuuuggcgcuauugccggguucaucgagggaggcuggacagggaugguggacggaugguacggcuaucaucaccagaaugaacaaggcucuggguacgccgcugaucugaaaagcacccagaacgcgaucgacgagauuacgaauaaggucaacuccgugaucgagaaaaugaauacacaguuuaccgccguuggaaaggaguucaaccaccuugagaagagaauugaaaaucugaacaaaaagaucgaugacggcuuccucgauauuuggaccuacaaugcugagcugcuggugcuccuggaaaacgagcggacacuugacuaucaugauagcaaugucaaaaaccuguacgagaaggugcgcucucagcucaaaaacaaugccaaggaaaucgggaacggauguuuugaguucuaucacaagugcgacaauaccuguauggaauccgucaaaaacggcacauacgauuauccuaaguacagcgaggaagccaaacugaauagagaggagaucaacggggugaaacuugaaucuacgcggauuuaucaaauccuggcuauuuacuccaccguugccagcucccucgugcuggucgugucucugggcgcgaucagcuuuuggaugugcuccaauggaucucuccagugccgcauuuguaucuga

SEQ ID NO: 201777 - RNA, 1701 nt, Artificial Sequence
  derived and/or modified CDS sequence (opt5) from hemagglutinin__InfluenzaA__AFX96366
augaaggccauccuggugguccuccuguacaccuucgcuacagccaacgcggacacgcuuugcauuggcuaucacgcuaauaacagcaccgauacaguugacaccgugcuggagaaaaaugugacagucacccauuccgugaaccuccuggaagauaagcacaaugggaaacuuuguaagcugagaggaguugcuccccuccaucugggcaaaugcaacaucgccggguggauucugggaaauccugagugugaaucucucagcacagccuccucuuggagcuacaucguggagaccuccucuagcgacaacggcacgugcuauccgggggauuuuauugacuacgaagaacugcgggagcagcuuuccagcgucucuuccuucgaacgcuuugagaucuuccccaagaccagcucuuggccuaaucacgauuccaacaagggagugacagccgcuuguccccaugccggcgcgaaaucuuuuuauaagaaucugaucuggcucguuaaaaagggcaacagcuacccuaaacuguccaagagcuauauuaaugacagagggaaggaagugcuuguccuguggggaauccaccaccccuccaccucugccgaucaacagagccucuaccagaacgcugacgccuacguguucgugggcacaucccgguauagcaaaaaguuuaaaccugagauugcuauccgcccgaaggucagagaucaggaggggcggaugaauuacuauuggacccugguugaacccggagacaaaauuacguucgaggccacaggcaaccugguggugccucgcuacgcguuugccauggaaagaaacgcugggucuggaaucauuaucuccgauacccccguccaugacugcaauacaaccugucaaaccccuaagggcgccaucaacacaagccuccccuuccagaauauucacccgaucacgauuggcaaaugcccuaaguaugugaagucuaccaaacugcggcuugcuacagggcugcgcaacguucccagcauccaguccagaggacucuuuggcgccauugccggguucaucgagggaggcuggaccgggaugguggacggaugguacggcuaucaucaccagaaugaacaaggcucuggguacgcugcggaucuuaagagcacacagaacgccaucgacaaaauuaccaauaaggucaacuccgugaucgagaaaaugaauacgcaguuuacagcuguuggaaaggaguucaaccagcuugaaaagcggauugagaaucugaacaaaaagguggaugacggcuuccucgauaucuggaccuacaaugccgaacugcugguccuccuggagaacgaacgcacccuugacuaucacgauagcaaugugaaaaaccuguacgagaaggucagaucucaacucaaaaacaaugccaaggagauugggaacggauguuuugaguucuaucauaagugcgacaauacauguauggaguccgugaaaaacggcaccuacgauuauccuaaguacagcgaagaggcuaaacugaaucgggaagagaucgacgggguuaagcuggagucuacacgcaucuaucagauucuggccaucuacuccacgguggcgagcucccucguccuggugguuucucugggcgcuauuagcuuuuggaugugcuccaacggaucucuccagugcagaaucuguauuuga

SEQ ID NO: 201778 - RNA, 1701 nt, Artificial Sequence; identical to SEQ ID NO: 196241
  derived and/or modified CDS sequence (opt5) from hemagglutinin__InfluenzaA__AFX96383

SEQ ID NO: 201779 - RNA, 1701 nt, Artificial Sequence; identical to SEQ ID NO: 194741
  derived and/or modified CDS sequence (opt5) from hemagglutinin__InfluenzaA__AFX96398

SEQ ID NO: 201780 - RNA, 1701 nt, Artificial Sequence; identical to SEQ ID NO: 194741
  derived and/or modified CDS sequence (opt5) from hemagglutinin__InfluenzaA__AFX96408

SEQ ID NO: 201781 - RNA, 1701 nt, Artificial Sequence; identical to SEQ ID NO: 194741
  derived and/or modified CDS sequence (opt5) from hemagglutinin__InfluenzaA__AFX96418

SEQ ID NO: 201782 - RNA, 1701 nt, Artificial Sequence; identical to SEQ ID NO: 194741
  derived and/or modified CDS sequence (opt5) from hemagglutinin__InfluenzaA__AFX96428

SEQ ID NO: 201783 - RNA, 1701 nt, Artificial Sequence; identical to SEQ ID NO: 194741
  derived and/or modified CDS sequence (opt5) from hemagglutinin__InfluenzaA__AFX96438

SEQ ID NO: 201784 - RNA, 1701 nt, Artificial Sequence; identical to SEQ ID NO: 194741
  derived and/or modified CDS sequence (opt5) from hemagglutinin__InfluenzaA__AFX96448

SEQ ID NO: 201785 - RNA, 1701 nt, Artificial Sequence; identical to SEQ ID NO: 194741
  derived and/or modified CDS sequence (opt5) from hemagglutinin__InfluenzaA__AFX96458

SEQ ID NO: 201786 - RNA, 1701 nt, Artificial Sequence; identical to SEQ ID NO: 194741
  derived and/or modified CDS sequence (opt5) from hemagglutinin__InfluenzaA__AFX96468

SEQ ID NO: 201787 - RNA, 1701 nt, Artificial Sequence; identical to SEQ ID NO: 194741
  derived and/or modified CDS sequence (opt5) from hemagglutinin__InfluenzaA__AFX96478

SEQ ID NO: 201788 - RNA, 1701 nt, Artificial Sequence; identical to SEQ ID NO: 194741
  derived and/or modified CDS sequence (opt5) from hemagglutinin__InfluenzaA__AFX96488

SEQ ID NO: 201789 - RNA, 1701 nt, Artificial Sequence
  derived and/or modified CDS sequence (opt5) from hemagglutinin__InfluenzaA__AFX96498
augaaggccauccuggugguccuccuguacaccuucgcuacagccaacgcggacacgcuuugcauuggcuaucacgcuaauaacagcaccgauacaguugacaccgugcuggagaaaaaugugacagucacccauuccgugaaccuccuggaagauaagcacaaugggaaacuuuguaagcugagaggaguugcuccccuccaucugggcaaaugcaacaucgccggguggauucugggaaauccugagugugaaucucucagcacagccuccucuuggagcuacaucguggagaccuccucuagcgacaacggcacgugcuauccgggggauuuuauugacuacgaagaacugcgggagcagcuuuccagcgucucuuccuucgaacgcuuugagaucuuccccaagaccagcucuuggccuaaucacgauuccaacaagggagugacagccgcuuguccccaugccggcgcgaaaucuuuuuauaagaaucugaucuggcucguuaaaaagggcaacagcuacccuaaaauuuccaagagcuauaucaaugacaaggggaaagaagugcugguccuuuggggcauucaccaccccuccaccucugccgaucaacagagccuguaccagaacgcugacgccuacguguucgugggaacauccagauauagcaagaaauuuaagccugagaucgcuauucggccgaaaguccgcgaucaggaggggagaaugaauuacuauuggacccucguugaacccggagacaagaucacguucgaggccacaggcaaccugguggugccucgguacgcguuugccauggaacgcaacgcugggucuggaauuaucaucuccgauacccccguccaugacugcaauacaaccugucaaaccccuaaaggcgccauuaacacaagccugcccuuccagaauauccacccgauuacgaucggcaagugcccuaaguaugugaaaucuaccaagcucagacuggcuacagggcuucggaacguucccagcauucagucccgcggacuguuuggcgccaucgccggguucaucgagggaggcuggaccgggaugguggacggaugguacggcuaucaucaccagaaugaacaaggcucuggguacgcugcggaucucaaaagcacacagaacgccauugacgagaucaccaauaaggucaacuccgugauugagaaaaugaauacgcaguuuacagcuguuggaaaggaguucaaccaccuggagaagagaaucgaaaaucuuaacaaaaagguggaugacggcuuccuggauauuuggaccuacaaugccgagcuccugguccugcucgaaaacgagcggacccuggacuaucaugauagcaaugugaaaaaccuuuacgagaagguccgcucucagcugaaaaacaaugccaaggaaaucgggaacggauguuuugaguucuaucacaagugcgacaauacauguauggaauccgugaaaaacggcaccuacgauuauccuaaguacagcgaggaagcuaaacucaauagagaggagaucgacgggguuaagcuggaaucuacacggauuuaucaaauccuugccauuuacuccacgguggcgagcucccugguccucgugguuucucugggcgcuaucagcuuuuggaugugcuccaacggaucucugcagugccgcauuuguaucuga

SEQ ID NO: 201790 - RNA, 1701 nt, Artificial Sequence; identical to SEQ ID NO: 194741
  derived and/or modified CDS sequence (opt5) from hemagglutinin__InfluenzaA__AFX96508

SEQ ID NO: 201791 - RNA, 1701 nt, Artificial Sequence; identical to SEQ ID NO: 196241
  derived and/or modified CDS sequence (opt5) from hemagglutinin__InfluenzaA__AFX96518

SEQ ID NO: 201792 - RNA, 1701 nt, Artificial Sequence; identical to SEQ ID NO: 194741
  derived and/or modified CDS sequence (opt5) from hemagglutinin__InfluenzaA__AFX96528

SEQ ID NO: 201793 - RNA, 1701 nt, Artificial Sequence; identical to SEQ ID NO: 196241
  derived and/or modified CDS sequence (opt5) from hemagglutinin__InfluenzaA__AFX96538

SEQ ID NO: 201794 - RNA, 1701 nt, Artificial Sequence
  derived and/or modified CDS sequence (opt5) from hemagglutinin__InfluenzaA__AFX96548
augaaggccauccuggugguccuccuguacaccuucgcuacagccaacgcggacacgcuuugcauuggcuaucacgcuaauaacagcaccgauacaguugacaccgugcuggagaaaaaugugacagucacccauuccgugaaccuccuggaagauaagcacaaugggaaacuuuguaagcugagaggaguugcuccccuccaucugggcaaaugcaacaucgccggguggauucugggaaauccugagugugaaucucucagcacagccuccucuuggagcuacaucguggagaccuccucuagcgacaacggcacgugcuauccgggggauuuuauugacuacgaagaacugcgggagcagcuuuccagcgucucuuccuucgaacgcuuugagaucuuccccaagaccagcucuuggccuaaucacgauuccaacaagggagugacagccgcuuguccccaugccggcgcgaaaucuuuuuauaagaaucugaucuggcucguuaaaaagggcaacagcuacccuaaacuguccaagagcuauauuaaugacaaggggaaagaagugcuuguccuguggggaauccaccaccccuccaccucugccgaucaacagagccucuaccagaacgcugacacauacguguucgugggcaccuccagauauagcaagaaauuuaagccugagauugccauccggccgaaaguccgcgaucaggaggggagaaugaauuacuauuggacgcugguugaacccggagacaagauuacauucgaggcuaccggcaaccugguggugccucgguacgccuuugcgauggaacgcaacgccgggucuggaaucauuaucuccgauacacccguccaugacugcaauaccaccugucaaacaccuaaaggcgcuaucaacacgagccuccccuuccagaauauucacccgaucaccauuggcaagugcccuaaguaugugaaaucuacaaagcugagacuugccaccgggcugcggaacguucccagcauccagucccgcggacucuuuggcgcuauugccggguucaucgagggaggcuggacagggaugguggacggaugguacggcuaucaucaccagaaugaacaaggcucuggguacgccgcugaucugaaaagcacccagaacgcgaucgacaagauuacgaauaaagucaacuccgugaucgagaagaugaauacacaguuuaccgccguuggaaaggaguucaaccaccuugagaaaagaauugagaaucugaacaagaaaaucgaugacggcuuccucgauauuuggaccuacaaugcugaacugcuggugcuccuggagaacgaacggacacuugacuaucaugauagcaaugucaagaaccuguacgagaaagugcgcucucagcucaagaacaaugccaaggagaucgggaacggauguuuugaguucuaucacaaaugcgacaauaccuguauggaauccgucaagaacggcacauacgauuauccuaaauacagcgaagaggccaagcugaauagagaagagaucgacggggugaaacuugagucuacgcggauuuaucaaauccuggcuauuuacuccaccguugccagcucccucgugcuggucgugucucugggcgcgaucagcuuuuggaugugcuccaacggaucucuccagugccgcauuuguaucuga

SEQ ID NO: 201795 - RNA, 1701 nt, Artificial Sequence; identical to SEQ ID NO: 194741
  derived and/or modified CDS sequence (opt5) from hemagglutinin__InfluenzaA__AFX96558

SEQ ID NO: 201796 - RNA, 1701 nt, Artificial Sequence; identical to SEQ ID NO: 195901
  derived and/or modified CDS sequence (opt5) from hemagglutinin__InfluenzaA__AFX96568

SEQ ID NO: 201797 - RNA, 1701 nt, Artificial Sequence; identical to SEQ ID NO: 195901
  derived and/or modified CDS sequence (opt5) from hemagglutinin__InfluenzaA__AFX96578

SEQ ID NO: 201798 - RNA, 1701 nt, Artificial Sequence; identical to SEQ ID NO: 194741
  derived and/or modified CDS sequence (opt5) from hemagglutinin__InfluenzaA__AFX96588

SEQ ID NO: 201799 - RNA, 1701 nt, Artificial Sequence; identical to SEQ ID NO: 194741
  derived and/or modified CDS sequence (opt5) from hemagglutinin__InfluenzaA__AFX96598

SEQ ID NO: 201800 - RNA, 1701 nt, Artificial Sequence
  derived and/or modified CDS sequence (opt5) from hemagglutinin__InfluenzaA__AFX96608
augaaggccauccuggugguccuccuguacaccuucgcuacagccaacgcggacacgcuuugcauuggcuaucacgcuaauaacagcaccgauacaguugacaccgugcuggagaaaaaugugacagucacccauuccgugaaccuccuggaagauaagcacaaugggaaacuuuguaagcugagaggaguugcuccccuccaucugggcaaaugcaacaucgccggguggauucugggaaauccugagugugaaucucucagcacagccuccucuuggagcuacaucguggagaccuccucuagcgacaacggcacgugcuauccgggggauuuuauugacuacgaagaacugcgggagcagcuuuccagcgucucuuccuucgaacgcuuugagaucuuccccaagaccagcucuuggccuaaucacgauuccaacaagggagugacagccgcuuguccccaugccggcgcgaaaucuuuuuauaagaaucugaucuggcucguuaaaaagggcaacagcuacccuaaacuguccaagagcuauauuaaugacaaggggaaagaagugcuuguccuguggggaauccaccaccccuccaccucugccgaucaacagagccucuaccagaacgcugacgccuacguguucgugggcacauccagauauagcaagaaauuuaagccugagauugcuauccggccgaaaguccgcgaucaggaggggagaaugaauuacuauuggacccugguugaacccggagacaagauuacguucgaggccacaggcaaccugguggugccucgguacgcguuugccauggaacgcaacgcugggucuggaaucauuaucuccgauacccccguccaugacugcaauacaaccugucaaaccccuaaaggcgccaucaacacaagccuccccuuccagaauauucacccgaucacgauuggcaagugcccuaaguaugugaaaucuaccaagcugagacuugcuacagggcugcggaacguucccagcauccagucccgcggacucuuuggcgccauugccggguucaucgagggaggcuggaccgggaugguggacggaugguacggcuaucaucaccagaaugaacaaggcucuggguacgcugcggaucugaaaagcacacagaacgccaucgacgagauuaccaauaaggucaacuccgugaucgagaaaaugaauacgcaguuuacagcuguuggaaaggaguucaaccaccuugagaagagaauugaaaaucugaacaaaaagguggaugacggcuuccucgauaucuggaccuacaaugccgagcugcugguccuccuggaaaacgagcggacccuugacuaucaugauagcaaugugaaaaaccuguacgagaagguccgcucucagcucaaaaacaaugccaaggaaauugggaacggauguuuugaguucuaucacaagugcgacaauacauguauggaauccgugaaaaacggcaccuacgauuauccuaaguacagcgaggaagcuaaacugaauagagagaagaucgacgggguuaaacuugagucuacacggaucuaucaaauucuggccaucuacuccacgcucgcgagcucccuggugcuggucgugucucucggcgcuauuagcuuuuggaugugcuccaacggaucucugcagugccgcaucuguauuuga

SEQ ID NO: 201801 - RNA, 1701 nt, Artificial Sequence; identical to SEQ ID NO: 194741
  derived and/or modified CDS sequence (opt5) from hemagglutinin__InfluenzaA__AFX96618

SEQ ID NO: 201802 - RNA, 1701 nt, Artificial Sequence; identical to SEQ ID NO: 195901
  derived and/or modified CDS sequence (opt5) from hemagglutinin__InfluenzaA__AFX96628

SEQ ID NO: 201803 - RNA, 1701 nt, Artificial Sequence
  derived and/or modified CDS sequence (opt5) from hemagglutinin__InfluenzaA__AFX96638
augaaggccauccuggugguccuccuguacaccuucgcuacagccaacgcggacacgcuuugcauuggcuaucacgcuaauaacagcaccgauacaguugacaccgugcuggagaagaaugugacagucacccauuccgugaaccuccuggaagauaagcacaaugggaaacuuuguaagcugagaggaguugcuccccuccaucugggcaaaugcaacaucgccggguggauucugggaaauccugagugugaaucucucagcacagccuccucuuggagcuacaucguggagaccuccucuagcgacaacggcacgugcuauccgggggauuuuauuaauuacgaagaacugcgggagcagcuuuccagcgucucuuccuucgaacgcuuugagaucuuccccaagaccagcucuuggccuaaccacgacuccaauaagggagugacagccgcuuguccccaugccggcgcgaaaucuuuuuauaagaaccugguuuggcucgugaaaaagggcaauagcuacccuaaacuguccaagagcuauaucaacgauaaggggaaagaaguccuugugcuguggggcauucaccaccccuccaccucugccgaccaacagagccucuaccagaaugcugaugccuacguguucgucggaacauccagauauagcaagaaauuuaagccugagaucgcuauucggccgaaaguucgcgaccaggaggggagaaugaacuacuauuggacccugguggaacccggagauaagaucacguucgaggccacaggcaaccugauggugccucgguacgcguuugccauggaacgcaaugcugggucuggaauuaucauuuccgacacccccguccaugauugcaacacaaccugucaaaccccuaaaggcgccaucaauacaagccuccccuuccagaacauccacccgauuacgaucggcaagugcccuaaguaugugaaaucuaccaagcugagacuugcuacagggcugcggaauguucccagcauucagucccgcggacucuuuggcgccaucgccggguucauugagggaggcuggaccgggaugguggacggaugguacggcuaucaucaccagaacgaacaaggcucuggguacgcugcggaccugaaaagcacacagaaugccaucgaugagaucaccaacaaggucaauuccgugauugagaaaaugaacacgcaguuuacagcuguuggaaaggaguucaaucaccuugagaagagaaucgaaaaccugaauaaaaagguggacgauggcuuccucgacauuuggaccuacaacgccgagcugcugguccuccuggaaaaugagcggacccuugauuaucaugacagcaacgugaaaaaccuguacgagaagguccgcucucagcucaaaaauaacgccaaggaaaucgggaauggauguuuugaguucuaucacaagugcgauaacacauguauggaauccgugaaaaauggcaccuacgacuauccuaaguacagcgaggaagcuaaacugaacagagaggagauugaugggguuaaacuugaaucuacacggaucuaucaaauccuggccauuuacuccacgguggcgagcucccucguccuggugguuucucugggcgcuaucagcuuuuggaugugcuccaauggaucucuccagugccgcauuuguaucuga

SEQ ID NO: 201804 - RNA, 1701 nt, Artificial Sequence; identical to SEQ ID NO: 194741
  derived and/or modified CDS sequence (opt5) from hemagglutinin__InfluenzaA__AFX96648

SEQ ID NO: 201805 - RNA, 1701 nt, Artificial Sequence; identical to SEQ ID NO: 195901
  derived and/or modified CDS sequence (opt5) from hemagglutinin__InfluenzaA__AFX96658

SEQ ID NO: 201806 - RNA, 1701 nt, Artificial Sequence
  derived and/or modified CDS sequence (opt5) from hemagglutinin__InfluenzaA__AFX96668
augaaggccauccuggugguccuccuguacaccuucgcuacagccaacgcggacacgcuuugcauuggcuaucacgcuaauaacagcaccgauacaguugacaccgugcuggagaagaaugugacagucacccauuccgugaaccuccuggaagauaagcacaaugggaaacuuuguaagcugagaggaguugcuccccuccaucugggcaaaugcaacaucgccggguggauucugggaaauccugagugugaaucucucagcacagccuccucuuggagcuacaucguggagaccuccucuagcgacaacggcacgugcuauccgggggauuuuauugacuacgaagaacugcgggagcagcuuuccagcgucucuuccuucgaacgcuuugagaucuuccccaagaccagcucuuggccuaaucacgauuccaacaagggagugacagccgcuuguccccaugccggcgcgaaaucuuuuuauaagaaucugaucuggcucguuaaaaagggcaacagcuacccuaaacuguccaagagcuauauuaaugacaaggggaaagaagugcuuguccuguggggaauccaccaccccuccaccucugccgaucaacagagccucuaccagaacgcugacgccuacguguucgugggcacauccagauauagcaagaaauuuaagccugagauugcuauccggccgaaaguccgcgaucaggaggggagaaugaauuacuauuggacccugguugaacccggagacaagauuacguucgaggccacaggcaaccugguggugccucgguacgcguuugccauggaacgcaacgcugggucuggaaucauuaucuccgauacccccguccaugacugcaauacaaccugucaaaccccuaaaggcgccaucaacacaagccuccccuuccagaauauucacccgaucacgauuggcaagugcucuaaguaugugaaaagcaccaagcugagacuugcuacagggcugcggaacguuccuuccauccagucucgcggacucuuuggcgccauugccggguucaucgagggaggcuggaccgggaugguggacggaugguacggcuaucaucaccagaaugaacaaggcagcggguacgcugcggaucugaaauccacacagaacgccaucgacgagauuaccaauaaggucaacagcgugaucgagaaaaugaauacgcaguuuacagcuguuggaaaggaguucaaccaccuugagaagagaauugaaaaucugaacaaaaagguggaugacggcuuccucgauaucuggaccuacaaugccgagcugcugguccuccuggaaaacgagcggacccuugacuaucaugauucuaaugugaaaaaccuguacgagaagguccgcucccagcucaaaaacaaugccaaggaaauugggaacggauguuuugaguucuaucacaagugcgacaauacauguauggaaagcgugaaaaacggcaccuacgauuaucccaaguacucugaggaagcuaaacugaauagagaggagaucgacgggguuaaacuugaauccacacggaucuaucaaauucuggccaucuacagcacgguggcguccucucucguccuggugguuagccugggcgcuauuuccuuuuggaugugcucuaacggaagccuccagugccgcaucuguauuuga

SEQ ID NO: 201807 - RNA, 1701 nt, Artificial Sequence
  derived and/or modified CDS sequence (opt5) from hemagglutinin__InfluenzaA__AFX96678
augaaggccauccuggugguccuccuguacaccuucgcuacagccaacgcggacacgcuuugcauuggcuaucacgcuaauaacagcaccgauacaguugacaccgugcuggagaagaaugugacagucacccauuccgugaaccuccuggaagauaagcacaaugggaaacuuuguaagcugagaggaguugcuccccuccaucugggcaaaugcaacaucgccggguggauucugggaaauccugagugugaaucucucagcacagccuccucuuggagcuacaucguggagaccuccucuagcgacaacggcacgugcuauccgggggauuuuauugacuacgaagaacugcgggagcagcuuuccagcgucucuuccuucgaacgcuuugagaucuuccccaagaccagcucuuggccuaaucacgauuccaacaagggagugacagccgcuuguagccaugccggcgcgaaaucuuuuuauaagaaucugaucuggcucguuaaaaagggcaacuccuaccccaaacugagcaaguccuauauuaaugacaaggggaaagaagugcuuguccuguggggaauccaccacccuucuaccagcgccgaucaacagucccucuaccagaacgcugacgccuacguguucgugggcacaagcagauauucuaagaaauuuaagcccgagauugcuauccggccuaaaguccgcgaucaggaggggagaaugaauuacuauuggacccugguugaaccgggagacaagauuacguucgaggccacaggcaaccugguggugccccgguacgcguuugccauggaacgcaacgcuggguccggaaucauuaucagcgauaccccuguccaugacugcaauacaaccugucaaacccccaaaggcgccaucaacacaucucucccuuuccagaauauucaccccaucacgauuggcaagugcccgaaguaugugaaaagcaccaagcugagacuugcuacagggcugcggaacguuccuuccauccagucucgcggacucuuuggcgccauugccggguucaucgagggaggcuggaccgggaugguggacggaugguacggcuaucaucaccagaaugaacaaggcagcggguacgcugcggaucugaaauccacacagaacgccaucgacgagauuaccaauaaggucaacagcgugaucgagaaaaugaauacgcaguuuacagcuguuggaaaggaguucaaccaccuugagaagagaauugaaaaucugaacaaaaagguggaugacggcuuccucgauaucuggaccuacaaugccgagcugcugguccuccuggaaaacgagcggacccuugacuaucaugauucuaaugugaaaaaccuguacgagaagguccgcucccagcucaaaaacaaugccaaggaaauugggaacggauguuuugaguucuaucacaagugcgacaauacauguauggaaagcgugaaaaacggcaccuacgauuaucccaaguacucugaggaagcuaaacugaauagagaggagaucgacgggguuaaacuugaauccacacggaucuaucaaauucuggccaucuacagcacgguggcguccucucucguccuggugguuagccugggcgcuauuuccuuuuggaugugcucuaacggaagccuccagugccgcaucuguauuuga

SEQ ID NO: 201808 - RNA, 1701 nt, Artificial Sequence
  derived and/or modified CDS sequence (opt5) from hemagglutinin__InfluenzaA__AFX96688
augaaggccauccuggugguccuccuguacaccuucgcuacagccaacgcggacacgcuuugcauuggcuaucacgcuaauaacagcaccgauacaguugacaccgugcuggagaagaaugugacagucacccauuccgugaaccuccuggaagauaagcacaaugggaaacuuuguaagcugagaggaguugcuccccuccaucugggcaaaugcaacaucgccggguggauucugggaaauccugacugugagucucucagcacagccuccucuuggagcuacaucguggaaaccuccucuagcgauaacggcacgugcuauccgggggacuuuauugauuacgaggaacugcgggagcagcuuuccagcgucucuuccuucgagcgcuuugaaauguuccccaagaccagcucuuggccuaaucacgacuccaacaagggagugacagccgcuuguccccaugccggcgcgaaaucuuuuuauaagaaucugaucuggcucguuaaaaagggcaacagcuacccuaaacuguccaagagcuauaucaaugauaaggggaaagaggugcuuguccuguggggcauucaccaccccuccaccucugccgaccaacagagccucuaccagaacgcugaugccuacguguucgugggaacauccagauauagcaagaaauuuaagccugaaaucgcuauucggccgaaaguccgcgaccaggaggggagaaugaauuacuauuggacccugguugagcccggagauaagaucacguucgaagccacaggcaaccugguggugccucgguacgcguuugccauggagcgcaacgacgggucuggaauuaucauuuccgacacccccguccaugauugcaauacaaccugucaaaccccuaaaggcgcuaucaacacaagccuccccuuccagaauauccacccgauuacgaucggcaagugcccuaaguaugugaaaucuaccaagcugagacuugccacagggcugcggaacguucccagcauucagucccgcggacucuuuggcgcuaucgccggguucauugaaggaggcuggaccgggaugguggacggaugguacggcuaucaucaccagaaugagcaaggcucuggguacgccgcugaucugaaaagcacacagaacgcgaucgacgaaaucaccaauaaggucaacuccgugauugagaaaaugaauacgcaguuuacagccguuggaaaggaguucaaccaccuugaaaagagaaucgagaaucugaacaaaaagguggaugacggcuuccucgauauuuggaccuacaaugcugaacugcugguccuccuggagaacgaacggacccuugacuaucaugauagcaaugugaaaaaccuguacgagaagguccgcucucagcucaaaaacaaugccaaggagaucgggaacggauguuuugaguucuaucacaagugcgacaauacauguauggaauccgugaaaaacggcaccuacgauuauccuaaguacagcgaagaggccaaacugaauagagaagagauugacgggguuaaacuugagucuacacggaucuaucaaauccuggcuauuuacuccacgguggccagcucccucguccuggugguuucucugggcgcgaucagcuuuuggaugugcuccaacggaucucuccagugccgcauuuguaucuga

SEQ ID NO: 201809 - RNA, 1701 nt, Artificial Sequence; identical to SEQ ID NO: 194741
  derived and/or modified CDS sequence (opt5) from hemagglutinin__InfluenzaA__AFX96698

SEQ ID NO: 201810 - RNA, 1701 nt, Artificial Sequence
  derived and/or modified CDS sequence (opt5) from hemagglutinin__InfluenzaA__AFX96718
augaaggccauccuggugguccuccuguacaccuucgcuacagccaacgcggacacgcuuugcauuggcuaucacgcuaauaacagcaccgauacaguugacaccgugcuggagaaaaaugugacagucacccauuccgugaaccuccuggaagauaagcacaaugggaaacuuuguaagcugagaggaguugcuccccuccaucugggcaaaugcaacaucgccggguggauucugggaaauccugagugugaaucucucagcacagccuccucuuggagcuacaucguggagaccuccucuagcgacaacggcacgugcuauccgggggauuuuauugacuacgaagaacugcgggagcagcuuuccagcgucucuuccuucgaacgcuuugagaucuuccccaagaccagcucuuggccuaaucacgauuccaacaagggagugacagccgcuuguccccaugccggcgcgaaaucuuuuuauaagaaucugaucuggcucguuaaaaagggcaacagcuacccuaaaauuuccaagagcuauaucaaugacaaggggaaagaagugcugguccuuuggggcauucaccaccccuccaccucugccgaucaacagagccuguaccagaacgcugacacauacguguucgugggaaccuccagauauagcaagaaauuuaagccugagaucgccauucggccgaaaguccgcgaucaggaggggagaaugaauuacuauuggacgcucguugaacccggagacaagaucacauucgaggcuaccggcaaccugguggugccucgguacgccuuugcgauggaacgcaacgccgggucuggaauuaucaucuccgauacacccguccaugacugcaauaccaccugucaaacaccuaaaggcgcuauuaacacgagccugcccuuccagaauauccacccgauuaccaucggcaagugcccuaaguaugugaaaucuacaaagcucagacuggccaccgggcuucggaacguucccagcauucagucccgcggacuguuuggcgcuaucgccggguucaucgagggaggcuggacagggaugguggacggaugguacggcuaucaucaccagaaugaacaaggcucuggguacgccgcugaucucaaaagcacccagaaggcgauugacgagaucacgaacaaagucaauuccgugauugagaagaugaacacacaguuuaccgccguuggaaaggaguucaaucaccuggagaaaagaaucgaaaaccuuaauaagaaaauugaugacggcuuccuggauaucuggaccuacaacgcugagcuccuggugcugcucgaaaaugagcggacacuggacuaucaugauagcaacgucaagaaucuuuacgagaaagugcgcucucagcugaagaacaacgccaaggaaaucgggaauggauguuuugaguucuaucacaaaugcgacaacaccuguauggaauccgucaagaauggcacauacgauuauccuaaauacagcgaggaagccaagcucaacagagaggagauugacggggugaaacuggaaucuacgcggaucuaucaaauucuugcuaucuacuccaccguugccagcucccuggugcucgucgugucucugggcgcgauuagcuuuuggaugugcuccaauggaucucugcagugccgcaucuguauuuga

SEQ ID NO: 201811 - RNA, 1701 nt, Artificial Sequence; identical to SEQ ID NO: 201810
  derived and/or modified CDS sequence (opt5) from hemagglutinin__InfluenzaA__AFX96728

SEQ ID NO: 201812 - RNA, 1701 nt, Artificial Sequence; identical to SEQ ID NO: 195211
  derived and/or modified CDS sequence (opt5) from hemagglutinin__InfluenzaA__AFX96738

SEQ ID NO: 201813 - RNA, 1701 nt, Artificial Sequence
  derived and/or modified CDS sequence (opt5) from hemagglutinin__InfluenzaA__AFX96748
augaaggccauccuggugguccuccuguacaccauugcuacagccaacgcggacacgcuuugcaucggcuaucacgcuaauaacagcaccgauacaguugacaccgugauugagaaaaaugugacagucacccauuccgugaaccugcucgaagauaagcacaaugggaaacuguguaaacuuagaggaguugcuccccugcaucucggcaagugcaacaucgccggguggauucugggaaauccugagugugaaucucugagcacagccuccucuuggagcuacaucguggagaccuccucuagcgacaacggcacgugcuauccgggggauuucaucgacuacgaggaacuccgggagcagcuguccagcgucucuuccuuugaacgcuucgagauguuucccaagaccagcucuuggccuaaucacgauuccaacaagggagugacagccgcuuguccccaugccggcgcgaaaucuuucuauaagaaucuuauuuggcugguuaaaaagggcaacagcuacccuaaacucuccaagagcuauaucaaugacaaggggaaagaagugcugguccuuuggggcauucaccaccccuccaccucugccgaucaacagagccuguaccagaacgcugacgccuacguguuugugggaacauccagauauagcaagaaauucaagccugagaucgcuauucggccgaaaguccgcgaucaggaggggagaaugaauuacuauuggacccucguugaacccggagacaagaucacguuugaggccacaggcaaccugguggugccucgguacgcguucgccauggaacgcaacgcugggucuggaauuaucaucuccgauacccccguccaugacugcaauacaaccugucaaaccccuaaaggcgccauuaacacaagccugcccuuucagaauauccacccgauuacgaucggcaagugcccuaaguaugugaaaucuaccaagcucagacuggcuacagggcuucggaacguucccagcauucagucccgcggacuguucggcgccaucgccggguuuaucgagggaggcuggaccgggaugguggacggaugguacggcuaucaucaccagaaugaacaaggcucuggguacgcugcggaucucaaaagcacacagaacgccauugacgagaucaccaauaaggucaacuccgugauugagaaaaugaauacgcaguucacagcuguuggaaaggaauuuaaccaccuggagaagagaaucgaaaaucuuaacaaaaagguggaugacggcuuccuggauauuuggaccuacaaugccgagcuccugguccugcucgaaaacgagcggacccuggacuaucaugauagcaaugugaaaaaccuuuacgagaagguccgcucucagcugaaaaacaaugccaaggaaaucgggaacggauguuucgaguuuuaucacaagugcgacaauacauguauggaauccgugaaaaacggcaccuacgauuauccuaaguacagcgaggaagcuaaacucaauagagaggagaucgacgggguuaagcuggaaucuacacggauuuaucaaauccuugccauuuacuccacgguggcgagcucccugguccucgugguuucucugggcgcuaucagcuucuggaugugcuccaacggaucucugcagugccgcauuuguaucuga

SEQ ID NO: 201814 - RNA, 1701 nt, Artificial Sequence
  derived and/or modified CDS sequence (opt5) from hemagglutinin__InfluenzaA__AFX96758
augaaggccauccuggugguccuccuguacaccuucgcuacagccaacgcggacacgcuuugcauuggcuaucacgcuaauaacagcaccgauacaguugacaccgugcuggagaagaaugugacagucacccauuccgugaaccuccuggaagauaagcacaaugggaaacuuuguaagcugagaggaguugcuccccuccaucugggcaaaugcaacaucgccggguggauucugggaaauccugagugugaaucucucagcacagccuccucuuggagcuacaucguggagaccuccucuagcgacaacggcacgugcuauccgggggauuuuauugacuacgaagaacugcgggagcagcuuuccagcgucucuuccuucgaacgcuuugagauguuccccaagaccagcucuuggccuaaucacgauuccaacaagggagugacagccgcuuguccccaugccggcgcgaaaucuuuuuauaagaaucugaucuggcucguuaaaaagggcaacagcuacccuaaacuguccaagagcuauaucaaugacaaggggaaagaagugcuuguccuguggggcauucaccaccccuccaccucugccgaucaacagagccucuaccagaacgcugacacauacguguucgugggaaccuccagauauagcaagaaauuuaagccugagaucgccauucggccgaaaguccgcgaucaggaggggagaaugaauuacuauuggacgcugguugaacccggagacaagaucacauucgaggcuaccggcaaccugguggugccucgguacgccuuugcgauggaacgcaacgccgggucuggaauuaucauuuccgauacacccguccaugacugcaauaccaccugucaaacaccuaaaggcgcuaucaacacgagccuccccuuccagaauauccacccgauuaccaucggcaagugcccuaaguaugugaaaucuacaaagcugagacuugccaccgggcugcggaacguucccagcauucagucccgcggacucuuuggcgcuaucgccggguucauugagggaggcuggacagggaugguggacggaugguacggcuaucaucaccagaaugaacaaggcucuggguacgccgcugaucugaaaagcacccagaacgcgaucgacgagaucacgaauaaggucaacuccgugauugagaaaaugaauacacaguuuaccgccguuggaaaggaguucaaccaccuugagaagagaaucgaaaaucugaacaaaaagauugaugacggcuuccucgauaucuggaccuacaaugcugagcugcuggugcuccuggaaaacgagcggacacuugacuaucaugauagcaaugucaaaaaccuguacgagaaggugcgcucucagcucaaaaacaaugccaaggaaauugggaacggauguuuugaguucuaucacaagugcgacaauaccuguauggaauccgucaaaaacggcacauacgauuauccuaaguacagcgaggaagccaaacugaauagagaggagaucgacggggugaaacuugaaucuacgcggaucuaucaaauucuggcuaucuacuccaccguugccagcucccucgugcuggucgugucucugggcgcgauuagcuuuuggaugugcuccaacggaucucuccagugccgcaucuguauuuga

SEQ ID NO: 201815 - RNA, 1701 nt, Artificial Sequence
  derived and/or modified CDS sequence (opt5) from hemagglutinin__InfluenzaA__AFX96768
augaaggccauccuggugguccuccuguacaccuucgcuacagccaacgcggacacgcuuugcauuggcuaucacgcuaauaacagcaccgauacaguugacaccgugcuggagaaaaaugugacagucacccauuccgugaaccuccuggaagauaagcacaaugggaaacuuuguaagcugagaggaguugcuccccuccaucugggcaaaugcaacaucgccggguggauucugggaaauccugagugugaaucucucagcacagccaucuccuggucuuacauuguggagaccagcuccucugacaacggcacgugcuauccgggggauuuuaucgacuacgaagaacugcgggagcagcuuagcuccgucagcucuuucgaacgcuuugagaucuuccccaagaccuccagcuggccuaaucacgauucuaacaagggagugacagccgcuuguccccaugccggcgcgaaauccuuuuauaagaaucugauuuggcucguuaaaaagggcaacagcuacccuaaacugucuaaguccuauaucaaugacaaggggaaagaagugcuuguccuguggggcauucaccaccccagcaccuccgccgaucaacagucucucuaccagaacgcugacgccuacguguucgugggaacaagcagauauuccaagaaauuuaagccugagaucgcuauucggccgaaaguccgcgaucaggaggggagaaugaauuacuauuggacccugguugaacccggagacaagaucacguucgaggccacaggcaaccugguggugccucgguacgcguuugccauggaacgcaacgcugggagcggaauuaucaucucugauacccccguccaugacugcaauacaaccugucaaaccccuaaaggcgccauuaacacaucccuccccuuccagaauauccacccgauuacgaucggcaagugcccuaaguaugugaaaagcaccaagcugagacuugcuacagggcugcggaacguucccucuauucagagccgcggacucuuuggcgccaucgccggguucaucgagggaggcuggaccgggaugguggacggaugguacggcuaucaucaccagaaugaacaaggcuccggguacgcugcggaucugaaaucuacacagaacgccauugacgagaucaccaauaaggucaacagcgugauugagaaaaugaauacgcaguuuacagcuguuggaaaggaguucaaccaccuugagaagagaaucgaaaaucugaacaaaaagguggaugacggcuuccucgauauuuggaccuacaaugccgagcugcugguccuccuggaaaacgagcggacccuugacuaucaugauuccaaugugaaaaaccuguacgagaagguccgcagccagcucaaaaacaaugccaaggaaaucgggaacggauguuuugaguucuaucacaagugcgacaauacauguauggaaucugugaaaaacggcaccuacgauuauccuaaguacuccgaggaagcuaaacugaauagagaggagaucgacgggguuaaacuugaaagcacaaagauuuaucaaauccuggccauuuacucuacgguggcguccagccucguccuggugguuucccugggcgcuaucucuuuuuggaugugcagcaacggaucccuccagugccggauuuguaucuga

SEQ ID NO: 201816 - RNA, 1701 nt, Artificial Sequence
  derived and/or modified CDS sequence (opt5) from hemagglutinin__InfluenzaA__AFX96778
augaaggccauccuggugauucuccuguacaccuucgcuacagccaacgcggacacgcuuugcaucggcuaucacgcuaauaacagcaccgauacagucgacaccauucuggagaagaauguuacagugacccauuccgugaaccuccuggaagauaagcacaaugggaaacuuuguaagcugagaggagucgcuccccuccaucugggcaaaugcaacaucgccggguggauucugggaaauccugagugugaaucucucagcacagccuccucuuggagcuacaucguggagaccuccucuagcgacaacggcacgugcuauccgggggauuuuaucgacuacgaagaacugcgggagcagcuuuccagcguuucuuccuucgaacgcuuugagauuuuccccaagaccagcucuuggccuaaucacgauuccaacaagggagugacagccgcuuguccccaugccggcgcgaaaucuuuuuauaagaaucugaucuggcucgucaaaaagggcaacagcuacccuaaacuguccaagagcuauauuaaugacaaggggaaagaagugcuuguucuguggggaauccaccaccccuccaccucugccgaucaacagagccucuaccagaacgcugacgccuacguguucgucggcacauccagauauagcaagaaauuuaagccugagauugcuauccggccgaaagugcgcgaucaggaggggagaaugaauuacuauuggacccugguggaacccggagacaagauuacguucgaggccacaggcaaccuggucguuccucgguacgcguuugccauggaacgcaacgcugggucuggaaucaucauuuccgauacccccgugcaugacugcaauacaaccugucaaaccccuaaaggcgccaucaacacaagccuccccuuccagaauauucacccgaucacgauuggcaagugcccuaaguaugugaaaucuaccaagcugagacuugcuacagggcugcggaacguccccagcauccagucccgcggacucuuuggcgccaucgccggguucauugagggaggcuggaccgggaugguggacggaugguacggcuaucaucaccagaaugaacaaggcucuggguacgcugcggaucugaaaagcacacagaacgccaucgacgagauuaccaauaagguuaacuccgugaucgagaaaaugaauacgcaguuuacagcugucggaaaggaguucaaccaccuugagaagagaauugaaaaucugaacaaaaagguggaugacggcuuccucgauaucuggaccuacaaugccgagcugcugguucuccuggaaaacgagcggacccuugacuaucaugauagcaaugugaaaaaccuguacgagaagguccgcucucagcucaaaaacaaugccaaggaaaucgggaacggauguuuugaguucuaucacaagugcgacaauacauguauggaauccgugaaaaacggcaccuacgauuauccuaaguacagcgaggaagcuaaacugaauagagaggagauugacggggucaaacuugaaucuacacggaucuaucaaauucuggccaucuacuccacgguggcgagcucccucguucugguggucucucugggcgcuauuagcuuuuggaugugcuccaacggaucucuccagugccgcaucuguauuuga

SEQ ID NO: 201817 - RNA, 1701 nt, Artificial Sequence
  derived and/or modified CDS sequence (opt5) from hemagglutinin__InfluenzaA__AFX96788
augaaggccauccuggugguccuccuguacaccuucgcuacagccaacgcggacacgcuuugcauuggcuaucacgcuaauaacagcaccgauacaguugacaccgugcuggagaaaaaugugacagucacccauuccgugaaccuccuggaagauaagcacaaugggaaacuuuguaagcugagaggaguugcuccccuccaucugggcaaaugcaacaucgccggguggauucugggaaauccugagugugaaucucucagcacagccuccucuuggagcuacaucguggagaccuccucuagcgacaacggcacgugcuauccgggggauuuuauugacuacgaagaacugcgggagcagcuuuccagcgucucuuccuucgaacgcuuugagaucuuccccaagaccagcucuuggccuaaucacgauuccaacaagggagugacagccgcuuguccccaugccggcgcgaaaucuuuuuauaagaaucugaucuggcucguuaaaaagggcaacagcuacccuaaacuguccaagagcuauauuaaugacaaggggaaagaagugcuuguccuguggggaauccaccaccccuccaccucugccgaucaacagagccucuaccagaacgcugacgccuacguguucgugggcacauccagauauagcaagaaauuuaagccugagauugcuauccggccgaaaguccgcgaucaggaggggagaaugaauuacuauuggacccugguugaacccggagacaagauuacguucgaggccacaggcaaccugguggugccucgguacgcguuugccauggaaaagaacgcugggucuggaaucauuaucuccgauacccccguccaugacugcaauacaaccugucaaaccccuaagggcgccaucaacacaagccuccccuuccagaauauucacccgaucacgauuggcaagugcccuaaauaugugaagucuaccaaacugcgccuugcuacagggcugagaaacguucccagcauccagucccggggacucuuuggcgccauugccggguucaucgagggaggcuggaccgggaugguggacggaugguacggcuaucaucaccagaaugaacaaggcucuggguacgcugcggaucuuaagagcacacagaacgccaucgacaaaauuaccaauaaggucaacuccgugaucgagaagaugaauacgcaguuuacagcuguuggaaaagaguucaaccaccuggaaaagcgcauugagaaucugaacaaaaagguggaugacggcuuccucgauaucuggaccuacaaugccgaacugcugguccuccuggagaacgaaagaacccuugacuaucaugauagcaaugugaaaaaccuguacgagaagguccggucucagcucaagaacaaugccaaagagauugggaacggauguuuugaguucuaucacaagugcgacaauacauguauggaguccgugaaaaacggcaccuacgauuauccuaaguacagcgaagaggcuaaacugaaucgcgaagagaucgacgggguuaaacuugagucuacaagaaucuaucaaauucuggccaucuacuccacgguggcgagcucccucguccuggugguuucucugggcgcuauuagcuuuuggaugugcuccaacggaucucuccagugccggaucuguauuuga

SEQ ID NO: 201818 - RNA, 1701 nt, Artificial Sequence; identical to SEQ ID NO: 201817
  derived and/or modified CDS sequence (opt5) from hemagglutinin__InfluenzaA__AFX96798

SEQ ID NO: 201819 - RNA, 1701 nt, Artificial Sequence; identical to SEQ ID NO: 195901
  derived and/or modified CDS sequence (opt5) from hemagglutinin__InfluenzaA__AFX96808

SEQ ID NO: 201820 - RNA, 1701 nt, Artificial Sequence; identical to SEQ ID NO: 198981
  derived and/or modified CDS sequence (opt5) from hemagglutinin__InfluenzaA__AFX96818

SEQ ID NO: 201821 - RNA, 1701 nt, Artificial Sequence; identical to SEQ ID NO: 201817
  derived and/or modified CDS sequence (opt5) from hemagglutinin__InfluenzaA__AFX96828

SEQ ID NO: 201822 - RNA, 1701 nt, Artificial Sequence; identical to SEQ ID NO: 197338
  derived and/or modified CDS sequence (opt5) from hemagglutinin__InfluenzaA__AFX96838

SEQ ID NO: 201823 - RNA, 1701 nt, Artificial Sequence
  derived and/or modified CDS sequence (opt5) from hemagglutinin__InfluenzaA__AFX96856
augaaggccauccuggugguccuccuguacaccuucgcuacagccaacgcggacacgcuuugcauuggcuaucacgcuaauaacagcaccgauacaguugacaccgugcuggagaagaaugugacagucacccauuccgugaaccuccuggaagauaagcacaaugggaaacuuuguaagcugagaggaguugcuccccuccaucugggcaaaugcaacaucgccggguggauucugggaaauccugagugugaaucucucagcacagccuccucuuggagcuacaucguggagaccuccucuagcgacaacggcacgugcuauccgggggauuuuauugacuacgaagaacugcgggagcagcuuuccagcgucucuuccuucgaacgcuuugagaucuuccccaagaccagcucuuggccuaaucacgauuccaacaagggagugacagccgcuuguacccaugccggcgcgaaaucuuuuuauaagaaucugaucuggcucguuaaaaagggcaacagcuaccccaaacuguccaagagcuauauuaaugacaaggggaaagaagugcuuguccuguggggaauccaccacccuuccacaucugccgaucaacagagccucuaccagaacgcugacgccuacguguucgugggcaccuccagauauagcaagaaauuuaagcccgagauugcuauccggccuaaaguccgcgaucaggaggggagaaugaauuacuauuggacgcugguugaaccgggagacaagauuacauucgaggccaccggcaaccugguggugccccgguacgcguuugccauggaacgcaacgcugggucuggaaucauuaucuccgauacaccuguccaugacugcaauaccaccugucaaacacccaaaggcgccaucaacacgagccucccuuuccagaauauucaccccaucaccauuggcaagugcccgaaguaugugaaaucuacaaagcugagacuugcuaccgggcugcggaacguuccuagcauccagucccgcggacucuuuggcgccauugccggguucaucgagggaggcuggacagggaugguggacggaugguacggcuaucaucaccagaaugaacaaggcucuggguacgcugcggaucugaaaagcacccagaacgccaucgacgagauuacgaauaaggucaacuccgugaucgagaaaaugaauacacaguuuaccgcuguuggaaaggaguucaaccaccuugagaagagaauugaaaaucugaacaaaaagguggaugacggcuuccucgauaucuggaccuacaaugccgagcugcugguccuccuggaaaacgagcggacacuugacuaucaugauagcaaugugaaaaaccuguacgagaagguccgcucucagcucaaaaacaaugccaaggaaauugggaacggauguuuugaguucuaucacaagugcgacaauaccuguauggaauccgugaaaaacggcacauacgauuaucccaaguacagcgaggaagcuaaacugaauagagaggagaucgacgggguuaaacuugaaucuacgcggaucuaucaaauucuggccaucuacuccaccguggcgagcucccucguccuggugguuucucugggcgcuauuagcuuuuggaugugcuccaacggaucucuccagugccgcaucuguauuuga

SEQ ID NO: 201824 - RNA, 1701 nt, Artificial Sequence; identical to SEQ ID NO: 201806
  derived and/or modified CDS sequence (opt5) from hemagglutinin__InfluenzaA__AFX96904

SEQ ID NO: 201825 - RNA, 1701 nt, Artificial Sequence; identical to SEQ ID NO: 196241
  derived and/or modified CDS sequence (opt5) from hemagglutinin__InfluenzaA__AFX96914

SEQ ID NO: 201826 - RNA, 1701 nt, Artificial Sequence
  derived and/or modified CDS sequence (opt5) from hemagglutinin__InfluenzaA__AFX96924
augaaggccauccuggugguccuccuguacaccuucgcuacagccaacgcggacacgcuuugcauuggcuaucacgcuaauaacagcaccgauacaguugacaccgugcuggagaaaaaugugacagucacccauuccgugaaccuccuggaagauaagcacaaugggaaacuuuguaagcugagaggaguugcuccccuccaucugggcaaaugcaacaucgccggguggauucugggaaauccugagugugaaucucucagcacagccuccucuuggagcuacaucguggagaccuccucuagcgacaacggcacgugcuauccgggggauuuuauugacuacgaagaacugcgggagcagcuuuccagcgucucuuccuucgaacgcuuugagaucuuccccaagaccagcucuuggccuaaucacgauuccaacaagggagugacagccgcuuguccccaugccggcgcgaaaucuuuuuauaagaaucugaucuggcucguuaaaaagggcaacagcuacccuaaacuguccaagagcuauauuaaugacaaggggaaagaagugcuuguccuguggggaauccaccaccccuccaccucugccgaucaacagagccucuaccagaacgcugacgccuacguguucgugggcacauccagauauagcaagcgguuuaaaccugagauugcuauccgcccgaaggucagagaucaggaggggcggaugaauuacuauuggacccugguugaacccggagacaaaauuacguucgaggccacaggcaaccugguggugccucgcuacgcguuugccauggaaagaaacgcugggucuggaaucauuaucuccgauacccccguccaugacugcaauacaaccugucaaaccccuaagggcgccaucaacacaagccuccccuuccagaauauucacccgaucacgauuggcaaaugcccuaaguaugugaagucuaccaaacugcggcuugcuacagggcugcgcaacguucccagcauccaguccagaggacucuuuggcgccauugccggguucaucgagggaggcuggaccgggaugguggacggaugguacggcuaucaucaccagaaugaacaaggcucuggguacgcugcggaucuuaagagcacacagaacgccaucgacgagauuaccaauaaagucaacuccgugaucgagaagaugaauacgcaguuuacagcuguuggaaaagaguucaaccaccuggagaagcggauugaaaaucugaacaagaaaguggaugacggcuuccucgauaucuggaccuacaaugccgagcugcugguccuccuggaaaacgagcgcacccuugacuaucaugauagcaaugugaagaaccuguacgagaaagucagaucucagcucaagaacaaugccaaagaaauugggaacggauguuuugaguucuaucacaagugcgacaauacauguauggaauccgugaagaacggcaccuacgauuauccuaaauacagcgaggaagcuaagcugaaucgggaggagaucgacgggguuaaacuugaaucuacacgcaucuaucaaauucuggccaucuacuccacgguggcgagcucccucguccuggugguuucucugggcgcuauuagcuuuuggaugugcuccaacggaucucuccagugcagaaucuguauuuga

SEQ ID NO: 201827 - RNA, 1701 nt, Artificial Sequence; identical to SEQ ID NO: 194741
  derived and/or modified CDS sequence (opt5) from hemagglutinin__InfluenzaA__AFX96934

SEQ ID NO: 201828 - RNA, 1701 nt, Artificial Sequence
  derived and/or modified CDS sequence (opt5) from hemagglutinin__InfluenzaA__AFY24097
augaaggccauccuggugguccuccuguacaccuucgcuacagccaacgcggacacgcuuugcauuggcuaucacgcugauaauagcaccgacacaguugauaccgugcuggagaagaacgugacagucacccauuccguggaccuccuggaagauaagcacaaugggaaacuuuguaagcugagaggaguugcuccccuccaucugggcaaaugcaacaucgccggguggauucugggaaauccugagugugaaucucucagcacagccuccucuuggagcuacaucguggagaccuccucuagcgacaacggcacgugcuauccgggggauuuuauugacuacgaagaacugcgggagcagcuuuccagcgucucuuccuucgaacgcuuugagaucuuccccaagaccagcucuuggccuaaucacgauuccaacaagggagugacagccgcuuguccccaugccggcgcgaaaucuuuuuauaagaaucugaucuggcucguuaaaaagggcaacagcuacccuaaacugaauaaguccuauauuaacgacaaggggaaagaagugcuuguccuguggggaauccaccaccccagcaccuccacagaucaacagucucucuaccagaaugccgacgcuuacguguucgugggcaccagcagauauuccaagaaauuuaagccugagauugccauccggccgaaaguccgcgaucaggaggggagaaugaacuacuauuggacgcugguugaacccggagacaagauuacauucgaggcuaccggcaaucugguggugccucgguacgccuuugcgauggaacgcaacgccgggagcggaaucauuaucucugacacacccguccaugauugcaacaccaccugucaaacaccuaaaggcgcuaucaauacgucccuccccuuccagaacauucacccgaucaccauuggcaagugcccuaaguaugugaaaagcacaaagcugagacuugccaccgggcugcggaauguucccucuauccagagccgcggacucuuuggcgcuauugccggguucaucgagggaggcuggacagggaugguggacggaugguacggcuaucaucaccagaacgaacaaggcuccggguacgccgcugaucugaaaucuacccagaaugcgaucgacgagauuacgaacaaggucaauagcgugaucgagaaaaugaacacacaguuuaccgccguuggaaaggaguucaaucaccuugagaagagaauugaaaaccugaauaaaaagguggaugacggcuuccucgauaucuggaccuacaacgcugagcugcugguccuccuggaaaaugagcggacacuugacuaucaugauuccaacgugaaaaaucuguacgagaagguccgcagccagcucaaaaacaacgccaaggaaauugggaauggauguuuugaguucuaucacaagugcgacaacaccuguauggaaucugugaaaaauggcacauacgauuauccuaaguacuccgaggaagccaaacugaacagagaggagaucgacgggguuaaacuugaaagcacgcggaucuaucaaauucuggcuaucuacucuaccguggccuccagccucguccuggugguuucccugggcgcgauuucuuuuuggaugugcagcaauggaucccuccagugccgcaucuguauuuga

SEQ ID NO: 201829 - RNA, 1701 nt, Artificial Sequence; identical to SEQ ID NO: 192702
  derived and/or modified CDS sequence (opt5) from hemagglutinin__InfluenzaA__AFY24162

SEQ ID NO: 201830 - RNA, 1701 nt, Artificial Sequence
  derived and/or modified CDS sequence (opt5) from hemagglutinin__InfluenzaA__AFY24195
augaagaccaucauugcccugagcuacauccucugccugguguucgcucagaaacuucccggcaacgacaauuccacagccacgcugugucucgggcaccaugcggucccuaacggaaccauuguuaagacaaucaccaaugaucaaauugaggugacaaacgcuaccgaacuggugcagucuagcuccacaggcgggaucugcgacucuccgcaccagauccuugauggagagaauuguacccugauugacgcccuccugggcgauccccagugcgacggguuucaaaacaaaaagugggaucuguucgucgaaagaagcaaagccuauuccaauuguuacccuuaugacgugcccgauuacgcuucucuccggagccugguugccuccagcggaacgcuugaguuuaacaaugaaucuuucaacuggaccggcgugacacagaauggcaccuccagcgcuugcaagcgcagaucuaacaauuccuuuuucagccggcugaacuggcucacacaucugaaguuuaaauauccugcccuuaaugucaccaugcccaacaacgagaaguucgacaaacuguacaucuggggagugcaccauccugggacggauaaugaccagauuuuucucuaugcgcaggccucuggccgcaucacaguuuccaccaagagaagccaacagacagugauuccgaacaucgggucccggccccgcauuagaaauaucccuucucggaucagcauuuacuggaccaucgucaaacccggagauauucugcugaucaacuccaccggcaaucucauugcuccucgcggguacuucaagaucagaagcggaaagucuuccaucaugcggagcgacgcccccauuggcaaauguaacucugagugcaucacaccgaauggcagcauuccuaacgacaagcccuuucagaaugugaaccgcaucacguauggggcuuguccuagauacgugaaacagaauacccugaaacuugccacaggaaugcggaacguccccgaaaagcaaacccgcggcauuuucggggcgaucgccggauuuaucgagaauggcugggaagggaugguugauggaugguauggcuucagacaccagaacuccgagggcauugggcaggcugccgaccugaagucuacacaagcugccaucaaucagauuaacggaaaacucaaccggcugaucggcaagaccaaugagaaguuccaccagauugaaaaagaguuuagcgaaguggaggggagaauccaggaucuugaaaaguacguggaggacacgaaaauugaucugugguccuauaacgccgagcuccuggucgcucuggaaaaucaacauacaaucgaccucaccgauagcgagaugaacaagcuguucgaacgcaccaaaaagcagcuucgggagaaugcggaagacaugggaaacggcugcuuuaagaucuaccacaaaugugauaaugccugcauugggucuaucagaaacggcacauaugaccaugauguguaccgcgacgaggcucugaauaaccgguuccagauuaagggaguugagcucaaauccggcuacaaggacuggauccuguggauuagcuuugccaucucuugcuuccuucuguguguggcccuccugggguuuaucaugugggcuugccagaaaggaaauauuagauguaacaucugcauuuga

SEQ ID NO: 201831 - RNA, 1701 nt, Artificial Sequence; identical to SEQ ID NO: 192257
  derived and/or modified CDS sequence (opt5) from hemagglutinin__InfluenzaA__AFY24217

SEQ ID NO: 201832 - RNA, 1701 nt, Artificial Sequence
  derived and/or modified CDS sequence (opt5) from hemagglutinin__InfluenzaA__AGB08294
augaaggccauccuggugguccuccuguacaccuucgcuacagccaacgcggacacgcuuugcauuggcuaucacgcuaauaacagcaccgauacaguugacaccgugcuggagaaaaaugugacagucacccauuccgugaaccuccuggaagauaagcacaaugggaaacuuuguaagcugagaggaguugcuccccuccaucugggcaaaugcaacaucgccggguggauucugggaaauccugagugugaaucucucagcacagccuccucuuggagcuacaucguggagaccuccucuagcgacaacggcacgugcuauccgggggauuuuauuaauuacgaggaacugcgggagcagcuuuccagcgucucuuccuucgaacgcuuugagaucuuccccaagaccagcucuuggccuaaccacgacuccaauaagggagugacagccgcuuguccccaagccggcgcgaaaucuuuuuauaagaaccugaucuggcucguuaaaaagggcaauagcuacccuaaacugauuaaguccuauaucaacgauaaggggaaagaagugcuuguccuguggggcauucaucaccccagcaccuccgccgaccagcagucucucuaccagaaugcugaugccuacguguucgugggaacaagcaaguauuccaaaaaguuuaaaccugagaucgcugucagaccgaagguucgggaccaagaggggcgcaugaacuacuauuggacccugguggaacccggagauaaaauuacguucgaggccacaggcaaccugcucgugccuagauacgcguuugucauggaacggaaugccgggagcggaaucauuaucucugacacccccgugcacgauugcaacacaaccugucagaccccuaagggcgcuaucaauacaucccugcccuuccagaacauucauccgaucacgauuggcaagugcccuaaauauguuaagagcaccaaacuucgccuggccacagggcucagaaauauccccucuauucagagccggggacuguuuggcgcuaucgccggguucaucgagggaggcuggaccgggaugguggacggaugguacggcuaucaccaucaaaacgcccagggcuccggguacgcugcggaccuuaagucuacacagaaugccauugauaaaaucaccaacaaggucaauagcgugauugaaaagaugaacacgcaguuuacagcuguuggaaaagaguucaaucaccuggagaagcgcaucgaaaaccucaauaaaaagguggacgauggcuuccuggacauuuggaccuacaacgccgagcugcucguccugcuugaaaaugagagaacccuggauuaucacgacuccaacgugaaaaaccucuacgaaaagguccggagccaacugaagaauaacgccaaagagaucgggaauggauguuuugaguucuaucauaagugcgauaacacauguauggaaucugugaaaaauggcaccuacgacuauccucgcuacuccgaggaagcuaaacuuaacagagaggaaaucgaugggguuaagcuggagagcacacggauuuaucagauccucgccauuuacucuacgguggcguccagccugguccuggugguuucccucggcgcuaucucuuuuuggaugugcagcaauggaucccugcagugccgcauuuguaucuga

SEQ ID NO: 201833 - RNA, 1701 nt, Artificial Sequence
  derived and/or modified CDS sequence (opt5) from hemagglutinin__InfluenzaA__AGB08295
augaaggccauccuggugguccuccuguacaccuucgcuacagccaacgcggacacgcuuugcauuggcuaucacgcuaauaacagcaccgauacaguugacaccgugaucgagaaaaaugugacagucacccauuccgugaaccugcucgaagauaagcacaaugggaaacuguguaaacuuagaggaguugcuccccugcaucucggcaagugcaacauugccggguggauccugggaaauccugagugugaaucucugagcacagccuccucuuggagcuacauuguggagaccuccucuagcgacaacggcacgugcuauccgggggauuuuaucaauuacgaggagcuccgggagcagcuguccagcgucucuuccuucgaacgcuuugagaucuuccccaagaccagcucuuggccuaaccacgacuccaauaagggagugacagccgcuuguccccaugccggcgcgaaaucuuuuuauaagaaccuuauuuggcugguuaaaaagggcaauagcuacccuaaacucuccaagagcuauaucaacgauaagagaaaagaagugcugguccuuugggggauucaccaccccuccaccacagccgaccaacagucucuguaccagaaugcugaugccuacguguucgugggaaccagccgguauuccaagaaauuuaagccugagaucgcuauucgcccgaaagucagagaccaggagggccggaugaacuacuauuggacgcucguugaacccggggauaagaucacauucgaggccaccggaaaccugguggugccucgcuacgcguuugccauggaaagaacagcuggcagcgggauuaucaucucugacacccccguccaugauugcaauaccacaugucaaacgccuaaaggagccauuaacaccucccugcccuuccagaauauccacccgauuacaaucggcaagugcccuaaguaugugaaaagcaccaagcuccggcuggcuacaggccuucgcaacauucccucuauccagagcagagggcuguuuggagccaucgccggcuucauugaagggggauggaccggcaugguugacgggugguacggauaucaucaccagaaugaacaaggcuccggcuacgcugcggaccucaaaucuacgcagaacgccaucgauaagauuacaaauaaagugaacagcgucaucgagaagaugaauacccaguuuaccgcuguggggaaggaguucaaccaccuggaaaaacggauugagaaucuuaacaagaaaguugacgauggauuccuggacaucuggacauacaaugccgaacuccuggugcugcucgagaacgaacgcacccuggauuaucaugacuccaaugucaagaaccuuuacgagaaagugagaaaccagcugaagaauaacgccaaggagaucggcaauggguguuuugaguucuaucacaaaugcgauaacacauguauggaaagcgucaagaauggaacguacgacuauccuaaauacucugaagaggcuaagcucaaccgggaagagauugauggcgugaaacuggaguccacccgcaucuaucaaauucuugccaucuacagcacaguugcgucuucccuggugcucgucgugagccugggggcuauuuccuuuuggaugugcucuaauggcagccugcagugcagaaucuguauuuga

SEQ ID NO: 201834 - RNA, 1701 nt, Artificial Sequence
  derived and/or modified CDS sequence (opt5) from hemagglutinin__InfluenzaA__AGB08296
augaaggccauccuggugguccuccuguacaccuucgcuacagccaacgcggacacgcuuugcauuggcuaucacgcuaauaacagcaccgauacaguugacaccgugcuggagaaaaaugugacagucacccauuccgugaaccuccuggaagauaagcacaaugggaaacuuuguaagcugagaggaguugcuccccuccaucugggcaaaugcaacaucgccggguggauucugggaaauccugagugugaaucucucagcacagccuccucuuggagcuacaucguggagaccuccucuagcgacaacggcacgugcuauccgggggauuuuauuaauuacgaagaacugcgggagcagcuuuccagcgucucuuccuucgaacgcuuugagaucuuccccaagaccagcucuuggccuaaccacgacuccaauaagggagugacagccgcuuguccccaugccggcgcgaaaucuuuuuauaagaaccugaucuggcucguuaaaaagggcaauagcuacccuaaacuguccaagagcuauauuaacgauaaggggaaagaagugcuuguccuguggggaauccaccaccccuccaccacagccgaccaacagucucucuaccagaaugcugaugccuacguguucgugggcaccagcagauauuccaagaaauuuaagccugagauugcuauccggccgaaaguccgcgggcaggagggaagaaugaacuacuauuggacgcugguugaacccggcgacaagauuacauucgaggccaccgggaaccugguggugccucgguacgcguuugccauggaacgcacagcuggaagcggcaucauuaucucugauacccccguccaugacugcaauaccacaugucaaacgccuaaaggcgccaucaacaccucccuccccuuccagaauauucacccgaucacaauugggaagugcccuaaguaugugaaaagcaccaagcugagacuugcuacaggacugcggaacguucccucuauccagagccgcggccucuuuggggccauugccggauucaucgagggcggguggaccggaaugguggauggcugguacggcuaucaucaccagaaugaacaaggguccggauacgcugcggaccugaaaucuacgcagaacgccaucgacaagauuacaaauaaagucaacagcgugaucgagaagaugaauacccaguuuaccgcuguuggcaaggaguucaaccaccuugagaaaagaauugagaaucugaacaagaaaguggaugacggguuccucgauaucuggacauacaaugccgaacugcugguccuccuggagaacgaacggacccuugacuaucaugauuccaaugugaagaaccuguacgagaaaguccgcaaccagcucaagaauaacgccaaggagauuggaaauggcuguuuugaguucuaucacaaaugcgacaacacauguauggaaagcgugaagaaugggacguacgauuauccuaaauacucugaagaggcuaagcugaacagagaagagaucgacggcguuaaacuugaguccacccggaucuaucaaauucuggccaucuacagcacaguggcgucuucccucguccuggugguuagccugggagcuauuuccuuuuggaugugcucuaauggcagccuccagugccgcaucuguauuuga

SEQ ID NO: 201835 - RNA, 1701 nt, Artificial Sequence
  derived and/or modified CDS sequence (opt5) from hemagglutinin__InfluenzaA__AGB08297
augaaggccauccuggugguccuccuguacaccuucgcuacagccaacgcggacacgcuuugcauuggcuaucacgcuaauaacagcaccgauacaguugacaccgugcuggagaagaaugugacagucacccauuccgugaaccuccuggaagauaagcacaaugggaaacuuuguaagcugagaggaguugcuccccuccaucugggcaaaugcaacaucgccggguggauucugggaaauccugagugugaaucucucagcacagccuccucuuggagcuacaucguggagaccuccucuagcgacaacggcacgugcuauccgggggauuuuauuaauuacgaagaacugcgggagcagcuuuccagcgucucuuccuucgaacgcuuugagaucuuccccaagaccagcucuuggccuaaccacgacuccaauaagggagugacagccgcuuguccccaugccggcgcgaaaucuuuuuauaagaaccugaucuggcucguuaaaaagggcaauagcuacccuaaacuguccgaaagcuauauuaacgauaaggggaaggaggugcuuguccuguggggaauccaccaccccuccaccacagccgaccaacagucucucuaccagaaugcugaugccuacguguucgugggcaccagcagauauuccaaaaaguuuaaaccugagauugcuauccggccgaagguccgcgaccaggaagggagaaugaacuacuauuggacgcugguugagcccggagauaaaauuacauucgaagccaccggcaaccugguggugccucgguacgcguuugccauggagcgcacagcugggagcggaaucauuaucucugacacccccguccaugauugcaauaccacaugucaaacgccuaagggcgccaucaacaccucccuccccuuccagaauauucacccgaucacaauuggcaaaugcccuaaguauguuaagagcaccaaacugagacuugcuacagggcugcggaacgugcccucuauccagagccgcggacucuuuggcgccauugccggguucaucgaaggaggcuggaccgggaugguggacggaugguacggcuaucaucaccagaaugagcaaggcuccggguacgcugcggaccugaagucuacgcagaacgccaucgauaaaauuacaaauaaggucaacagcgugaucgagaaaaugaauacccaguuuaccgcuguuggaaaggaguucaaccaccuugagaagagaauugaaaaucugaacaaaaagguggacgauggcuuccucgacaucuggacauacaaugccgagcugcugguccuccuggaaaacgagcggacccuugauuaucaugacuccaaugugaaaaaccuguacgagaagguccgcaaccagcucaaaaauaacgccaaggaaauugggaauggauguuuugaguucuaucacaagugcgauaacacauguauggaaagcgugaaaaauggcacguacgacuauccuaaguacucugaggaagcuaaacugaacagagaggagaucgaugggguuaaacuugaauccacccggaucuaucaaauucuggccaucuacagcacaguggcgucuucccucguccuggugguuagccugggcgcuauuuccuuuuggaugugcucuaauggaagccuccagugccgcaucuguauuuga

SEQ ID NO: 201836 - RNA, 1701 nt, Artificial Sequence
  derived and/or modified CDS sequence (opt5) from hemagglutinin__InfluenzaA__AGB08298
augaaggccauccuggugguccuccuguacaccuucgcuacagccaacgcggacacgcuuugcauuggcuaucacgcuaauaacagcaccgauacaguugacaccgugcuggagaagaaugugacagucacccauuccgugaaccuccuggaagauaagcacaaugggaaacuuuguaagcugagaggaaucgcuccccuccaucugggcaaaugcaacauugccggguggauccugggaaauccugagugugaaucucucagcacagccuccucuuggagcuacauuguugagaccuccucuagcgacaacggcacgugcuauccgggggauuuuaucaauuacgaagaacugcgggagcagcuuuccagcgugucuuccuucgaacgcuuugagaucuuccccaagaccagcucuuggccuaaccacgacuccaauaagggagucacagccgcuuguccccaugccggcgcgaaaucuuuuuauaagaaccugauuuggcucgugaaaaagggcaauagcuacccuagacuguccaaaagcuauaucaacgauaaggggaaggaaguucuugugcuguggggcauucaccaccccuccaccacagccgaccaacagucucucuaccagaaugcugaugccuacgucuucgugggaaccagccgguauuccaaaaaguuuaaaccugagaucgcuauucgcccgaaggugagagaccaggaggggcggaugaacuacuauuggacgcuggucgaacccggagauaaaaucacauucgaggccaccggcaaccugguugugccucgcuacgcguuugccauggaaagaacagcugggagcggaauuaucaucucugacacccccgugcaugauugcaauaccacaugucaaacgccuaagggcgccauuaacaccucccuccccuuccagaauauccacccgauuacaaucggcaaaugcccuaaguaugucaagagcaccaaacugcggcuugcuacagggcugcgcaacgugcccucuauucagagcagaggacucuuuggcgccaucgccggguucaucgagggaggcuggaccgggaugguugacggaugguacggcuaucaucaccagaaugaacaaggcuccggguacgcugcggaccugaagucuacgcagaacgccauugauaaaaucacaaauaaggugaacagcgucauugagaaaaugaauacccaguuuaccgcugugggaaaggaguucaaccagcuugaaaagcggaucgagaaucugaacaaaaagguugacgauggcuuccucgacauuuggacauacaaugccgaacugcuggugcuccuggagaacgaacgcacccuugauuaucacgacuccaaugucaaaaaccuguacgagaaggugagaaaccaacucaaaaauaacgccaaggagaucgggaauggauguuuugaguucuaucauaagugcgauaacacauguauggagagcgucaaaaauggcacguacgacuauccuaaguacucugaagaggcuaaacugaaccgggaagagaucgauggggugaaacuugaguccacccgcauuuaucagauccuggccauuuacagcacaguugcgucuucccucgugcuggucgugagccugggcgcuaucuccuuuuggaugugcucuaauggaagccuccagugcagaauuuguaucuga

SEQ ID NO: 201837 - RNA, 1701 nt, Artificial Sequence
  derived and/or modified CDS sequence (opt5) from hemagglutinin__InfluenzaA__AGB08301
augaagaccaucauugcccugagcuacauccucugccugguguucgcucaggagcuucccggcaacgacgauuccacagccacgcugugucucgggcaccaugcggucccuaauggaaccauuguuaaaacaaucaccaacgaccaaauugaagugacaaaugcuaccgagcuggugcagucuagcuccacaggcgaaaucugcaacucuccgcaccagauccuugauggggagaauuguacccugauugacgcccuccugggagauccccagugcgacggcuuucaaaacaagaaaugggaucuguucgucgaaagaagcaaggcccauuccaauuguuauccuuacgacgugcccgauuaugcuucucuccggagccugguugccuccagcgggacgcuugaguuuaacaaugagucuuucaacuggaccggagugacacagaauggcaccuccagcgcuugcauccgcagaucuaacaauuccuuuuucagccggcugaacuggcucacacaccugaauuuuaaauacccugcccuuaacgucaccaugcccaacaaugaacaguucgacaagcuguauauuuggggcgugcaucacccugggacggauaaggaccagaucuuucucuacgcgcaagccucuggacgcauuacaguuuccaccaaaagaagccagcaggcugugaucccgaacauuggcucccggccccgcgucagaaauaucccuucucgggugagcaucuauuggacaguggucaagcccggggauauucugcugaucaacuccaccggaaaucucauugccccucgcggcuacuucaaaaucagaagcgggaagucuuccauuaugcggagcgacgcucccaucggaaaauguaacucugccugcaucaccccgaauggcagcauuccuaacgacaagcccuuucagaauguuaaccgcaucacauacggcgcguguccuagauaugugaagcaaaauacgcugaaacuugccaccgggaugcggaacgugcccgagaagcagacacgcggaauuuucggcgcuaucgccggguuuauugaaaauggaugggagggcauggucgaugggugguacggauucagacaccagaacuccgagggccggggccaagcugccgaccugaaaucuacccaggccgcuaucgaucagaucaaugggaagcucaacagacugauuggaaaaacaaacgaaaaguuccaucagaucgagaaagaauuuagcgagguggaaggccgcauucaagaccuugagaaguauguugaggauaccaagaucgaccugugguccuacaaugcggaacuccugguggcccuggagaaccagcacacgauugaucucacagacagcgaaaugaauaaacuguucgagaagaccaaaaagcagcuucgggaaaacgcugaggauauggggaauggaugcuuuaaaaucuaucauaagugugacaacgccugcauuggcucuaucagaaaugggaccuacgaucacaacgucuaucgcgacgaggcccugaauaaccgguuccagaucaagggcguggaacucaaauccggauacaaggacuggauucuguggaucagcuuugcuauuucuugcuuccuucuguguguugcccuccugggcuuuaucaugugggcgugccaaaaagggaauauuagauguaacaucugcaucuga

SEQ ID NO: 201838 - RNA, 1701 nt, Artificial Sequence
  derived and/or modified CDS sequence (opt5) from hemagglutinin__InfluenzaA__AGB08343
augaagaccaucauugcccugagcuacaucuucugccucgugcuggcucaggaccuucccggcaacgauaauuccacagccacgcugugucucgggcaccaugcggucccuaacggaacccugguuaaaacaauuaccaaugaccaaaucgaggugacaaacgcuaccgaacuugugcagucuagcuccacaggcagaauuugcaauaacccgcaccggauccuggaugggaucaauuguacccucauugacgcccugcugggagauccccauugcgacggcuuucagaacaagaaaugggaucucuucgucgagcgcucuaaggccuuuagcaauuguuauccuuacgacgugcccgauuaugcuucccugagaucucuuguugccagcuccgggacgcuggaguucaucaacgaaggauuuaauuggaccggcgugacacagaacggcgggagcuacgcuugcaaacggggaccugacaauggcuucuuuucucgccucaacuggcuguauaaguccgaaagcaccuaccccguccuuaaugugacaaugccuaacaacgauaauuucgacaagcuguauauuuggggaguucaccauccgucuaccgauaaagagcaaacgaaccucuacgugcaggccuccgggagagucacagugagcaccaagcggucucagcagacaaucauucccaaugugggcucccgcccuugggucagagggcugagcucccggaucucuauuuacuggaccaucguuaaacccggagacauccuggugauuaacagcaauggcaaccucaucgcgccucgcggcuauuuuaagauuagaaaugggaaauccagcaucaugcggucugacgcccccauuggaaccuguuccagcgagugcaucacaccgaacggcucuaucccuaaugauaagcccuuccaaaacgugaauaagauuacguacggggcuuguccuaaauaugucaagcagaacacccugaaacuugccacaggaaugcgcaaugugcccgaaaagcagaccagaggcaucuuuggggcuauugccggauucaucgagaacggcugggaaggcaugauugacgggugguacggauuucggcaccagaauagcgagggcacagggcaagcggccgaucugaaauccacccaggcugccaucgaccagaucaacggaaagcucaaccgcguuauugagaaaacgaaugaaaaguuccaccaaaucgagaaggaguucucugaaguggaaggccggauucaggaucuggagaaauaugucgaggacacaaagaucgaucuuuggagcuacaacgcugaacugcucguggcccuggagaaucagcauaccauugaccugaccgauuccgaaaugaacaaacucuuugagaagacaagaagacagcugcgcgaaaaugccgaggacauggggaacggcugcuucaaaaucuaucacaagugugauaaugcuugcauuggaagcauccggaacggcaccuacgaccaugacguuuacagagaugaggcgcuuaauaaccgcuuucaaaucaaggggguggaacugaaaucuggauauaaggacuggauucucuggaucuccuucgccauuagcugcuuucugcuuugugucgugcugcucggcuucaucaugugggcuugccagaaagggaauauucgguguaacaucugcaucuga

SEQ ID NO: 201839 - RNA, 1701 nt, Artificial Sequence
  derived and/or modified CDS sequence (opt5) from hemagglutinin__InfluenzaA__AGB08362
augaagaccaucauugcccugagcuacaucuucugccucgcucugggccaggaccuucccgggaacgauaauuccacagccacgcugugucucggacaccaugcggugccuaacggcacccuggucaaaacaauuaccgacgaucaaaucgagguuacaaaugcuaccgaacuugugcagucuagcuccacagggaagauuugcaacaauccgcacagaauccuggacggaaucaacuguacccucauugaugcccugcugggcgacccccauugcgauguguuucaggacgagacgugggaucucuucgucgaacggucuaaagccuuuagcaauuguuauccuuacgacgugcccgauuaugcuucccugcgcucucuuguugccagcuccgggacccuggaguucaucacagaaggauuuaccuggacaggcgugacccagaacggcgggagcaaugcuugcaagagaggaccuggcucuggguucuuuucccggcucaacuggcugacgaaaagcggaucuacauaccccguccuuaaugugaccaugccuaacaaugacaacuucgauaagcuguauauuuggggcguucaccauccguccacaaaucaagagcagaccagccucuacgugcaggccucugggcgcgucaccguguccacaagacggagccagcaaacgaucauucccaacaucggaucccgcccuugggugagaggccugucuagccggauuuccaucuauuggaccaucgucaagcccggcgacguucuggugauuaacagcaaugggaaccucaucgcgccucgcggauacuuuaaaaugagaacaggcaagucuuccauuaugcggagcgacgcccccaucgauaccuguauuucugagugcaucacaccgaaugggagcaucccuaacgacaaacccuuccagaaugugaacaagauuaccuacggagcuuguccuaaauaugucaagcagaauacgcugaaacuugccacaggcaugcgcaacgugcccgaaaagcagaccagagggcuguuuggagcuaucgccggcuucauugagaauggcugggaagggaugaucgauggaugguacggcuuucggcaccaaaacuccgaggggaccggacaggcggccgaccucaagucuacacaggcugccauugaucaaaucaauggcaaacugaaccgcguuaucgagaagaccaaugaaaaauuccaccagauugagaaggaguucagcgaaguggaagggagaauccaggaccuugagaaauaugucgaggauacaaagauugaccugugguccuacaacgcugaacuccugguggcccuggagaaucagcauacgaucgaucucaccgacagcgaaaugaacaagcuguuugauaaaacacggagacaacuucgcgagaacgccgaagacaugggcaauggaugcuucaagauuuaucacaaaugugacaacgcuugcaucgagucuauucggaauggcaccuacgaucaugacguuuauagagaugaggcgcugaacaaucgcuuucagaucaaggggguggaacucaaauccggauacaaggacuggauccuguggauuagcuucgccaucucuugcuuucuucugugugucgugcuccugggcuucauuaugugggcuugccagcgggggaacaucagauguaauauuugcaucuga

SEQ ID NO: 201840 - RNA, 1701 nt, Artificial Sequence; identical to SEQ ID NO: 198894
  derived and/or modified CDS sequence (opt5) from hemagglutinin__InfluenzaA__AGB12986

SEQ ID NO: 201841 - RNA, 1701 nt, Artificial Sequence; identical to SEQ ID NO: 199158
  derived and/or modified CDS sequence (opt5) from hemagglutinin__InfluenzaA__AGB13006

SEQ ID NO: 201842 - RNA, 1701 nt, Artificial Sequence
  derived and/or modified CDS sequence (opt5) from hemagglutinin__InfluenzaA__AGB13016
augaaggccauccuggugguccuccuguacaccauugcuacagccaacgcggacacgcuuugcaucggcuaucacgcuaauaacagcaccgauacaguugacaccgugcuggagaaaaaugugacagucacccauuccgugaaccuccuggaagauaagcacaaugggaaacuuuguaagcugagaggaguugcuccccuccaucugggcaaaugcaacauugccggguggauccugggaaauccugagugugaaucucucagcacagccuccucuuggagcuacauuguggagaccuccucuagcgacaacggcacgugcuauccgggggauuucaucaauuacgaggaacugcgggagcagcuuuccagcgucucuuccuuugaacgcuucgagaucuuucccaagaccagcucuuggccuaaccacgacuccaauaagggagugacagccgcuuguccccaugccggcgcgaaaucuuucuauaagaaccugauuuggcucguuaaaaagggcaauagcuacccuaaacuguccaagagcuauaucaacgauaaggggaaagaagugcuuguccuguggggcauucaccaccccuccaccacagccgaccaacagucucucuaccagaaugcugaugccuacguguuugugggaaccagcagauauuccaagaaauucaagccugagaucgcuauucggccgaaaguccgcgaccaggaggggagaaugaacuacuauuggacgcugguugaacccggagauaagaucacauuugaggccauuggcaaccugguggugccucgguacgcguucgccauggaaaagaaugcugggagcggaaucaucauuucugacacccccguccaugauugcaacacaaccugucaaaccccuaagggcgccaucaauacaucccuccccuuucagaacauucacccgaucacgauuggcaagugcccuaaauauguuaagagcaccaaacugcgccuugcuacagggcugagaaaugugcccucuauccagagccggggacucuucggcgccaucgccggguuuauugagggaggcuggaccgggaugguggacggaugguacggcuaucaucaccagaacgaacaaggcuccggguacgcugcggaccugaagucuacacagaaugccaucgauaaaauuaccaacaaggucaauagcgugaucgagaagaugaacacgcaguucacagcuguuggaaaagaguuuaaucaccuugaaaagcgcauugagaaccugaauaaaaagguggacgauggcuuccucgacaucuggaccuacaacgccgaacugcugguccuccuggagaaugaaagaacccuugauuaucaugacuccaacgugaaaaaccuguacgagaagguccggaaucagcucaagaacaaugccaaagagaucgggaacggauguuucgaauuuuaucacaagugcgauaauacauguauggagagcgugaaaaacggcaccuacgacuauccuaaguacucugaagaggcuaaacugaaucgcgaagagauugaugggguuaaacuugaguccgccagaguguaucaaauccuggcgauuuacagcacagucgcuucuucccucgugcugguugugagccugggcgccaucuccuucuggaugugcucuaacggaagccuccagugccggauuuguaucuga

SEQ ID NO: 201843 - RNA, 1701 nt, Artificial Sequence; identical to SEQ ID NO: 198939
  derived and/or modified CDS sequence (opt5) from hemagglutinin__InfluenzaA__AGB13026

SEQ ID NO: 201844 - RNA, 1701 nt, Artificial Sequence; identical to SEQ ID NO: 198881
  derived and/or modified CDS sequence (opt5) from hemagglutinin__InfluenzaA__AGB13036

SEQ ID NO: 201845 - RNA, 1701 nt, Artificial Sequence
  derived and/or modified CDS sequence (opt5) from hemagglutinin__InfluenzaA__AGB13048
augaaggccauccuggugguccuccuguacaccuucgcuacagccaacgcggacacgcuuugcauuggcuaucacgcuaauaacagcaccgauacaguugacaccgugcuggagaaaaaugugacagucacccauuccgugaaccuccuggaagauaagcacaaugggaaacuuuguaagcugagaggaguugcuccccuccaucugggcaaaugcaacaucgccggguggauucugggaaauccugagugugaaucucucagcacagccuccucuuggagcuacaucguggagaccuccucuagcgacaacggcacgugcuauccgggggauuuuauuaauuacgaagaacugcgggagcagcuuuccagcgucucuuccuucgaacgcuuugagaucuuccccaagaccagcucuuggccuaaccacgacuccaauaagggagugacagccgcuuguccccaugccggcgcgaaaucuuuuuauaagaaccugaucuggcucguuaaaaagggcaauagcuacccuaaacuguccaagagcuauauuaacgauaaggggaaagaagugcuuguccuguggggaauccaccaccccuccaccacagccgaccaacagucucucuaccagaaugcugaugccuacguguucgugggcaccagcagauauuccaagaaauuuaagccugagauugcuauccggccgaaaguccgcgaccaggaggggagaaugaacuacuauuggacgcugguugaacccggagauaagauuacauucgaggccaccggcaaccugguggugccucgguacgcguuugccauggaacgcaaugcugggagcggaaucauuaucucugacacacccguccaugauugcaacaccaccugucaaacaccuaaaggcgccaucaauacgucccuccccuuccagaacauucacccgaucaccauuggcaagugcccuaaguaugugaaaagcacaaagcugagacuugcuaccgggcugcggaauguucccucuauccagagccgcggacucuuuggcgccauugccggguucaucgagggaggcuggacagggaugguggacggaugguacggcuaucaucaccagaacgaacaaggcuccggguacgcugcggaccugaaaucuacccagaaugccaucgauaagauuacgaacaaagucaauagcgugaucgagaagaugaacacacaguuuaccgcuguuggaaaggaguucaaucaccuugagaaaagaauugagaaccugaauaagaaaguggacgauggcuuccucgacaucuggaccuacaacgccgaacugcugguccuccuggagaaugaacggacacuugauuaucaugacuccaacgugaagaaccuguacgagaaaguccgcaaucagcucaagaacaaugccaaggagauugggaacggauguuuugaguucuaucacaaaugcgauaauaccuguaucgaaagcgugaagaacggcacauacgacuauccuaaauacucugaagaggcuaagcugaauagagaagagaucgaugggguuaaacuugaguccacgcggauuuaucaaauccuggccauuuacagcaccguggcgucuucccucguccuggugguuagccugggcgcuaucuccuuuuggaugugcucuaacggaagccuccagugccgcauuuguaucuga

SEQ ID NO: 201846 - RNA, 1701 nt, Artificial Sequence
  derived and/or modified CDS sequence (opt5) from hemagglutinin__InfluenzaA__AGB13066
augaaggccauccuggugguccuccuguacaccuucgcuacagccaacgcggacacgcuuugcauuggcuaucacgcuaauaacagcaccgauacaguugacaccgugcuggagaagaaugugacagucacccauuccgugaaccuccuggaagauaagcacaaugggaaacuuuguaagcugagaggaguugcuccccuccaucugggcaaaugcaacaucgccggguggauucugggaaauccugagugugaaucucucagcacagccuccucuuggagcuacaucguggagaccuccucuagcgacaacggcacgugcuauccgggggauuuuauugacuacgaagaacugcgggagcagcuuuccagcgucucuuccuucgaacgcuuugagaucuuccccaagaccagcucuuggccuaaucacgauuccaacaagggagugacagccgcuuguccccaugccggcgcgaaaucuuuuuauaagaaucugaucuggcucguuaaaaagggcaacagcuacccuaaacuguccaagagcuauauuaaugacaaggggaaagaagugcuuguccuguggggaauccaccaccccuccaccucugccgaucaacagagccucuaccagaacgcugacgccuacguguucgugggcacauccagauauagcaagaaauuuaagccugagauugcuauccggccgaaaguccgcgaucaggaggggagaaugaauuacuauuggacccugguugaacccggagacaagauuacguucgaggccacaggcaaccugguggugccucgguacgcguuugccauggaacgcaacgcugggucuggaaucauuaucuccgauacccccguccaugacugcaauacaaccugucaaaccccuaaaggcgccaucaacacaagccuccccuuccagaauauucacccgaucacgauuggcaagugcccuaaguaugugaaagggaccaagcugagacuugcuacaggacugcggaacguucccucuauccagagccgcggccucuuuggggccauugccggauucaucgagggcggguggaccggaaugguggacggcugguacggcuaucaucaccagaaugaacaaggguccggauacgcugcggaucugaaaucuacacagcacgccaucgacgagauuaccaacaaggucaauagcgugaucgagaaaaugaacacgcaguuuacagcuguuggcaaggaguucaaucaucuugagaagagaauugaaaaccugaauaaaaagguggaugacggguuccucgauaucuggaccuacaacgccgagcugcugguccuccuggaaaaugagcggacccuugacuaucacgauuccaacgugaaaaaucuguacgagaagguccgcagccagcucaaaaacaacgccaaggaaauuggaaauggcuguuuugaguucuaucauaagugcgacaacacauguauggaaucugugaaaaaugggaccuacgauuauccuaaguacuccgaggaagcuaaacugaacagagaggagaucgacggcguuaaacuugaaagcacacggaucuaucaaauucuggccaucuacucuacgguggcguccagccucguccuggugguuucccugggagcuauuucuuuuuggaugugcagcaauggcucccuccagugccgcaucuguauuuga

SEQ ID NO: 201847 - RNA, 1701 nt, Artificial Sequence; identical to SEQ ID NO: 198981
  derived and/or modified CDS sequence (opt5) from hemagglutinin__InfluenzaA__AGB13082

SEQ ID NO: 201848 - RNA, 1701 nt, Artificial Sequence; identical to SEQ ID NO: 198881
  derived and/or modified CDS sequence (opt5) from hemagglutinin__InfluenzaA__AGB13105

SEQ ID NO: 201849 - RNA, 1701 nt, Artificial Sequence; identical to SEQ ID NO: 198939
  derived and/or modified CDS sequence (opt5) from hemagglutinin__InfluenzaA__AGB13125

SEQ ID NO: 201850 - RNA, 1701 nt, Artificial Sequence; identical to SEQ ID NO: 198939
  derived and/or modified CDS sequence (opt5) from hemagglutinin__InfluenzaA__AGB13130

SEQ ID NO: 201851 - RNA, 1701 nt, Artificial Sequence
  derived and/or modified CDS sequence (opt5) from hemagglutinin__InfluenzaA__AGB13140
augaaggccauccuggugguccuccuguacaccuucgcuacagccaacgcggacacgcuuugcauuggcuaucacgcuaauaacagcaccgauacaguugacaccgugcuggagaaaaaugugacagucacccauuccgugaaccuccuggaagauaagcacaaugggaaacuuuguaagcugagaggaguugcuccccuccaucugggcaaaugcaacaucgccggguggauucugggaaauccugagugugaaucucucagcacagccucccuguggucuuacaucguggagaccagcuccucugacaacggcacgugcuauccgggggauuuuauugacuacgaagaacuucgggagcagcugagcuccgucagcucuuucgaacgcuuugagaucuuccccaagaccuccagcuggccuaaucacgauucuaacaagggagugacagccgcuuguccccaugccggcgcgaaauccuuuuauaagaaucucaucuggcugguuaaaaagggcaacagcuacccuaaacuuucuaaguccuauauuaaugacaaggggaaagaagugcugguccucuggggaauccaccaccccagcaccacagccgaucaacagucccuguaccagaacgcugacaccuacguguucgugggcacgucuagauauagcaagaaauuuaagccugagauugccauccggccgaaaguccgcgaucaggaggggagaaugaauuacuauuggacacugguugaacccggagacaagauuaccuucgaggcuacaggcaaccucguggugccucgguacgccuuugcgauggaacgcaacgccggguccggaaucauuaucagcgauacccccguccaugacugcaauaccacaugucaaacgccuaaaggcgcuaucaacaccucucugcccuuccagaauauucacccgaucacaauuggcaagugcccuaaguaugugaaauccaccaaacuuagacuggccacagggcuccggaacguucccagcauccagucucgcggacuguuuggcgcuauugccggguucaucgagggaggcuggaccgggaugguggacggaugguacggcuaucaucaccagaaugaacaaggcagcggguacgccgcugaucuuaaauccacgcagaacgcgaucgacaagauuacaaauaaagucaacucugugaucgagaagaugaauacccaguuuaccgccguuggaaaggaguucaaccaccuggaaaagagaauugagaaucucaacaagaaaguggaugacggcuuccuggauaucuggacauacaaugcugaacugcucguccugcuugagaacgaacggacccuggacuaucaugauagcaaugugaagaaccucuacgagaaaguccgcaaccagcugaagaauaacgccaaggagauugggaauggauguuuugaguucuaucacaaaugcgacaacacauguauggaguccgugaagaauggcacguacgauuauccuaaauacagcgaagaggccaaacuuaacagagaagagaucgacgggguuaagcuggagucuacccggaucuaucaaauucucgcuaucuacuccacaguggccagcucucugguccuggugguuucccucggcgcgauuagcuuuuggaugugcuccaauggaucucugcagugccgcaucuguauuuga

SEQ ID NO: 201852 - RNA, 1701 nt, Artificial Sequence
  derived and/or modified CDS sequence (opt5) from hemagglutinin__InfluenzaA__AGB13159
augaaggccauccugguggucaugcucuacaccuucgcuacagccaacgcggacacgcugugcauuggcuaucacgcuaauaacagcaccgauacaguugacaccgugcuugagaaaaaugugacagucacccauuccgugaaccugcucgaagauaagcacaaugggaaacuguguaaacuuagaggaguugccucucugcaucucggcaaaugcaacaucgccggguggauucugggaaaucccgagugugaaagccuguccacagcuucuagcugguccuacaucguggagaccucuagcuccgacaacggcacgugcuauccuggggauuuuauugacuacgaagaacuccgggagcagcugagcucugucuccagcuucgaacgcuuugagaucuucccgaagaccucuuccuggcccaaucacgauagcaacaagggagugacagccgcuuguccucaugccggcgcgaaaggcuuuuauaagaaucuuaucuggcugguuaaaaaggggaacucuuaccccaaacucuccaagagcuauauuaaugacaagggaaaagaagugcugguccuuuggggcauccaccacccuuccaccacagccgaucaacagucucuguaccagaacgcugacaccuacguguucguggggacgagcagauauuccaagaaauuuaagcccgagauugccauccggccuaaaguccgcgaucaggagggaagaaugaauuacuauuggacacucguugaaccgggcgacaagauuaccuucgaggcuacagggaaccugguggugccccgguacgccuuugcgauggaacgcaacgccggaagcggcaucauuaucucugauaccccuguccaugacugcaauaccacaugucaaacgcccaaaggcgcuaucaacaccucccugccuuuccagaauauucaccccaucacaauugggaagugcccgaaguaugugaaaagcaccaagcucagacuggccacaggacuucggaacguuccuucuauccagagccgcggccuguuuggggcuauugccggauucaucgagggcggguggaccggaaugguggacggcugguacggcuaucaucaccagaaugaacaaggguccggauacgccgcugaucucaaaucuacgcagaacgcgaucgacaagauuacaaauaaagucaacagcgugaucgagaagaugaauacccaguuuaccgccguuggcaaggaguucaaccaccuggaaaagagaauugagaaucuuaacaagaaaguggaugacggguuccuggauaucuggacauacaaugcugaacuccugguccugcucgagaacgaacggacccuggacuaucaugauuccaaugugaagaaccuuuacgagaaaguccgcaaccagcugaagaauaacgccaaggagauuggaaauggcuguuuugaguucuaucacaaaugcgacaacacauguauggagagcgugaagaaugggacguacgauuaucccaaauacucugaagaggccaagcucaacagagaagagaucgacggcguuaaacuggaguccacccggaucuaucaaauucuugcuaucuacagcacaguggccucuucccugguccucgugguuagccugggagcgauuuccuuuuggaugugcucuaauggcagccugcagugccgcaucuguauuuga

SEQ ID NO: 201853 - RNA, 1701 nt, Artificial Sequence; identical to SEQ ID NO: 198896
  derived and/or modified CDS sequence (opt5) from hemagglutinin__InfluenzaA__AGB13170

SEQ ID NO: 201854 - RNA, 1701 nt, Artificial Sequence
  derived and/or modified CDS sequence (opt5) from hemagglutinin__InfluenzaA__AGB13180
augaaggccauccuggugguccuccuguacaccuucgcuacagccaacgcggacacgcuuugcauuggcuaucacgcuaauaacagcaccgauacaguugacaccgugcuggagaaaaaugugacagucacccauuccgugaaccuccuggaagauaagcacaaugggaaacuuuguaagcugagaggaguugcuccccuccaucugggcaaaugcaacaucgccggguggauucugggaaauccugagugugaaucucucagcacagccuccucuuggagcuacaucguggagaccuccucuagcgacaacggcacgugcuauccgggggauuuuauuaauuacgaagaacugcgggagcagcuuuccagcgucucuuccuucgaacgcuuugagaucuuccccaagaccagcucuuggccuaaccacgacuccaauaagggagugacagccgcuuguccccaugccggcgcgaaaucuuuuuauaagaaccugaucuggcucguuaaaaagggcaauagcuacccuaaacuguccaagagcuauauuaacgauaaggggaaagaagugcuuguccuguggggaauccaccaccccuccaccacagccgaccaacagucucucuaccagaaugcugaugccuacguguucgugggcaccagcagauauuccaagaaauuuaagccugagauugcuauccggccgaaaguccgcgaccaggaggggagaaugaacuacuauuggacgcugguugaacccggagauaagauuacauucgaggccaccggcaaccugguggugccucgguacgcguuugccauggaacgcaaugcugggagcggaaucauuaucucugacacauccguccaugauugcaacaccaccugucaaacacccaaaggcgccaucaauacgagccucccuuuccagaacauucaccccaucaccauuggcaagugcccgaaguaugugaaaucuacaaagcugagacuugcuaccgggcugcggaauguuccuagcauccagucccgcggacucuuuggcgccauugccggguucaucgagggaggcuggacagggaugguggacggaugguacggcuaucaucaccagaacgaacaaggcucuggguacgcugcggaccugaaaagcacccagaaugccaucgauaagauuacgaacaaagucaauuccgugaucgagaagaugaacacacaguuuaccgcuguuggaaaggaguucaaucaccuugagaaaagaauugagaaccugaauaagaaaguggacgauggcuuccucgacaucuggaccuacaacgccgaacugcugguccuccuggagaaugaacggacacuugauuaucaugacagcaacgugaagaaccuguacgagaaaguccgcaaucagcucaagaacaaugccaaggagauugggaacggauguuuugaguucuaucacaaaugcgauaauaccuguauggaaucugugaagaacggcacauacgacuaucccaaauacuccgaagaggcuaagcugaauagagaagagaucgaugggguuaaacuugagagcacgcggaucuaucaaauucuggccaucuacucuaccguggcguccagccucguccuggugguuucccugggcgcuauuucuuuuuggaugugcagcaacggaucccuccagugccgcaucuguauuuga

SEQ ID NO: 201855 - RNA, 1701 nt, Artificial Sequence; identical to SEQ ID NO: 198939
  derived and/or modified CDS sequence (opt5) from hemagglutinin__InfluenzaA__AGB13190

SEQ ID NO: 201856 - RNA, 1701 nt, Artificial Sequence
  derived and/or modified CDS sequence (opt5) from hemagglutinin__InfluenzaA__AGB13200
augaaggccauccuggugguccuccuguacaccuucgcuacagccaacgcggacacgcuuugcauuggcuaucacgcuaauaacagcaccgauacaguugacaccgugcuggagaaaaaugugacagucacccauuccgugaaccuccuggaagauaagcacaaugggaaacuuuguaagcugagaggaguugcuccccuccaucugggcaaaugcaacaucgccggguggauucugggaaauccugagugugaaucucucagcacagccuccucuuggagcuacaucguggagaccuccucuagcgacaacggcacgugcuauccgggggauuuuauuaauuacgaagaacugcgggagcagcuuuccagcgucucuuccuucgaacgcuuugagaucuuccccaagaccagcucuuggccuaaccacgacuccaauaagggagugacagccgcuuguccccaugccggcguuaagagcuuuuauaagaaccugaucuggcucgugaaaaagggcaauucuuacccuaaacuguccaagagcuauauuaacgauaaggggaaagaaguccuugugcuguggggaauccaccaccccuccaccacaaccgaccaacagucucucuaccagaaugcggaugccuacguguucgucggcacgagcaaguauuccaaaaaguuuaaaccugagauugcuaucagaccgaagguucgggaccaggaggggcgcaugaacuacuauuggacacugguggaacccggagauaaaauuaccuucgaggccacaggcaaccugguggucccuagauacgcuuuugccauggaacggaaugcggggagcggaaucauuaucucugacacccccgugcaugauugcaacaccacaugucaaacgccuaagggcgccaucaauaccucccuccccuuccagaacauucacccgaucacaauuggcaagugcccuaaauauguuaagagcaccaaacugcgccuugcuacagggcugagaaaugugcccucuauccagagccggggacucuuuggcgccauugcuggguucaucgagggaggcuggaccgggauggucgacggaugguacggcuaucaucaccagaacgaacaaggcuccggguacgccgccgaccugaagucuacgcagaaugcuaucgauaaaauuacaaacaaggugaauagcguuaucgagaagaugaacacccaguuuaccgcggugggaaaagaguucaaucaccuugaaaagcgcauugagaaccugaauaaaaaggucgacgauggcuuccucgacaucuggacauacaacgccgaacugcuggugcuccuggagaaugaaagaacccuugauuaucaugacuccaacgucaaaaaccuguacgagaaggugcggaaucagcucaagaacaaugcuaaagagauugggaacggauguuuugaguucuaucacaagugcgauaauacauguauggagagcguuaaaaacggcacguacgacuauccuaaguacucugaagaggccaaacugaaucgcgaagagaucgauggggugaaacuugaguccaccagaaucuaucaaauucuggccaucuacagcacagucgcuucuucccucgugcugguugugagccugggcgccauuuccuuuuggaugugcucuaacggaagccuccagugccggaucuguauuuga

SEQ ID NO: 201857 - RNA, 1701 nt, Artificial Sequence
  derived and/or modified CDS sequence (opt5) from hemagglutinin__InfluenzaA__AGB13210
augaaggccacccuggugguccuccuguacacauucgcuacggccaacgcggacacccuuugcaucggcuaucacgcuaauaacagcacagauaccguugacacagugcuggagaaaaaugugaccgucacacauuccgugaaccuccuggaagauaagcacaaugggaaacuuuguaagcugagaggaguugcuccccuccaucugggcaaaugcaacauugccggguggauccugggaaauccugagugugaaucucucagcaccgccuccucuuggagcuacauuguggagacguccucuagcgacaacggaaccugcuauccgggggauuuuaucaauuacgaagaacugcgggagcagcuuuccagcgucucuuccuucgaacgcuuugagauuuuccccaagacaagcucuuggccuaaccacgacuccaauaagggagugaccgccgcuuguccccaugccggcgcgaaaucuuuuuauaagaaccugaucuggcucguuaaaaagggcaauagcuacccuaaacuguccaagagcuauaucaacgauaaggggaaagaagugcuuguccuguggggcauucaccaccccuccacaucugccgaccaacagagccucuaccagaaugcugaugccuacguguucgugggcaccuccaaguauagcaaaaaguuuaaaccugagaucgcugucagaccgaagguucgggaccaggaggggcgcaugaacuacuauuggacgcugguggaacccggagauaaaauuacauucgaggccaccggcaaccugcucgugccuagauacgcguuugccauggaacggaaugcugggucuggaaucauuaucuccgacacacccguccaugauugcaacaccaccugucaaacaccuaagggcgccauuaauacgagccugcccuuccagaacauccacccgaucaccauuggcaagugcccuaaauaugugaagucuacaaaacuucgccuggcuaccgggcucagaaauguucccagcauccagucccggggacuguuuggcgccauugccggguucaucgagggaggcuggacagggaugguggacggaugguacggcuaucaucaccagaacgaacaaggcucuggguacgcugcggaccuuaagagcacccagaaugccauugauaaaaucacgaacaaggucaauuccgugaucgagaagaugaacacacaguuuaccgcuguuggaaaagaguucaaucaccuggaaaagcgcauugagaaccucaauaaaaagguggacgauggcuuccuggacaucuggaccuacaacgccgaacugcucguccugcuugagaaugaaagaacacuggauuaucaugacagcaacgugaaaaaccucuacgagaagguccggucucagcugaagaauaacgccaaagagauugggaauggauguuuugaguucuaucacaagugcgauaacaccuguauggaguccgugaaaaauggcacauacgacuauccuaaguacagcgaagaggcuaaacuuaaccgcgaagagaucgaugggguuaagcuggagucuacgagaauuuaucaaauccucgccaucuacuccaccguggcgagcucccugguccuggugguuucucucggcgcuauuagcuuuuggaugugcuccaauggaucucugcagugccggaucuguauuuga

SEQ ID NO: 201858 - RNA, 1701 nt, Artificial Sequence
  derived and/or modified CDS sequence (opt5) from hemagglutinin__InfluenzaA__AGB13220
augaaggccauccuggugguccuccuguacaccuucgcuacagccaacgcggacacgcuuugcauuggcuaucacgcuaauaacagcaccgauacaguugacaccgugcuggagaagaaugugacagucacccauuccgugaaccuccuggaagauaagcacaaugggaaacuuuguaagcugagaggaguugcuccccuccaucugggcaaaugcaacaucgccggguggauucugggaaauccugagugugaaucucucagcacagccuccucuuggagcuacaucguggagaccuccauuucugacaacggcacgugcuauccgggggauuuuaucaauuacgaagaacugcgggagcagcuuagcuccgucagcucuuucgaacgcuuugagaucuuccccaagaccuccagcuggccuaaccacgacucuaauaagggagugacagccgcuuguccccaugccggcgcgaaauccuuuuauaagaaccugauuuggcucguuaaaaagggcaauagcuacccuaaacugucuaaguccuauaucaacgauaaggggaaagaagugcuuguccuguggggcauucaccaccccagcaccacagccgaccaacagucccucuaccagaaugcugaugccuacguguucgugggaaccucuaaguauagcaaaaaguuuaaaccugagaucgcuauuagaccgaagguccgggaccaggaggggcgcaugaacuacuauuggacgcugguugaacccggagauaaaaucacauucgaggccaccggcaaccugguggugccuagauacgcguuugccauggaacggaaugcuggguccggaauuaucaucagcgacacacccguccaugauugcaacaccaccugucaaacaccuaagggcgccauuaauacgucucuccccuuccagaacauccacccgauuaccaucggcaagugcccuaaauaugugaaguccacaaaacugcgccuugcuaccgggcugagaaauguucccagcauucagucucggggacucuuuggcgccaucgccggguucaucgagggaggcuggacagggaugguggacggaugguacggcuaucaucaccagaacgaacaaggcagcggguacgcugcggaccugaaguccacccagaaugccauugauaaaaucacgaacaaggucaauucugugauugagaagaugaacacacaguuuaccgcuguuggaaaagaguucaaucaccuugaaaagcgcaucgagaaccugaauaaaaagguggacgauggcuuccucgacauuuggaccuacaacgccgaacugcugguccuccuggagaaugaaagaacacuugauuaucaugacagcaacgugaaaaaccuguacgagaagguccggaaucagcucaagaacaaugccaaagagaucgggaacggauguuuugaguucuaucacaagugcgauaauaccuguauggaguccgugaaaaacggcacauacgacuauccuaaguacagcgaagaggcuaaacugaaucgcgaagagaucgaugggguuaaacuugagucuacgagaauuuaucaaauccuggccauuuacuccaccguggcgagcucucucguccuggugguuucccugggcgcuaucagcuuuuggaugugcuccaacggaucucuccagugccggauuuguaucuga

SEQ ID NO: 201859 - RNA, 1701 nt, Artificial Sequence
  derived and/or modified CDS sequence (opt5) from hemagglutinin__InfluenzaA__AGB13230
augaaggccauccuggugguccuccuguacaccuucgcuacagccaacgcggacacgcuuugcauuggcuaucacgcuaauaacagcaccgauacaguugacaccgugcuggagaagaaugugacagucacccauuccgugaaccuccuggaagauaaucacaacgggaaacuuuguaagcugagaggaguugcgccccuccaucugggcaagugcaauaucgccggguggauucugggaaacccugagugugaaucucucagcacagcuuccucuuggagcuacaucguggagaccuccucuagcgacaauggcacgugcuauccgggggauuuuauuaacuacgaagaacugcgggagcagcuuuccagcgucucuuccuucgaacgcuuugagaucuuccccaaaaccagcucuuggccuaaucacgacuccaacaagggagugacagccgcuuguccccaugccggcgccaagagcuuuuauaaaaaucugaucuggcucguuaagaaaggcaacucuuacccuaagcuguccaaaagcuauauuaaugauaaggggaaggaagugcuuguccuguggggaauccaccaccccuccaccacagccgaccaacagucucucuaccagaacgcugaugccuacguguucgugggcaccagcagauauuccaaaaaguuuaaaccugagauugcuauccggccgaagguccgcgaccaggaggggagaaugaacuacuauuggacgcugguugaacccggagauaaaauuacauucgaggccaccggcaaucugguggugccucgguacgcguuugccauggaacgcaacgcugggagcggaaucauuaucucugacacacccguccaugauugcaauaccaccugucaaacaccuaagggcgccaucaacacgucccuccccuuccagaauauucacccgaucaccauuggcaaaugcccuaaguauguuaagagcacaaaacugagacuugcuaccgggcugcggaacgugcccucuauccagagccgcggacucuuuggcgccauugccggguucaucgagggaggcuggacagggaugguggacggaugguacggcuaucaucaccagaaugaacaaggcuccggguacgcugcggaccugaagucuacccagaacgccaucgauaaaauuacgaauaaggucaacagcgugaucgagaaaaugaauacacaguuuaccgcuguuggaaaggaguucaacagacuugaaaagcggauugagaaucugaacaaaaagguggacgauggcuuccucgacaucuggaccuacaaugccgaacugcugguccuccuggagaacgaacgcacacuugauuaucacgacuccaacgugaaaaaucuguacgagaaggucagaaaccagcucaaaaauaacgccaaggagauugggaauggauguuuugaguucuaucauaagugcgauaacaccuguauggagagcgugaaaaauggcacauacgacuauccuaaguacucugaagaggcuaaacugaaccgggaagagaucgaugggguuaaacuugaguccacgcgcaucuaucaaauucuggccaucuacagcaccguggcgucuucccucguccuggugguuagccugggcgcuauuuccuuuuggaugugcucuaauggaagccuccagugcagaaucuguauuuga

SEQ ID NO: 201860 - RNA, 1701 nt, Artificial Sequence; identical to SEQ ID NO: 198939
  derived and/or modified CDS sequence (opt5) from hemagglutinin__InfluenzaA__AGB13240

SEQ ID NO: 201861 - RNA, 1701 nt, Artificial Sequence; identical to SEQ ID NO: 198939
  derived and/or modified CDS sequence (opt5) from hemagglutinin__InfluenzaA__AGB13250

SEQ ID NO: 201862 - RNA, 1701 nt, Artificial Sequence
  derived and/or modified CDS sequence (opt5) from hemagglutinin__InfluenzaA__AGB13260
augaaggccauccuggugguccuccuguacaccuucgcuacagccaacgcggacacgcuuugcauuggcuaucacgcuaauaacagcaccgauacaguugacaccgugcuggagaagaaugugacagucacccauuccgugaaccuccuggaagauaagcacaaugggaaacuuuguaagcugagaggaguugcuccccuccaucugggcaaaugcaacaucgccggguggauucugggaaauccugagugugaaucucucagcacagccuccucuuggagcuacaucguggagaccuccucuagcgacaacggcacgugcuauccgggggauuuuauugacuacgaagaacugcgggagcagcuuuccagcgucucuuccuucgaacgcuuugagaucuuccccaagaccagcucuuggccuaaucacgauuccaacaagggagugacaaccgccuguccccaugcuggcagcaaaucuuuuuauaagaaucugaucuggcucguuaaaaagggcaacuccuacccuaaacugagcaaguccuauauuaaugacaaggggaaagaagugcuuguccuguggggaauccaccaucccccuacaucugccgaucaacagagccucuaccagaacgcggacgccuacguguucgugggcaccuccagauauagcaagaaauuuaagccggagauugcuauccggcccaaaguccgcgaucaggaggggagaaugaauuacuauuggacgcugguugaaccuggagacaagauuacauucgaggccaccggcaaccugguggugccccgguacgcuuuugccauggaacgcaacgcggggucuggaaucauuaucuccgauacaccuguccacgacugcaauaccaccugucaaacacccaaaggcgccaucaacacgagccucccguuccagaaugugcacccuauuaccaucggcaagugccccaaguauguuaaaucuacaaagcugagacuugcuaccgggcugcggaacgugccuagcauucagucccgcggacucuuuggcgccaucgcuggguucauugagggaggcuggacagggauggucgacggaugguacggcuaucaucaccagaaugaacaaggcucuggguacgccgccgaucugaaaagcacccagaacgcuaucgacgagaucacgaauaaggugaacuccguuauugagaaaaugaauacacaguuuaccgcggugggaaaggaguucaaccaccuugagaagagaaucgaaaaucugaacaaaaaggucgaugacggcuuccucgauauuuggaccuacaaugccgagcugcuggugcuccuggaaaacgagcggacacuugacuaucaugauagcaaugucaaaaaccuguacgagaaggugcgcucucagcucaaaaacaaugcuaaggaaaucgggaacggauguuuugaguucuaucacaagugcgacaauaccuguauggaauccauuaaaaacggcacauacgauuaucccaaguacagcgaggaagccaaacugaauagagaggagaucgacgggguuaaacuugaaucuacgcggaucuaucaaauucuggccaucuacuccaccguggcuagcucccucguccuggugguuucucugggcgccauuagcuuuuggaugugcuccaacggaucucuccagugccgcaucuguauuuga

SEQ ID NO: 201863 - RNA, 1701 nt, Artificial Sequence
  derived and/or modified CDS sequence (opt5) from hemagglutinin__InfluenzaA__AGB13270
augaaggccauccuggugguccuccuguacaccuucgcuacagccaacgcggacacgcuuugcauuggcuaucacgcuaauaacagcaccgauacaguugacaccgugcuggagaaaaaugugacagucacccauuccgugaaccuccuggaagauaagcacaaugggaaacuuuguaagcugagaggaguugcuccccuccaucugggcaaaugcaacaucgccggguggauucugggaaauccugagugugaaucucucagcacagccuccucuuggagcuacaucguggagaccuccucuagcgacaacggcacgugcuauccgggggauuuuauuaauuacgaagaacugcgggagcagcuuuccagcgucucuuccuucgaacgcuuugagaucuuccccaagaccagcucuuggccuaaccacgacuccaauaagggagugacagccgcuuguccccaugccggcgcgaaaucuuuuuauaagaaccugaucuggcucguuaaaaagggcaauagcuacccuaaacuguccaagagcuauauuaacgauaaggggaaagaagugcuuguccuguggggaauccaccaccccuccaccucugccgaccaacagagccucuaccagaaugcugaugccuacguguucgugggcacauccaaguauagcaaaaaguuuaaaccugagauugcugucagaccgaagguucgggaccaggaggggcgcaugaacuacuauuggacccugguggaacccggagauaaaaucacguucgaggccacaggcaaccugcucgugccuagauacgcguuugccauggaacggaaugcugggucuggaauuaucauuuccgacacccccguccaugauugcaacacaaccugucaaaccccuaagggcgccaucaauacaagccugcccuuccagaacauccacccgauuacgaucggcaagugcccuaaauaugugaagucuaccaaacuucgccuggcuacagggcucagaaauguucccagcauucagucccggggacuguuuggcgccaucgccggguucauugagggaggcuggaccgggaugguggacggaugguacggcuaucaucaccagaacgaacaaggcucuggguacgcugcggaccuuaagagcacacagaaugccaucgauaaaaucaccaacaaggucaauuccgugauugagaagaugaacacgcaguuuacagcuguuggaaaagaguucaaucaccuggaaaagcgcaucgagaaccucaauaaaaagguggacgauggcuuccuggacauuuggaccuacaacgccgaacugcucguccugcuugagaaugaaagaacccuggauuaucaugacagcaacgugaaaaaccucuacgagaagguccggucucagcugaagaauaacgccaaagagaucgggaauggauguuuugaguucuaucacaagugcgauaacacauguauggaguccgugaaaaauggcaccuacgacuauccuaaguacagcgaagaggcuaaacuuaaccgcgaaaagauugaugggguuaagcuggagucuacaagaaucuaucaaauccucgccauuuacuccacgguggcgagcucccugguccuggugguuucucucggcgcuaucagcuuuuggaugugcuccaauggaucucugcagugccggauuuguaucuga

SEQ ID NO: 201864 - RNA, 1701 nt, Artificial Sequence
  derived and/or modified CDS sequence (opt5) from hemagglutinin__InfluenzaA__AGB13280
augaaggccauccuggugguccuccuguacaccuucgcuacagccaacgcggacacgcuuugcauuggcuaucacgcuaauaacagcaccgauacaguugacaccgugcuggagaaaaaugugacagucacccauuccgugaaccuccuggaagauaagcacaaugggaaacuuuguaagcugagaggaguugcuccccuccaucugggcaaaugcaacaucgccggguggauucugggaaauccugagugugaaucucucagcacagccuccucuuggagcuacaucguggagaccuccucuagcgacaacggcacgugcuauccgggggauuuuauuaauuacgaggaacugcgggagcagcuuuccagcgucucuuccuucgaacgcuuugagaucuuccccaagaccagcucuuggccuaaccacgacuccaauaagggagugacagccgcuuguccccaugccggcgcgaaaucuuuuuauaagaaccugaucuggcucguuaaaaagggcaauagcuacccuaaacuguccaagagcuauauuaacgauaaggggaaagaagugcuuguccuguggggaauccaccaccccuccaccaaugccgaccaacagucucucuaccagaacgcugaugccuacguguucgugggcacaagcaaguauuccaaaaaguuuaaaccugagauugcugucagaccgaagguucgggaccaggaggggcgcaugaacuacuauuggacccugguggaacccggagauaaaaucacguucgaggccacaggcaaucugcucgugccuagauacgcguuugccauggaacggaacgcugggagcggaauuaucauuucugacacccccguccaugauugcaauacaaccugucaaaccccuaagggcgccaucaacacaucccugcccuuccagaauauccacccgauuacgaucggcaagugcccuaaauauguuaagagcaccaaacuucgccuggcuacagggcucagaaacgugcccucuauucagagccggggacuguuuggcgccaucgccggguucauugagggaggcuggaccgggaugguggacggaugguacggcuaucaucaccagaauggccaaggguccggauacgcugcggaccuuaagucuacacagaacgccaucgauaaaaucaccaauaaggucaacagcgugauugaaaagaugaauacgcaguuuacagcuguuggcaaagaguucaaccaccuggagaagcgcaucgaaaaucucaacaaaaagguggacgauggguuccuggacauuuggaccuacaaugccgagcugcucguccugcuugaaaacgagagaacccuggauuaucaugacuccaacgugaaaaaucucuacgaaaagguccggagccagcugaagaacaaugccaaagagaucggaaacggcuguuuugaguucuaucacaagugcgauaauacauguauggaaucugugaaaaacgggaccuacgacuauccuaaguacuccgaggaagcuaaacuuaaucgcgaggaaauugauggcguuaagcuggagagcacaagaaucuaucaaauccucgccauuuacucuacgguggcguccagccugguccuggugguuucccucggagcuaucucuuuuuggaugugcagcaacggcucccugcagugccggauuuguaucuga

SEQ ID NO: 201865 - RNA, 1701 nt, Artificial Sequence
  derived and/or modified CDS sequence (opt5) from hemagglutinin__InfluenzaA__AGB13290
augaaggccauccuggugguccuccuguacaccuucgcuacagccaacgcggacacgcuuugcauuggcuaucacgcuaauaacagcaccgauacaguugacaccgugcuggagaaaaaugugacagucacccauuccgugaaccuccuggaaguuaagcacaaugggaaacuuuguaagcugagaggaguggcuccccuccaucugggcaaaugcaacaucgccggguggauucugggaaauccugagugugaaucucucagcacagccuccucuuggagcuacaucgucgagaccuccucuagcgauaacggcacgugcuauccgggggacuuuauuaauuacgaagaacugcgggagcagcuuuccagcgugucuuccuucgaacgcuuugagaucuuccccaagaccagcucuuggccuaaccacgauuccaauaagggaguuacagccgcuuguccccaugccggcgcgaaaucuuuuuauaagaaccugaucuggcucgugaaaaagggcaauagcuacccuaaacuguccaagagcuauauuaacgacaaggggaaagaaguccuugugcuguggggaauccaccaccccuccaccacagccgaucaacagucucucuaccagaaugcugacgccuacguguucgucggcaccagcagauauuccaagaaauuuaagccugagauugcuauccggccgaaaguucgcgaucaggaggggagaaugaacuacuauuggacgcugguggaacccggagacaagauuacauucgaggccaccggcaaccugguggucccucgguacgcguuugccauggaacgcaaugcugggagcggaaucauuaucucugauacacccgugcaugacugcaacaccaccugucaaacaccuaaaggcgccaucaauacgucccuccccuuccagaacauucacccgaucaccauuggcaagugcccuaaguauguuaaaagcacaaagcugagacuugcuaccgggcugcggaaugugcccucuauccagagccgcggacucuuuggcgccauugccggguucaucgagggaggcuggacagggauggucgauggaugguacggcuaucaucaccagaacgaacaaggcuccggguacgcugcggaccugaaaucuacccagaaugccaucgacaagauuacgaacaaagugaauagcguuaucgagaagaugaacacacaguuuaccgcugugggaaaggaguucaaucaccuugagaaaagaauugagaaccugaauaagaaagucgaugacggcuuccucgauaucuggaccuacaacgccgaacugcuggugcuccuggagaaugaacggacacuugacuaucaugauuccaacgucaagaaccuguacgagaaagugcgcaaucagcucaagaacaaugccaaggagauugggaacggauguuuugaguucuaucacaaaugcgacaauaccuguauggaaagcguuaagaacggcacauacgauuauccuaaauacucugaagaggcuaagcugaauagagaagagaucgacggggugaaacuugaguccacgcggaucuaucaaauucuggccaucuacagcaccgucgcgucuucccucgugcugguugugagccugggcgcuauuuccuuuuggaugugcucuaacggaagccuccagugccgcaucuguauuuga

SEQ ID NO: 201866 - RNA, 1701 nt, Artificial Sequence; identical to SEQ ID NO: 198939
  derived and/or modified CDS sequence (opt5) from hemagglutinin__InfluenzaA__AGB13300

SEQ ID NO: 201867 - RNA, 1701 nt, Artificial Sequence
  derived and/or modified CDS sequence (opt5) from hemagglutinin__InfluenzaA__AGB13310
augaaggccauccuggugguccuccuguacaccuucgcuacagccaacgcggacacgcuuugcauuggcuaucacgcuaauaacagcaccgauacaguugacaccgugcuggagaagaaugugacagucacccauuccgugaaccuccuggaagauaagcacaaugggaaacuuuguaagcugagaggaguugcuccccuccaucugggcaaaugcaacaucgccggguggauucugggaaauccugagugugaaucucucagcacagccuccucuuggagcuacaucguggagaccuccucuagcgacaacggcacgugcuauccgggggauuuuauugacuacgaagaacugcgggagcagcuuuccagcgucucuuccuucgaacgcuuugagaucuuccccaagaccagcucuuggccuaaucacgauuccaacaagggagugacagccgcuuguccccaugccggcgcgaaauccuuuuauaagaaucugaucuggcucguuaaaaagggcaacucuuacccuaaacuguccaagagcuauauuaaugacaaggggaaagaagugcuuguccuguggggagugcaccaccccuccaccucugccgaucaacagagccucuaccagaacgcugacgccuacguguucgucggcacauccagauauagcaagaaauuuaagccugagaucgcuauucggccgaaaguucgcgaucaggaggggagaaugaauuacuauuggacccugguggaacccggagacaagaucacguucgaggccacaggcaaccugguggucccucgguacgcguuugccauggaacgcaacgcugggucuggaauuaucauuuccgauacccccgugcaugacugcaauacaaccugucaaaccccuaaaggcgccaucaacacaagccuccccuuccagaauauccacccgauuacgaucggcaagugcccuaaguauguuaaaucuaccaagcugagacuugcuacagggcugcggaacgugcccagcauucagucccgcggacucuuuggcgccaucgccggguucauugagggaggcuggaccgggauggucgacggaugguacggcuaucaucaccagaaugaacaaggcucuggguacgcugcggaucugaaaagcacacagcacgccaucgacgagaucaccaacaaggugaauagcguuauugagaaaaugaacacgcaguuuacagcugugggaaaggaguucaaucaucuugagaagagaaucgaaaaccugaauaaaaaggucgaugacggcuuccucgauauuuggaccuacaacgccgagcugcuggugcuccuggaaaaugagcggacccuugacuaucacgauagcaacgucaaaaaucuguacgagaaggugcgcucucagcucaaaaacaacgccaaggaaaucgggaauggauguuuugaguucuaucauaagugcgacaacacauguauggaauccguuaaaaauggcaccuacgauuauccuaaguacagcgaggaagcuaaacugaacagagaggagauugacggggugaaacuugaaucuacacggaucuaucaaauccuggccauuuacuccacggucgcgagcucccucgugcugguugugucucugggcgcuaucagcuuuuggaugugcuccaauggaucucuccagugccgcauuuguaucuga

SEQ ID NO: 201868 - RNA, 1701 nt, Artificial Sequence
  derived and/or modified CDS sequence (opt5) from hemagglutinin__InfluenzaA__AGB13320
augaaggccauccuggugguccuccuguacaccauugcuacagccaacgcggacacgcuuugcaucggcuaucacgcuaauaacagcaccgauacaguugacaccgugcuggagaaaaaugugacagucacccauuccgugaaccuccuggaagauaagcacaaugggaaacuuuguaagcugagaggaguugcuccccuccaucugggcaaaugcaacauugccggguggauccugggaaauccugagugugaaucucucagcacagccuccucuuggagcuacauuguggagaccuccucuagcgacaacggcacgugcuauccgggggauuucaucaauuacgaggaacugcgggagcagcuuuccagcgucucuuccuuugaacgcuucgagaucuuucccaagaccagcucuuggccuaaccacgacuccaauaagggagugacagccgcuuguccccaugccggcgcgaaaucuuucuauaagaaccugauuuggcucguuaaaaagggcaauagcuacccuaaacuguccaagagcuauaucaacgauaaggggaaagaagugcuuguccuguggggcauucaccaccccuccaccacagccgaccaacagucucucuaccagaaugcugaugccuacguguuugugggaaccagcagauauuccaagaaauucaagccugagaucgcuauucggccgaaaguccgcgaccaggaggggagaaugaacuacuauuggacgcugguugaacccggagauaagaucacauuugaggccaccggcaaccugguggugccucgguacgcguucgccauggaaaagaaugcugggagcggaauuaucaucucugacacacccguccaugauugcaacaccaccugucaaacaccuaagggcgccauuaauacgucccuccccuuucagaacauccacccgauuaccaucggcaagugcccuaaauauguuaagagcacaaaacugcgccuugcuaccgggcugagaaaugugcccucuauucagagccggggacucuucggcgccaucgccggguuuaucgagggaggcuggacagggaugguggacggaugguacggcuaucaucaccagaacgaacaaggcuccggguacgcugcggaccugaagucuacccagaaugccauugauaaaaucacgaacaaggucaauagcgugauugagaagaugaacacacaguucaccgcuguuggaaaagaguuuaaucaccuugaaaagcgcaucgagaaccugaauaaaaagguggacgauggcuuccucgacauuuggaccuacaacgccgaacugcugguccuccuggagaaugaaagaacacuugauuaucaugacuccaacgugaaaaaccuguacgagaagguccggaaucagcucaagaacaaugccaaagagaucgggaacggauguuucgaauuuuaucacaagugcgauaauaccuguauggagagcgugaaaaacggcacauacgacuauccuaaguacucugaagaggcuaaacugaaucgcgaagagaucgaugggguuaaacuugaguccgccagaguguaucaaauucuggcgaucuacagcacggucgcuucuucccucgugcugguugugagccugggcgccauuuccuucuggaugugcucuaacggaagccuccagugccggaucuguauuuga

SEQ ID NO: 201869 - RNA, 1701 nt, Artificial Sequence
  derived and/or modified CDS sequence (opt5) from hemagglutinin__InfluenzaA__AGB13330
augaaggccauccugguggucaugcucuacaccuucgcuacagccaacgcggacacgcugugcauuggcuaucacgcuaauaacagcaccgauacaguugacaccgugcuugagaaaaaugugacagucacccauuccgugaaccugcucgaagauaagcacaaugggaaacuguguaaacuuagaggaguugcuccccugcaucucggcaaaugcaacaucgccggguggauucugggaaauccugagugugaaucucugagcacagccuccucuuggagcuacaucguggagaccuccucuagcgacaacggcacgugcuauccgggggauuuuauugacuacgaagaacuccgggagcagcuguccagcgucucuuccuucgaacgcuuugagaucuuccccaagaccagcucuuggccuaaucacgauuccaacaagggagugacagccgcuuguccccaugccggcgcgaaaggcuuuuauaagaaucuuaucuggcugguuaaaaaggggaacagcuacccuaaacucucuaaguccuauagcaaugacaagggaaaagaagugcugguccuuuggggcauucaccaccccuccaccacagccgaucaacagucucuguaccagaacgcugacaccuacguguucguggggacgagcagauauuccaagaaauuuaagccugagaucgccauucggccgaaaguccgcgaucaggagggaagaaugaauuacuauuggacacucguugaacccggcgacaagaucaccuucgaggcuacagggaaccugguggugccucgguacgccuuugcgauggaacgcaacgccggaagcggcauuaucauuucugauacccccguccaugacugcaauaccacaugucaaacgccuaaaggcgcuaucaacaccucccugcccuuccagaauauccacccgauuacaaucgggaagugcccuaaguaugugaaaagcaccaagcucagacuggccacaggacuucggaacguucccucuauucagagccgcggccuguuuggggcuaucgccggauucauugagggcggguggaccggaaugguggacggcugguacggcuaucaucaccagaaugaacaaggguccggauacgccgcugaucucaaaucuacgcagaacgcgaucgacaagaucacaaauaaagucaacagcgugauugagaagaugaauacccaguuuaccgccguuggcaaggaguucaaccaccuggaaaagagaaucgagaaucuuaacaagaaaguggaugacggguuccuggauauuuggacauacaaugcugaacuccugguccugcucgagaacgaacggacccuggacuaucaugauuccaaugugaagaaccuuuacgagaaaguccgcaaccagcugaagaauaacgccaaggagaucggaaauggcuguuuugaguucuaucacaaaugcgacaacacauguauggagagcgugaagaaugggacguacgauuauccuaaauacucugaagaggccaagcucaacagagaagagauugacggcguuaaacuggaguccacccggaucuaucaaauccuugcuauuuacagcacaguggccucuucccugguccucgugguuagccugggagcgaucuccuuuuggaugugcucuaauggcagccugcagugccgcauuuguaucuga

SEQ ID NO: 201870 - RNA, 1701 nt, Artificial Sequence; identical to SEQ ID NO: 198939
  derived and/or modified CDS sequence (opt5) from hemagglutinin__InfluenzaA__AGB13340

SEQ ID NO: 201871 - RNA, 1701 nt, Artificial Sequence
  derived and/or modified CDS sequence (opt5) from hemagglutinin__InfluenzaA__AGB13350
augaaggccauccuggugguccuccuguacaccuucgcuacagccaacgcggacacgcuuugcauuggcuaucacgcuaauaacagcaccgagacaguugauaccgugcuggagaaaaaugugacagucacccauuccgugaaccuccuggaagacaagcacaaugggaaacuuuguaagcugagaggaguugcuccccuccaucugggcaaaugcaacaucgccggguggauucugggaaauccugaaugugagucucucagcacagccuccucuuggagcuacaucguggaaaccuccucuagcgauaacggcacgugcuauccgggggacuuuauuaauuacgaggagcugcgggaacagcuuuccagcgucucuuccuucgagcgcuuugaaaucuuccccaagaccagcucuuggccuaaccacgauuccaauaagggagugacagccgcuuguccccaagccggcgcgaaaucuuuuuauaagaaccugaucuggcucguuaaaaagggcaauagcuacccuaaacuguccaagagcuauauuaacgacaaggggaaagaggugcuuguccuguggggaauccaucaccccuccaccucugccgaucagcagagccucuaccagaaugcugacgccuacguguucgugggcacauccaaguauagcaaaaaguuuaaaccugagauugcugucagaccgaagguucgggaucaagaagggcgcaugaacuacuauuggacccugguggagcccggagacaaaaucacguucgaagccacaggcaaccugcucgugccuagauacgcguuugccauggagcggaaugcugggucuggaauuaucauuuccgauacccccguccacgacugcaacacaaccugucagaccccuaagggcgccaucaauacaagccugcccuuccagaacauccauccgauuacgaucggcaagugcccuaaauaugugaagucuaccaaacuucgccuggcuacagggcucagaaauguucccagcauucagucccggggacuguuuggcgccaucgccggguucauugaaggaggcuggaccgggaugguggauggaugguacggcuaucaccaucaaaacgcucagggcucuggguacgcggccgaccuuaagagcacacagaaugcuaucgacaaaaucaccaacaaggucaauuccgugauugagaagaugaacacgcaguuuacagccguuggaaaagaguucaaucaccuggaaaagcgcaucgagaaccucaauaaaaagguggaugacggcuuccuggauauuuggaccuacaacgccgaacugcucguccugcuugagaaugaaagaacccuggacuaucacgauagcaacgugaaaaaccucuacgagaagguccggucucaacugaagaauaacgcuaaagagaucgggaauggauguuuugaguucuaucauaagugcgacaacacauguauggaauccgugaaaaauggcaccuacgauuauccuaaguacagcgaagaggccaaacuuaaccgcgaagagauugacgggguuaagcuggagucuacaagaaucuaucagauccucgcgauuuacuccacgguggcuagcucccugguccuggugguuucucucggcgccaucagcuuuuggaugugcuccaauggaucucugcagugccggauuuguaucuga

SEQ ID NO: 201872 - RNA, 1701 nt, Artificial Sequence
  derived and/or modified CDS sequence (opt5) from hemagglutinin__InfluenzaA__AGB13360
augaaggccauccuggugguccuccuguacaccuucgcuacagccaacgcggacacgcuuugcauuggcuaucacgcuaauaacagcaccgauacaguugacaccgugcuggagaaaaaugugacagucacccauuccgugaaccuccuggaagauaagcacaaugggaaacuuuguaagcugagaggaguugcuccccuccaucugggcaaaugcaacaucgccggguggauucugggaaauccugagugugaaucucucagcacagccuccucuuggagcuacaucguggagaccuccucuagcgacaacggcacgugcuauccgggggauuuuauuaauuacgaagaacugcgggagcagcuuuccagcgucucuuccuucgaacgcuuugagaucuuccccaagaccagcucuuggccuaaccacgacuccaauaagggagugacagccgcuuguccccaugccggcgcgaaaucuuuuuauaagaaccugaucuggcucguuaaaaagggcaauagcuacccuaaacuguccaagagcuauauuaacgauaaggggaaagaagugcuuguccuguggggaauccaccaccccuccaccucugccgaccaacagagccucuaccagaaugcugaugccuacguguucgugggcacauccaaguauagcaaaaaguuuaaaccugagauugcugucagaccgaagguucgggaccaggaggggcgcaugaacuacuauuggacccugguggaacccggagauaaaaucacguucgaggccacaggcaaccugcucgugccuagauacgcguuugccauggaacggaaugcugggucuggaauuaucauuuccgacacccccguccaugauugcaacacaaccugucaaaccccuaagggcgccaucaauacaagccugcccuuccagaacauccacccgauuacgaucggcaagugcccuaaauaugugaagucuaccaaacuucgccuggcuacagggcucagaaauguucccagcauucagucccggggacuguuuggcgccaucgccggguucauugagggaggcuggaccgggaugguggacggaugguacggcuaucaucaccagaacgaacaaggcucuggguacgcugcggaccuuaagagcacacagaaugccaucgauaaaaucaccaacaaggucaauuccgugauugagaagaugaacacgcaguuuacagcuguuggaaaagaguucaaucaccuggaaaagcgcaucgagaaccucaauaaaaagguggacgauggcuuccuggacauuuggaccuacaacgccgaaaugcugguccuccuggagaaugaaaagacccuugauuaucaugacagcaacgugaagaaccuguacgagaaggucagaucucagcucaaaaauaacgccaaggagaucgggaauggauguuuugaguucuaucacaaaugcgauaacacauguauggaguccgugaagaauggcaccuacgacuauccuaaauacagcgaagaggcuaagcugaaccgggaagagauugaugggguuaaacuugagucuacacgcaucuaucaaauccuggccauuuacuccacgguggcgagcucccucguccuggugguuucucugggcgcuaucagcuuuuggaugugcuccaauggaucucuccagugcagaauuuguaucuga

SEQ ID NO: 201873 - RNA, 1701 nt, Artificial Sequence
  derived and/or modified CDS sequence (opt5) from hemagglutinin__InfluenzaA__AGB13380
augaaggccauccuggugguccuccuguacaccuucgcuacagccaaggcggacacgcuuugcauuggcuaucacgcuaacaauagcaccgauacaguugacaccgugcuggagaagaacgugacagucacccauuccgugaaucuccuggaagauaaacacaacgggaaacuuuguaagcugagaggaguugcgccccuccaucugggcaagugcaauaucgccggguggauucugggaaacccugagugugaaucucucagcacagcuuccucuuggagcuacaucguggagaccuccucuagcgacaauggcacgugcuauccgggggauuuuauuaacuacgaagaacugcgggagcagcuuuccagcgucucuuccuucgaacgcuuugagaucuuccccaagaccagcucuuggccuaaucacgacuccaacaaaggagugacagccgcuuguccccaugccggcgccaagagcuuuuauaaaaaucugaucuggcucguuaagaaaggcaacucuuacccuaagcuguccaagagcuauauuaaugauaaagggaaggaagugcuuguccuguggggaauccaccaccccuccaccacagccgaccaacagucucucuaccagaacgcugaugccuacguguucgugggcaccagcagauauuccaaaaaguuuaaaccugagauugcuauccggccgaagguccgcgaccaggaggggagaaugaauuacuauuggacgcugguugaacccggagauaaaauuacauucgaggccaccggcaaccugguggugccucgguacgcguuugccauggaacgcaaccccgggagcggaaucauuaucucugacacaccuguccaugauugcaauaccaccugucaaacacccaagggcgcuaucaacacgucccucccguuccagaauauucacccuaucaccauuggcaagugccccaaauauguuaagagcacaaaacugagacuugccaccgggcugcggaacgugccuucuauccagagccgcggacucuuuggcgcuauugccggguucaucgagggaggcuggacagggaugguggacggaugguacggcuaucaucaccagaaugaacaaggcuccggguacgccgcugaccugaagucuacccagaacgcgaucgauaaaauuacgaauaaggucaacagcgugaucgagaagaugaauacacaguuuaccgccguuggaaaagaguucaaccaccuugaaaagagaauugagaaucugaacaaaaagguggacgauggcuuccucgacaucuggaccuacaaugcugaacugcugguccuccuggagaacgaacggacacuugauuaucaugacuccaaugugaaaaaccuguacgagaagguccgcaaccagcucaagaauaacgccaaagagauugggaauggauguuuugaguucuaucacaagugcgauaacaccuguauggagagcgugaaaaauggcacauacgacuaucccaaguacucugaagaggccaaacugaacagagaagagaucgaugggguuaaacuugaguccacgcggaucuaucaaauucuggcuaucuacagcaccguggccucuucccucguccuggugguuagccugggcgcgauuuccuuuuggaugugcucuaauggaagccuccagugccgcaucuguauuuga

SEQ ID NO: 201874 - RNA, 1701 nt, Artificial Sequence; identical to SEQ ID NO: 198507
  derived and/or modified CDS sequence (opt5) from hemagglutinin__InfluenzaA__AGB13390

SEQ ID NO: 201875 - RNA, 1701 nt, Artificial Sequence; identical to SEQ ID NO: 199114
  derived and/or modified CDS sequence (opt5) from hemagglutinin__InfluenzaA__AGB13400

SEQ ID NO: 201876 - RNA, 1701 nt, Artificial Sequence; identical to SEQ ID NO: 198507
  derived and/or modified CDS sequence (opt5) from hemagglutinin__InfluenzaA__AGB13410

SEQ ID NO: 201877 - RNA, 1701 nt, Artificial Sequence; identical to SEQ ID NO: 198526
  derived and/or modified CDS sequence (opt5) from hemagglutinin__InfluenzaA__AGB13420

SEQ ID NO: 201878 - RNA, 1701 nt, Artificial Sequence
  derived and/or modified CDS sequence (opt5) from hemagglutinin__InfluenzaA__AGB13430
augaaggccauccuggugguccuccuguacaccuucgcuacagccaacgcggacacgcuuugcauuggcuaucacgcuaauaacagcaccgauacaguugacaccgugcuggagaaaaaugugacagucacccauuccgugaaccuccuggaagauaagcacaaugggaaacuuuguaagcugagaggaguugcuccccuccaucugggcaaaugcaacaucgccggguggauucugggaaauccugagugugaaucucucagcacagccuccucuuggagcuacaucguggagaccuccucuagcgacaacggcacgugcuauccgggggauuuuauugacuacgaagaacugcgggagcagcuuuccagcgucucuuccuucgaacgcuuugagauguuccccaagaccagcucuuggccuaaucacgauuccaacaagggagugacaaccgccuguccccaugcuggcgccaagagcuuuuauaagaaucugaucuggcucguuaaaaagggcaacucuuacccuaaacuguccaagagcuauaucaaugacaaggggaaagaagugcuuguccuguggggcauucaccaucccccuacauccgcggaucaacagucucucuaccagaacgccgacgcuuacguguucgugggaaccagcagauauuccaagaaauuuaagccggagaucgccauucggcccaaaguccgcgaucaggaggggagaaugaauuacuauuggacgcugguugaaccuggagacaagaucacauucgaggcuaccggcaaccugguggugccccgguacgccuuugcgauggaacgcaacgccgggagcggaauuaucauuucugauacaccuguccacgacugcaauaccaccugucaaacacccaaaggcgcuaucaacacgucccucccguuccagaauauccacccuauuaccaucggcaagugccccaaguaugugaaaagcacaaagcugagacuugccaccgggcugcggaacguuccuucuauucagagccgcggacucuuuggcgcuaucgccggguucauugagggaggcuggacagggaugguggacggaugguacggcuaucaucaccagaaugaacaaggcuccggguacgccgcugaucugaaaucuacccagaacgcgaucgacggaaucacgaauaaggucaacagcgugauugagaaaaugaauacacaguuuaccgccguuggcaaggaguucaaccaccuugaaaagagaaucgagaaucugaacaaaaagguggaugacggguuccucgauauuuggaccuacaaugcugaacugcugguccuccuggagaacgaacggacacuugacuaucaugauuccaaugugaaaaaccuguacgagaagguccgcagccagcucaaaaacaaugccaaggagaucggaaacggcuguuuugaguucuaucacaagugcgacaauaccuguauggagucugugaaaaacgggacauacgauuaucccaaguacuccgaagaggccaaacugaauagagaagagauugacggcguuaaacuugagagcacgaugaucuaucaaauccuggcuauuuacucuaccguggccuccagccucguccuggugguuucccugggagcgaucucuuuuuggaugugcagcaacggcucccuccagugccggauuuguaucuga

SEQ ID NO: 201879 - RNA, 1701 nt, Artificial Sequence; identical to SEQ ID NO: 199114
  derived and/or modified CDS sequence (opt5) from hemagglutinin__InfluenzaA__AGB13440

SEQ ID NO: 201880 - RNA, 1701 nt, Artificial Sequence; identical to SEQ ID NO: 198526
  derived and/or modified CDS sequence (opt5) from hemagglutinin__InfluenzaA__AGB13450

SEQ ID NO: 201881 - RNA, 1701 nt, Artificial Sequence; identical to SEQ ID NO: 198507
  derived and/or modified CDS sequence (opt5) from hemagglutinin__InfluenzaA__AGB13460

SEQ ID NO: 201882 - RNA, 1701 nt, Artificial Sequence; identical to SEQ ID NO: 198939
  derived and/or modified CDS sequence (opt5) from hemagglutinin__InfluenzaA__AGB13470

SEQ ID NO: 201883 - RNA, 1701 nt, Artificial Sequence; identical to SEQ ID NO: 198526
  derived and/or modified CDS sequence (opt5) from hemagglutinin__InfluenzaA__AGB13480

SEQ ID NO: 201884 - RNA, 1701 nt, Artificial Sequence; identical to SEQ ID NO: 198939
  derived and/or modified CDS sequence (opt5) from hemagglutinin__InfluenzaA__AGB13490

SEQ ID NO: 201885 - RNA, 1701 nt, Artificial Sequence
  derived and/or modified CDS sequence (opt5) from hemagglutinin__InfluenzaA__AGB13500
augaaggccauccuggugguccuccuguacaccuucgcuacagccaacgcggacacgcuuugcauuggcuaucacgcuaauaacagcaccgauacaguugacaccgugcuggagaaaaaugugacagucacccauuccgugaaccuccuggaagauaagcacaaugggaaacuuuguaagcugagaggaguugcuccccuccaucugggcaaaugcaacaucgccggguggauucugggaaauccugagugugaaucucucagcacagccuccucuuggagcuacaucguggagaccuccucuagcgacaacggcacgugcuauccggggaauuuuauugauuacgaagaacugcgggagcagcuuuccagcgucucuuccuucgaacgcuuugagaucuuccccaagaccagcucuuggccugaccacgauuccaacaagggagugacagccgcuuguccccaugccggcgcgaaaggcuuuuauaagaaucugaucuggcucguuaaaaaggggaacagcuacccuaaacugucuaaguccuauauuaaugacaagggaaaagaagugcuuguccuguggggcauccaccaccccagcaccuccgccgaucaacagucucucuaccagaacgcugacgccuacguguucguggggacaagcagauauuccaagaaauuuaagccugagauugcuauccggccgaaaguccgcgaucaggagggaagaaugaauuacuauuggacccugguugaacccggcgacaagauuacguucgaggccacagggaaccugguggcgccucgguacgccuuugcuauggaacgcaacgccggaagcggcaucauuaucucugauacccccgugcaugacugcaauacaaccugucaaaccccuaaaggcgcuaucaacacaucccuccccuuccagaauauucacccgaucacgauugggaagugcccuaaguaugucaaaagcaccaagcugagacuugccacaggacugcggaacgugcccucuauccagagccgcggccucuuuggggccauugcuggauucaucgagggcggguggaccggaaugguugacggcugguacggcuaucaucaccagaaugaacaaggguccggauacgcggccgaucugaaaucuacacagaacgcuaucgacaagauuaccaauaaagugaacagcgucaucgagaagaugaauacgcaguuuacagccgugggcaaggaguucaaccaccuugagaaaagaauugagaaucugaacaagaaaguugaugacggguuccucgauaucuggaccuacaaugccgaacugcuggugcuccuggagaacgaacggacccuugacuaucaugauuccaaugucaagaaccuguacgagaaagugcgcagccagcucaagaacaaugcuaaggagauuggaaacggcuguuuugaguucuaucacaaaugcgacaauacauguauggaaucugucaagaacgggaccuacgauuauccuaaauacuccgaagaggccaagcugaauagagaagagaucgacggcgugaaacuugagagcacacggaucuaucaaauucuggcgaucuacucuacgguugcuuccagccucgugcuggucgugucccugggagccauuucuuuuuggaugugcagcaacggcucccuccagugccgcaucuguauuuga

SEQ ID NO: 201886 - RNA, 1701 nt, Artificial Sequence; identical to SEQ ID NO: 199144
  derived and/or modified CDS sequence (opt5) from hemagglutinin__InfluenzaA__AGB13520

SEQ ID NO: 201887 - RNA, 1701 nt, Artificial Sequence
  derived and/or modified CDS sequence (opt5) from hemagglutinin__InfluenzaA__AGB13530
augaaggccauccuggugguccuccuguacaccuucgcuacagccaacgcggacacgcuuugcauuggcuaucacgcuaauaacagcaccgauacaguugacaccgugcuggagaaaaaugugacagucacccauuccgugaaccuccuggaagauaagcacaaugggaaacuuuguaagcugagaggaguugcuccccuccaucugggcaaaugcaacaucgccggguggauucugggaaauccugagugugaaucucucagcacagccuccucuuggagcuacaucguggagaccuccucuagcgacaacggcacgugcuauccgggggauuuuauugacuacgaagaacugcgggagcagcuuuccagcgucucuuccuucgaacgcuuugagaucuuccccaagaccagcucuuggccuaaucacgauuccaacaagggagugacagccgcuuguccccaugccggcgcgaaaucuuuuuauaagaaucugaucuggcucguuaaaaagggcaacagcuacccuaaacugaauaaguccuauauuaacgacaaggggaaagaagugcuuguccuguggggaauccaccaccccagcaccacagccgaucaacagucccucuaccagaaugcugacgccuacguguucgugggcaccucuagauauagcaagaaauuuaagccugagauugcuauccggccgaaaguccgcgaucaggaggggagaaugaacuacuauuggacgcugguugaacccggagacaagauuacauucgaggccaccggcaaccugguggugccucgguacgcguuugccauggaacgcaaugcuggguccggaaucauuaucagcgauacacccguccaugacugcaacaccaccugucaaacaccuaaaggcgccaucaauacgucucuccccuuccagaacauucacccgaucaccauuggcaagugcccuaaguaugugaaauccacaaagcugagacuugcuaccgggcugcggaauguucccagcauccagucucgcggacucuuuggcgccauugccggguucaucgagggaggcuggacagggaugguggacggaugguacggcuaucaucaccagaacgaacaaggcagcggguacgcugcggaucugaaauccacccagaaugccaucgacaagauuacgaacaaagucaauucugugaucgagaagaugaacacacaguuuaccgcuguuggaaaggaguucaaucaccuugagaaaagaauugagaaccugaauaagaaaguggaugacggcuuccucgauaucuggaccuacaacgccgaacugcugguccuccuggagaaugaacggacacuugacuaucaugauagcaacgugaagaaccuguacgagaaaguccgcaaucagcucaagaacaaugccaaggagauugggaacggauguuuugaguucuaucacaaaugcgacaauaccuguauggaauccgugaagaacggcacauacgauuauccuaaauacagcgaagaggcuaagcugaauagagaagagaucaacgggguuaaacuugagucuacgcggaucuaucaaauucuggccaucuacuccaccguggcgagcucucucguccuggugguuucccugggcgcuauuagcuuuuggaugugcuccaauggaucucuccagugccgcaucuguauuuga

SEQ ID NO: 201888 - RNA, 1701 nt, Artificial Sequence; identical to SEQ ID NO: 199158
  derived and/or modified CDS sequence (opt5) from hemagglutinin__InfluenzaA__AGB13540

SEQ ID NO: 201889 - RNA, 1701 nt, Artificial Sequence; identical to SEQ ID NO: 199122
  derived and/or modified CDS sequence (opt5) from hemagglutinin__InfluenzaA__AGB13550

SEQ ID NO: 201890 - RNA, 1701 nt, Artificial Sequence; identical to SEQ ID NO: 199122
  derived and/or modified CDS sequence (opt5) from hemagglutinin__InfluenzaA__AGB13560

SEQ ID NO: 201891 - RNA, 1701 nt, Artificial Sequence; identical to SEQ ID NO: 198939
  derived and/or modified CDS sequence (opt5) from hemagglutinin__InfluenzaA__AGB13570

SEQ ID NO: 201892 - RNA, 1701 nt, Artificial Sequence
  derived and/or modified CDS sequence (opt5) from hemagglutinin__InfluenzaA__AGB13580
augaaggccauccuggugguccuccuguacaccuucgcuacagccaacgcggacacgcuuugcauuggcuaucacgcuaauaacagcaccgauacaguugacaccgugcuggagaaaaaugugacagucacccauuccgugaaccuccuggaagauaagcacaaugggaaacuuuguaagcugagaggaguugcuccccuccaucugggcaaaugcaacaucgccggguggauucugggaaauccugagugugaaucucucagcacagccuccucuuggagcuacaucguggagaccuccucuagcgacaacggcacgugcuauccgggggauuuuauuaauuacgaagaacugcgggagcagcuuuccagcgucucuuccuucgaacgcuuugagaucuuccccaagaccagcucuuggccuaaccacgacuccaauaagggagugacagccgcuuguccccaugccggcgcgaaaucuuuuuauaagaaccugaucuggcucguuaaaaagggcaauagcuacccuaaacuguccaagagcuauauuaacgauaaggggaaagaagugcuuguccuguggggaauccaccaccccuccaccacagccgaccaacagucucucuaccagaaugcugaugccuacguguucgugggcaccagcagauauuccaagaaauuuaagccugagauugcuauccggccgaaaguccgcgaccaggaggggagaaugaacuacuauuggacgcugguugaacccggagauaagauuacauucgaggccaccggcaaccugguggugccucgguacgcguuugccauggaacgcaaugcugggagcggaaucauuaucucugacacacccguccaugauugcaacaccaccugucaaacaccuaaaggcgccaucaauacgucccuccccuuccagaacauucacccgaucaccauuggcaagugcccuaaguaugugaaaagcacaaagcugagacuugcuaccgggcugcggaauguucccucuauccagagccgcggacucuuuggcgccauugccggguucaucgagggaggcuggacagggaugguggacggaugguacggcuaucaucaccagaacgaacaaggcuccggguacgcugcggaccugaaaucuacccagaaugccaucgauaagauuacgaacaaagucaauagcgugaucgagaagaugaacacacaguuuaccgcuguuggaaaggaguucaaucaccuugagaaaagaauugagaaccugaauaagaaaguggacgauggcuuccucgacaucuggaccuacaacgccgaacugcugguccuccuggagaaugaacggacacuugauuaucaugacuccaacgugaagaaccuguacgagaaaguccgcaaucagcucaagaacaaugccaaggagauugggaacggauguuuugaguucuaucacaaaugcaauaacaccuguauggaaagcgugaagaauggcacauacgauuauccuaaauacucugaagaggcuaagcugaacagagaagagaucgacgggguuaaacuugaguccacgcggaucuaucaaauucuggccaucuacagcaccguggcgucuucccucguccuggugguuagccugggcgcuauuuccuuuuggaugugcucuaauggaagccuccagugccgcaucuguauuuga

SEQ ID NO: 201893 - RNA, 1701 nt, Artificial Sequence
  derived and/or modified CDS sequence (opt5) from hemagglutinin__InfluenzaA__AGB13590
augaaggccauccuggugguccuccuguacaccuucgcuacagccaacgcggacacgcuuugcauuggcuaucacgcuaauaacagcaccgauacaguugacaccgugcuggagaagaaugugacagucacccauuccgugaaccuccuggaagauaagcacaaugggaaacuuuguaagcugagaggaguugcuccccuccaucugggcaaaugcaacaucgccggguggauucugggaaauccugagugugaaucucucagcacagccuccucuuggagcuacaucguggagaccuccucuagcgacaacggcacgugcuauccgggggauuuuauuaauuacgaagaacugcgggagcagcuuuccagcgucucuuccuucgaacgcuuugagaucuuccccaagaccagcucuuggccuaaccacgacuccaauaagggagugacagccgcuuguccccaugccggcgcgaaaucuuuuuauaagaaccugaucuggcucguuaaaaagggcaauagcuacccuaaacugucccaaagcuauauuaacgauaaggggaaggaagugcuuguccuguggggaauccaccaccccuccaccacagccgaccagcagucucucuaccagaaugcugaugccuacguguucgugggcaccagcagauauuccaaaaaguuuaaaccugagauugcuauccggccgaagguccgcgaccaagaggggagaaugaacuacuauuggacgcugguugaacccggagauaaaauuacauucgaggccaccggcaaccugguggugccucgguacgcguuugccauggaacgcaaugcugggagcggaaucauuaucucugacacacccguccaugauugcaacaccaccugucagacaccuaagggcgccaucaauacgucccuccccuuccagaacauucacccgaucaccauuggcaaaugcccuaaguauguuaagagcacaaaacugagacuugcuaccgggcugcggaaugugcccucuauccagagccgcggacucuuuggcgccauugccggguucaucgagggaggcuggacagggaugguggacggaugguacggcuaucaucaccaaaacgaacagggcuccggguacgcugcggaccugaagucuacccagaaugccaucgauaaaauuacgaacaaggucaauagcgugaucgagaaaaugaacacacaguuuaccgcuguuggaaaggaguucaaucaccuugaaaagagaauugagaaccugaauaaaaagguggacgauggcuuccucgacaucuggaccuacaacgccgaacugcugguccuccuggagaaugaacggacacuugauuaucaugacuccaacgugaaaaaccuguacgagaagguccgcaaucaacucaaaaacaaugccaaggagauugggaacggauguuuugaguucuaucacaagugcgauaauaccuguauggagagcgugaaaaacggcacauacgacuauccuaaguacucugaagaggcuaaacugaauagagaagagaucgaugggguuaaacuugaguccacgcggaucuaucagauucuggccaucuacagcaccguggcgucuucccucguccuggugguuagccugggcgcuauuuccuuuuggaugugcucuaacggaagccuccagugccgcaucuguauuuga

SEQ ID NO: 201894 - RNA, 1701 nt, Artificial Sequence
  derived and/or modified CDS sequence (opt5) from hemagglutinin__InfluenzaA__AGB13600
augaaggccauccuggugguccuccuguacaccuucgcuacagccaacgcggacacgcuuugcauuggcuaucacgcuaauaacagcaccgauacaguugacaccgugcuggagaaaaaugugacagucacccauuccgugaaccuccuggaagauaagcacaaugggaaacuuuguaagcugagaggaguugcuccccuccaucugggcaaaugcaacaucgccggguggauucugggaaauccugagugugaaucucucagcacagccuccucuuggagcuacaucguggagaccuccucuagcgacaacggcacgugcuauccgggggauuuuauuaauuacgaagaacugcgggagcagcuuuccagcgucucuuccuucgaacgcuuugagaucuuccccaagaccagcucuuggccuaaccacgacuccaauaagggagugacagccgcuuguccccaugccggcgcgaaaucuuuuuauaagaaccugaucuggcucguuaaaaagggcaauagcuacccuaaacugaacaaguccuauauuaaugauaaggggaaagaagugcuuguccuguggggaauccaccaccccagcaccacagccgaccaacagucccucuaccagaacgcugaugccuacguguucgugggcaccucuagauauagcaagaaauuuaagccugagauugcuauccggccgaaaguccgcgaccaggaggggagaaugaacuacuauuggacgcugguugaacccggagauaagauuacauucgaggccaccggcaaucugguggugccucgguacgcguuugccauggaacgcaacgcuggguccggaaucauuaucagcgacacacccguccaugauugcaauaccaccugucaaacaccuaaaggcgccaucaacacgucucuccccuuccagaauauucacccgaucaccauuggcaagugcccuaaguaugugaaauccacaaagcugagacuugcuaccgggcugcggaacguucccagcauccagucucgcggacucuuuggcgccauugccggguucaucgagggaggcuggacagggaugguggacggaugguacggcuaucaucaccagaaugaacaaggcagcggguacgcugcggaccugaaauccacccagaacgccaucgauaagauuacgaauaaagucaacucugugaucgagaagaugaauacacaguuuaccgcuguuggaaaggaguucaaccaccuugagaaaagaauugagaaucugaacaagaaaguggacgauggcuuccucgacaucuggaccuacaaugccgaacugcugguccuccuggagaacgaacggacacuugauuaucaugacagcaacgugaagaaucuguacgagaaaguccgcaaccagcucaagaauaacgccaaggagauugggaauggauguuuugaguucuaucacaaaugcgauaacaccuguauggaauccgugaagaauggcacauacgacuauccuaaauacagcgaagaggcuaagcugaacagagaagagaucgaugggguuaaacuugagucuacgcggaucuaucaaauucuggccaucuacuccaccguggcgagcucucucguccuggugguuucccugggcgcuauuagcuuuuggaugugcuccaauggaucucuccagugccgcaucuguauuuga

SEQ ID NO: 201895 - RNA, 1701 nt, Artificial Sequence; identical to SEQ ID NO: 198939
  derived and/or modified CDS sequence (opt5) from hemagglutinin__InfluenzaA__AGB13610

SEQ ID NO: 201896 - RNA, 1701 nt, Artificial Sequence; identical to SEQ ID NO: 199158
  derived and/or modified CDS sequence (opt5) from hemagglutinin__InfluenzaA__AGB13620

SEQ ID NO: 201897 - RNA, 1701 nt, Artificial Sequence; identical to SEQ ID NO: 198526
  derived and/or modified CDS sequence (opt5) from hemagglutinin__InfluenzaA__AGB13630

SEQ ID NO: 201898 - RNA, 1701 nt, Artificial Sequence
  derived and/or modified CDS sequence (opt5) from hemagglutinin__InfluenzaA__AGB13640
augaaggccauccuggugguccuccuguacaccuucgcuacagccaacgcggacacgcuuugcauuggcuaucacgcuaauaacagcaccgauacaguugacaccgugcuggagaaaaaugugacagucacccauuccgugaaccuccuggaagauaagcacaaugggaaacuuuguaagcugagaggaguugcuccccuccaucugggcaaaugcaacaucgccggguggauucugggaaauccugagugugaaucucucagcacagccuccucuuggagcuacaucguggagaccuccucuagcgacaacggcacgugcuauccgggggauuuuauugacuacgaagaacugcgggagcagcuuuccagcgucucuuccuucgaacgcuuugagaucuuccccaagaccagcucuuggccuaaucacgauuccaacaagggagugacaaccgccuguccccaugcuggcgccaagagcuuuuauaagaaucugaucuggcucguuaaaaagggcaacucuuacccuaaacuguccaagagcuauauuaaugacaaggggaaagaagugcuuguccuguggggaauccaccaucccccuacauccgcggaucaacagucucucuaccagaacgccgacgcuuacguguucgugggcaccagcagauauuccaagaaauuuaagccggagauugccauccggcccaaaguccgcgaucaggaggggagaaugaauuacuauuggacgcugguugaaccuggagacaagauuacauucgaggcuaccggcaaccugguggugccccgguacgccuuugcgauggaacgcaacgccgggagcggaaucauuaucucugauacaccuguccacgacugcaauaccaccugucaaacacccaaaggcgcuaucaacacgucccucccguuccagaauauucacccuaucaccauuggcaagugccccaaguaugugaaaagcacaaagcugagacuugccaccgggcugcggaacguuccuucuauccagagccgcggacucuuuggcgcuauugccggguucaucgagggaggcuggacagggaugguggacggaugguacggcuaucaucaccagaaugaacaaggcuccggguacgccgcugaucugaaaucuacccagaacgcgaucgacggaauuacgaauaaggucaacagcgugaucgagaaaaugaauacacaguuuaccgccguuggcaaggaguucaaccaccuugaaaagagaauugagaaucugaacaaaaagguggaugacggguuccucgauaucuggaccuacaaugcugaacugcugguccuccuggagaacgaacggacacuugacuaucaugauuccaaugugaaaaaccuguacgagaagguccgcagccagcucaaaaacaaugccaaggagauuggaaacggcuguuuugaguucuaucacaagugcgacaauaccuguauggagucugugaaaaacgggacauacgauuaucccaaguacuccgaagaggccaaacugaauagagaagagaucgacggcguuaaacuugagagcacgaugaucuaucaaauucuggcuaucuacucuaccguggccuccagccucguccugauugugucccugggagcgaucucuuuuuggaugugcagcaacggcucccuccagugccggauuuguaucuga

SEQ ID NO: 201899 - RNA, 1701 nt, Artificial Sequence
  derived and/or modified CDS sequence (opt5) from hemagglutinin__InfluenzaA__AGB13650
augaaggccauccuggugguccuccuguacaccuucgcuacagccaacgcggacacgcuuugcauuggcuaucacgcuaauaacagcaccgauacaguugacaccgugcuggagaaaaaugugacagucacccauuccgugaaccuccuggaagauaagcacaaugggaaacuuuguaagcugagaggaguugcuccccuccaucugggcaaaugcaacaucgccggguggauucugggaaauccugagugugaaucucucagcacagccuccucuuggagcuacaucguggagaccuccucuagcgacaacggcacgugcuauccgggggauuuuauugacuacgaagaacugcgggagcagcuuuccagcgucucuuccuucgaacgcuuugagaucuuccccaagaccagcucuuggccuaaucacgauuccaacaagggagugacaaccgccuguccccaugcuggcgccaagagcuuuuauaagaaucugaucuggcucguuaaaaagggcaacucuuacccuaaacuguccaagagcuauauuaaugacaaggggaaagaagugcuuguccuguggggaauccaccaucccccuacauccgcggaucaacagucucucuaccagaacgccgacgcuuacguguucgugggcaccagcagauauuccaagaaauuuaagccggagauugccauccggcccaaaguccgcgaucaggaggggagaaugaauuacuauuggacgcugguugaaccuggagacaagauuacauucgaggcuaccggcaaccugguggugccccgguacgccuuugcgauggaacgcaacgccgggagcggaaucauuaucucugauacaccuguccacgacugcaauaccaccugucaaacacccaaaggcgcuaucaacacgucccucccguuccagaauauucacccuaucaccauuggcaagugccccaaguaugugaaaagcacaaagcugagacuugccaccgggcugcggaacguuccuucuauccagagccgcggacucuuuggcgcuauugccggguucaucgagggaggcuggacagggaugguggacggaugguacggcuaucaucaccagaaugaacaaggcuccggguacgccgcugaucugaaaucuacccagaacgcgaucgacggaauuacgaauaaggucaacagcgugaucgagaaaaugaauacacaguuuaccgccguuggcaaggaguucaaccaccuugaaaagagaauugagaaucugaacaaaaagguggaugacggguuccucgauaucuggaccuacaaugcugaacugcugauucuccuggagaacgaacggacacuugacuaucaugauuccaaugucaaaaaccuguacgagaaggugcgcagccagcucaaaaacaaugccaaggagaucggaaacggcuguuuugaguucuaucacaagugcgacaauaccuguauggagucugucaaaaacgggacauacgauuaucccaaguacuccgaagaggccaaacugaauagagaagagaucgacggcgugaaacuugagagcacgaugauuuaucaaauccuggcuauuuacucuaccguugccuccagccucgugcugaucgucucccugggagcgauuucuuuuuggaugugcagcaacggcucccuccagugccggaucuguauuuga

SEQ ID NO: 201900 - RNA, 1701 nt, Artificial Sequence; identical to SEQ ID NO: 198896
  derived and/or modified CDS sequence (opt5) from hemagglutinin__InfluenzaA__AGB13660

SEQ ID NO: 201901 - RNA, 1701 nt, Artificial Sequence; identical to SEQ ID NO: 198507
  derived and/or modified CDS sequence (opt5) from hemagglutinin__InfluenzaA__AGB13721

SEQ ID NO: 201902 - RNA, 1701 nt, Artificial Sequence; identical to SEQ ID NO: 198939
  derived and/or modified CDS sequence (opt5) from hemagglutinin__InfluenzaA__AGB13731

SEQ ID NO: 201903 - RNA, 1701 nt, Artificial Sequence
  derived and/or modified CDS sequence (opt5) from hemagglutinin__InfluenzaA__AGB51356
augaaggccauccugcucgugcugcuuugcaccuucgcugccacaaacgcggacacgcuguguauuggcuaccacgcuaauaacagcaccgauacagucgacaccguucucgagaaaaaugugacagugacccauuccgucaaccugcuugaagauagacacaaugggaagcugugcaaacucggaggcaucgcuccccugcaucuggggaaguguaacauugccggauggcuccugggcaauccugagugcgaacuucugcucacagugucuagcugguccuauaucguugagaccucuaacagcgacaaugggacguguuacccgggagauuuuauuaacuaugaagaacugcgggagcagcuuuccucugugagcuccuucgaacgcuuugagaucuuccccaaaaccagcucuuggccuaaucacgaaacaaacagaggcgucaccgccgccugccccuacgcuggcgccaauuccuuuuaucggaaccugaucuggcucguggagaaggggaauagcuacccuaagcugucuaaauccuauguuaacaacaagggaaaagaggugcugguccucuggggcauucaucaucccccuacaagcaccgaccaacagucucuguaccagaaugcggaugccuacguguucgugggguccagcaaguauaaccgcaaauuuaagccggaaaucgcugccagacccaagguccggggacaggcuggccgcaugaauuacuauuggacgcuuauugagccuggggacacaaucaccuucgaagccacaggaaaccugguugugcccagauacgcguuugccaugaaucggggcuccggcucugggauuaucauuagcgaugcuccugugcacgacuguaacaccaaaugccaaacccccaagggagccaucaauacaucccucccguuccagaacauccacccugucacgauuggcgagugucccaaauauguuaagagcaccaaacugcgcauggcuacagggcuuagaaauaucccuucuauucagucccggggacuguuuggcgccaucgccggguucauugaaggaggcuggaccggcaugaucgaugggugguacggauaucaccaucagaacgagcaaggcagcggguacgcugcggaccagcgcucuacacagaaugccaucgauggaauuaccaacaaggugaauagcgugaucgagaaaaugaacacgcaguuuacagcugucggcaaggaguucaaucaccucgagaagagaauugaaaaccugaacaaaaagguggacgacggguuccuggauaucuggaccuacaaugccgagcuccugguucuucuggaaaacgagcggacccucgacuuucacgauuccaaugugaaaaaccuguaugagaagguccgcucucaacuuagaaauaacgccaaagaaauuggcaauggaugcuucgaguuuuaccauaagugugacgauacaugcauggaaagcgugaagaacggcaccuaugacuaccccaaauauuccgaggaaagcaagcugaaucgggaggagaucgauggggucaaacucgaaucuacaagaaucuaccagauucuggcuaucuauuccacgguggccagcucucugguucuccuggugucccuuggagcgauuagcuucuggaugugcuccaacggcucucugcagugucgcaucugcauuuga

SEQ ID NO: 201904 - RNA, 1701 nt, Artificial Sequence
  derived and/or modified CDS sequence (opt5) from hemagglutinin__InfluenzaA__AGB97269
augaaggccauccuggugguccuccuguacaccuucgcuacagccaacgcggacacgcuuugcauuggcuaucacgcuaauaacagcaccgauacaguugacaccgugcuggagaaaaauaucacagugacccauuccgucaaccuccuggaagauaagcacaaugggaaacuuuguaagcugagaggaguggcuccccuccaucugggcaaaugcaacauugccggguggauccugggaaauccugagugugaaacacucucuaccgccagcuccuggucuuacauuguugagacgagcuccucugacaacgggaccugcuauccgggcgauuuuaucgacuacgaagaacugcgggagcagcuuagcuccgugagcucuuucgaacgcuuugagaucuuccccaagacauccagcuggccuaaucacgauucuaacaagggagucaccgccgcuuguccccaugccggcgcgaaaggcuuuuauaagaaucugauuuggcucgugaaaaaggggaacuccuacccuaaacugagcaagucuuauaucaaugacaagggaaaagaaguucuugugcuguggggcauucaccaccccuccacaaccgccgaucaacagagccucuaccagaacgcugacacguacgucuucguggggacauccagauauucuaagaaauuuaagccugagaucgccauucggccgaaagugcgcgaucaggagggaagaaugaauuacuauuggacccuggucgaacccggcgacaagaucacauucgaggcuaccgggaaccugguugugccucgguacgccuuugcgauggaacgcgaugccggaagcggcauuaucaucuccgacacccccgugcaugacugcaacacaacgugucaaaccccuaaaggcgcuauuaauacaagccuccccuuccagaacauccacccgauuaccaucgggaagugcccuaaguaugucaaaucuacaaagcugagacuugccaccggacugcggaaugugcccuccauucagagccgcggccucuuuggggcuaucgccggauucaucgagggcggguggacgggaaugguugauggcugguacggcuaucaucaccagaacgaacaagggucuggauacgccgcugaccugaaaagcacacagaaugcgauugauaagaucaccaacaaagucaauuccgugauugagaagaugaacacccaguuuacagccgugggcaaggaguucaaucaccuugagaaaagaaucgagaaccugaauaagaaaguugacgauggguuccucgacauuuggaccuacaacgcugaacugcuggugcuccuggagaaugaacggacacuugauuaucaugacucuaacgucaagaaucuguacgagaaagugcgcaaccagcucaagaacaaugccaaggagaucggaaacggcuguuuugaguucuaucacaaaugcgauaauacguguauggaaagcgucaagaacgggaccuacgacuauccuaaauacuccgaagaggccaagcugaauagagaagagaucgauggcgugaaacuugagagcacacggauuuaucaaauccuggcuauuuacucuaccgccgcguccagccucguucugguggucucucugggagcuaucuccuuuuggaugugcagcaacggcucccuccagugccgcauuuguaucuga

SEQ ID NO: 201905 - RNA, 1701 nt, Artificial Sequence; identical to SEQ ID NO: 200258
  derived and/or modified CDS sequence (opt5) from hemagglutinin__InfluenzaA__AGB97273

SEQ ID NO: 201906 - RNA, 1701 nt, Artificial Sequence
  derived and/or modified CDS sequence (opt5) from hemagglutinin__InfluenzaA__AGB97288
augaagaccaucauugcccugggcuacauccucugccugguguucgcucagaaacuucccgggaacgacaauagcacagccacgcugugucucggacaccaugcggucccuaacggcaccauuguuaagacaaucaccaaugauagaauugaggugacaaacgcuaccgaacuggugcaaaauuccucuaucggggagaucugcgacagcccgcaccagauucuugaugggaaaaacuguacacugaucgacgcccuccugggcgauccccagugcgacggguuucagaauaagaaaugggaucuguucauugaacgguccaaggccuauucuaacuguuacccuuaugacguccccgauuacgcuagccuccgcucccugguggccucuagcggaacccuugaguuuaauaacgaauccuucaauuggacgggcguuacccaaaacggcacaagcucugcuugcaucagacgguccaauagcuccuuuuucucucgccugaacuggcucacccaucugaauuuuaaguauccugcccuuaacgugacaaugcccaacaaugagcaguucgacaaacuguacauuuggggaguccaccauccuggaaccgauaaggaccagaucuuucucuaugcgaaaagcucuggcagaauuacgguguccacaaagcggagccagcaagccguuaucccgaacaucgggucccgcccccggauuagaaauaucccuucucgcauuagcaucuacuggaccauugugaaacccggagauauccugcugaucaacuccacaggcaaucucauugcuccuagaggguacuucaagauccggagcggaaagucuuccauuaugcgcagcgacgcccccaucggcaaauguaagucugagugcauuaccccgaacggcagcaucccuaaugacaaacccuuucagaacgucaauagaaucaccuauggggcuuguccucgguacgugaagcaguccacacugaaacuugccacgggaaugcgcaacgugcccgaaaagcagaccagaggcauuuucggggcgaucgccggauuuauugagaauggcugggaagggauggucgauggaugguauggcuuccggcaccaaaacucugagggcagagggcaggcugccgaccugaaaagcacacaggcugccaucgaucaaauuaauggaaagcucaaccgccugaucggcaagaccaaugagaaauuccaccagauugaaaaggaguuuuccgaaguugaggggcggauccaggaccuugaaaaauacguggaggauacaaagaucgaccuguggagcuauaacgccgagcuccugguggcucuggaaaaccagcauaccauugaucucacggacucugagaugaauaaacuguucgaaaagacaaagaaacaacuuagagagaacgcggaagauaugggaaauggcugcuuuaagaucuaccacaaaugugacaacgccugcauuggguccauccgcaauggcaccuaugaucauaacgucuaccgggacgaggcucugaauaacagauuccagauuaagggaguggagcucaaaagcggcuacaaggacuggauccuguggaucucuuuugccauuuccugcuuccuucuguguguugcccuccugggguuuaucaugugggcuugccagaagggaaauauucgcuguaacaucugcauuuga

SEQ ID NO: 201907 - RNA, 1701 nt, Artificial Sequence
  derived and/or modified CDS sequence (opt5) from hemagglutinin__InfluenzaA__AGB97292
augaagaccaucauugcccugagcuacauccucugccugguguucgcucaggagcuucccggcaacgacgauuccacagccacgcugugucucgggcaccaugcggucccuaauggaaccauuguuaaaacaaucaccaacgaccaaauugaagugacaaaugcuaccgagcuggugcagucuagcuccacaggcgaaaucugcaacucuccgcaccagauccuugauggggagaauuguacccugauugacgcccuccugggagauccccagugcgacggcuuucaaaacaagaaaugggaucuguucgucgaaagaagcaaggcccauuccaauuguuauccuuacgacgugcccgauuaugcuucucuccggagccugguugccuccagcgggacgcuugaguuuaacaaugagucuuucaacuggaccggagugacacagaauggcaccuccagcgcuugcauccgcagaucuaacaauuccuuuuucagccggcugaacuggcucacacaccugaauuuuaaauacccugcccuuaacgucaccaugcccaacaaugaacaguucgacaagcuguauauuuggggcgugcaucacccugggacggauaaggaccagaucuuucucuacgcgcaagccucuggacgcauuacaguuuccaccaaaagaagccagcaggcugugaucccgaacauuggcucccggccccgcgucagaaauaucccuucucgggugagcaucuauuggacaauugugaagcccggggauauccugcugauuaacuccaccggaaaucucaucgccccucgcggcuacuucaaaauuagaagcgggaagucuuccaucaugcggagcgacgcucccaucggaaaauguaacucugccugcauuaccccgaauggcagcaucccuaacgacaagcccuuucagaaugucaaccgcauuacauacggcgcguguccuagauauguuaagcaaaauacgcugaaacuugccaccgggaugcggaacgugcccgagaagcagacacgcggaaucuucggcgcuauugccggguuuaucgaaaauggaugggagggcaugguggaugggugguacggauucagacaccagaacuccgagggccggggccaagcugccgaccugaaaucuacccaggccgcuaucgaucagauuaaugggaagcucaacagacugaucggaaaaacaaacgaaaaguuccaucagauugagaaagaauuuagcgaggucgaaggccgcauccaagaccuugagaaguauguggaggauaccaagauugaccugugguccuacaaugcggaacuccugguugcccuggagaaccagcacacgaucgaucucacagacagcgaaaugaauaaacuguucgagaagaccaaaaagcagcuucgggaaaacgcugaggauauggggaauggaugcuuuaaaauuuaucauaagugugacaacgccugcaucggcucuaucagaaaugggaccuacgaucacgacguguaucgcgacgaggcccugaacaaucgguuccagauuaagggcgucgaacucaaauccggauacaaggauuggauccuguggauuagcuuugcuaucucuugcuuccuucuguguguggcccuccugggcuuuauuaugugggcgugccaaaaagggaacaucagauguaauaucugcauuuga

SEQ ID NO: 201908 - RNA, 1701 nt, Artificial Sequence
  derived and/or modified CDS sequence (opt5) from hemagglutinin__InfluenzaA__AGB97300
augaagaccaucauugcccugagcuacauccucugccugguguucgcucagaaacuucccggcaacgacaauuccacagccacgcugugucucgggcaccaugcggucccuaacggaaccauuguuaagacaaucaccaaugauagaauugaggugacaaacgcuaccgaacuggugcaaaauucuagcaucggcgagaucugcgacuccccgcaccagauucuugauggggaaaacuguacacugaucgacgcccuccugggagauccccagugcgacggcuuucagaauaaaaagugggaucuguucgucgagcggucuaaagccuauagcaacuguuacccuuaugacgugcccgauuacgcuucccuccgcucucugguugccagcuccgggacccuugaauuuaauaacgagagcuucaauuggacgggagugacccaaaacggcacaucuuccgcuugcauuagacggagcaauucuuccuuuuucagccgccugaacuggcucacccaucugaauuuuaaguauccugcccuuaacgucacaaugcccaacaaugagcaguucgacaagcuguacaucuggggcgugcaccauccugggaccgauaaagaccagauuuuucucuaugcgcagucuuccggaagaaucacgguuagcacaaagcggucccaacaggccgugauuccgaacaucggcucucgccccagaauccggaauauuccuagccgcaucuccauuuacuggaccaucgucaaacccggggauauucugcugaucaacagcacaggaaaucucaucgcuccuagaggcuacuucaagauucggucugggaaauccagcaucaugcgcucugacgcccccauuggaaaguguaagagcgaaugcaucaccccgaacggcuccauuccuaaugacaaacccuuucagaacgugaauagaaucaccuauggcgcuuguccucgguacgugaagcagucuacacugaaacuugccacggggaugcgcaacguccccgagaagcaaaccagaggaaucuucggcgcgauugccggguuuaucgaaaauggaugggagggcaugguugaugggugguauggauuccggcaccagaacagcgagggcagaggccaggcugccgaccugaaauccacacaagcugccauugaucagaucaaugggaagcucaaccgccugauuggaaaaaccaaugaaaaguuccaccagaucgagaaggaauuuagcgagguggaaggccggauucaggaccuugagaaauacguggaggauacaaagaucgaccuguggucuuauaacgccgaacuccuggucgcucuggagaaccaacauaccaucgaucucacggacuccgaaaugaauaaacuguucgagaagacaagaaaacagcuucgcgaaaacgcggaggauauggggaauggaugcuuuaagauuuaccacaagugugacaacgccugcaucggcagcauucggaaugggaccuaugaucaugacguguacagagacgaggcucugaacaaucgcuuccagaucaaaggcguugaacucaagucuggauacaaagauuggauucuguggaucuccuuugccaucagcugcuuccuucuguguguggcccuccugggcuuuauuaugugggcuugccagaaggggaacauccgguguaauauuugcaucuga

SEQ ID NO: 201909 - RNA, 1701 nt, Artificial Sequence
  derived and/or modified CDS sequence (opt5) from hemagglutinin__InfluenzaA__AGE89267
augaaggccauccugauugugcuccuguacaccuucgcuacagccaacgcggacacgcuuugcaucggcuaucacgcuaauaacagcaccgauacagucgacaccguucuggagaaaaaugugacagugacccauuccgucgaucuccuggaagacaagcacaacgggaaacuuuguaagcugagaggaguggcuccccuccaucugggcaaaugcaauauugccggguggauccugggaaacccugagugugaaucucucagcacagccuccucuuggagcuacauuguugagaccuccucuagcgauaauggcacgugcuauccgggggacuuuaucgauuacgaagaacugcgggagcagcuuuccagcgugucuuccuucgaacgcuuugagaucuuccccaagaccagcucuuggccuaaccacgacuccaauaagggagucacagccgcuuguccccaugccggcgaaaagagcuuuuauaagaaccugauuuggcucgugaaaaagggcaauucuuacccuaaacugaacaaguccuauaucaaugauaaggggaaagagguucuugugcuguggggcauucaccaccccagcaccuccacagaccaacagucucucuaccagaacgcggaugccuacgucuucgugggaaccagcagauauuccaagaaauuuaagccugagaucgcuauucggccgaaagugcgcgaccaggaagggagaaugaauuacuauuggacgcuggucgagcccggagauaagaucacauucgaagccaccggcaaccugguugugccucgguacgcuuuugccauggagcgcaacgcggggagcggaauuaucaucucugacacacccauucaugacugcaauaccaccugucaaacaccuaaaggcgccaucaacacgucccuccccuuccagaauauucacccgaucaccauuggcaagugcccuaaguaugugaaaagcacaaagcugagacuugcuaccgggcugcggaacguccccucuauccagagccgcggacucuuuggcgccaucgcuggguucauugaaggaggcuggacagggaugguggauggaugguacggcuaucaucaccagaaugagcaaggcuccggguacgccgccgaccugaaaucuacccagaacgcuaucgaugagauuacgaauaagguuaacagcgugaucgagaaaaugaauacacaguuuaccgcggucggaaaggaguucaaccaccuugaaaagagaauugagaaucugaacaaaaagguggacgauggcuuccucgacaucuggaccuacaaugccgaacugcugguucuccuggagaacgagcggacacuugauuaucaugacuccaaugugaaaaaccuguacgaaaaggucaaaagccagcucaagaacaaugcuaaggagaucgggaacggauguuuugaguucuaucacaaaugcgauaauaccuguauggaaucugugaagaacggcacauacgacuauccuaaauacuccgaagaggccaagcugaaucgcgagaaaauugauggggucaaacuugaaagcacgagaaucuaucaaauucuggccaucuacucuaccguggcuuccagccucguucugguggucucccugggcgccauuucuuuuuggaugugcagcaacggaucccuccagugccggaucuguauuuga

SEQ ID NO: 201910 - RNA, 1701 nt, Artificial Sequence
  derived and/or modified CDS sequence (opt5) from hemagglutinin__InfluenzaA__AGE89277
augaaggccauccugauugugcuccuguacaccuucgcuacagccaacgcggacacgcuuugcaucggcuaucacgcuaauaacagcaccgauacagucgacaccguucuggagaaaaaugugacagugacccauuccgucgaucuccuggaagacaagcacaacgggaaacuuuguaagcugagaggaguggcuccccuccaucugggcaaaugcaauauugccggguggauccugggaaacccugagugugaaucucucagcacagccuccucuuggagcuacauuguugagaccuccucuagcgauaauggcacgugcuauccgggggacuuuaucgauuacgaagaacugcgggagcagcuuaacuccgugagcucuuucgaacgcuuugagaucuuccccaagaccuccagcuggccuaaucacgacucuaacaagggagucacagccgcuuguccccaugccggcgaaaaauccuuuuauaagaaucugauuuggcucgugaaaaagggcaacagcuacccuaaacugaauaagucuuauaucaacgauaaggggaaagagguucuugugcuguggggcauucaccaccccuccaccagcacagaccaacagucccucuaccagaaugcggaugccuacgucuucgugggaaccucuagauauagcaagaaauuuaagccugagaucgcuauucggccgaaagugcgcgaccaggaagggagaaugaacuacuauuggacgcuggucgagcccggagauaagaucacauucgaagccaccggcaaccugguugugccucgguacgcuuuugccauggagcgcaaugcgggguccggaauuaucaucagcgacacacccauucaugacugcaacaccaccugucaaacaccuaaaggcgccaucaauacgucucuccccuuccagaacauucacccgaucaccauuggcaagugcccuaaguaugugaaauccacaaagcugagacuugcuaccgggcugcggaauguccccagcauccagucucgcggacucuuuggcgccaucgcuggguucauugaaggaggcuggacagggaugguggauggaugguacggcuaucaucaccagaacgagcaaggcagcggguacgccgccgaccugaaauccacccagaaugcuaucgaugagauuacgaacaagguuaauucugugaucgaaaagaugaacacacaguuuaccgcggucggaaaggaguucaaucaccuugaaaagagaauugagaaccugaauaaaaagguggacgauggcuuccucgacaucuggaccuacaacgccgaacugcugguucuccuggagaaugagcggacacuugauuaucaugacagcaacgugaaaaaccuguacgaaaaggucaaaucccagcucaagaauaacgcuaaggagaucgggaauggauguuuugaguucuaucacaaaugcgauaacaccuguauggagagcgugaagaauggcacauacgacuauccuaaauacucugaagaggccaagcugaaccgcgagaaaauugauggggucaaacuugaauccacgagaaucuaucaaauucuggccaucuacagcaccguggcuucuucccucguucugguggucagccugggcgccauuuccuuuuggaugugcucuaauggaagccuccagugccggaucuguauuuga

SEQ ID NO: 201911 - RNA, 1701 nt, Artificial Sequence; identical to SEQ ID NO: 200428
  derived and/or modified CDS sequence (opt5) from hemagglutinin__InfluenzaA__AGE89287

SEQ ID NO: 201912 - RNA, 1701 nt, Artificial Sequence
  derived and/or modified CDS sequence (opt5) from hemagglutinin__InfluenzaA__AGE89298
augaaggccauccuggugguccuccuguacaccuucgcuacagccaacgcggacacgcuuugcauuggcuaucacgcuaauaacagcaccgauacaguugacaccgugcuggagaaaaaugugacagucacccauuccgugaaccuccuggaagauaagcacaaugggaaacuuuguaagcugagaggaguugcuccccuccaucugggcaaaugcaacaucgccggguggauucugggaaauccugagugugaaucucucagcacagccuccucuuggagcuacaucguggagaccuccucuagcgacaacggcacgugcuauccgggggauuuuauugacuacgaagaacugcgggagcagcuuuccagcgucucuuccuucgaacgcuuugagaucuuccccaagaccagcucuuggccuaaucacgauuccaacaagggagugacagccgcuuguccccaugccggcgcgaaaggcuuuuauaagaaucugaucuggcucguuaaaaaggggaacagcuacccuaaacugucuaaguccuauauuaaugacaagggaaaagaagugcuuguccuguggggcauccaccaccccagcaccacagccgaucaacagucccucuaccagaacgcugacaccuacguguucguggggacgucuagauauagcaagaaauuuaagccugagauugccauccggccgaaaguccgcgaucaggagggaagaaugaauuacuauuggacacugguugaacccggcgacaagauuaccuucgaggcuacagggaaccugguggugccucgguacgccuuugcgauggaacgcaacgccggauccggcaucauuaucagcgauacccccguccaugacugcaauaccacaugucaaacgccuaaaggcgcuaucaacaccucucuccccuuccagaauauucacccgaucacaauugggaagugcccuaaguaugugaaauccaccaagcugagacuugccacaggacugcggaacguucccagcauccagucucgcggccucuuuggggcuauugccggauucaucgagggcggguggaccggaaugguggacggcugguacggcuaucaucaccagaaugaacaagggagcggauacgccgcugaucugaaauccacgcagaacgcgaucgacaagauuacaaauaaagucaacucugugaucgagaagaugaauacccaguuuaccgccguuggcaaggaguucaaccaccuugagaaaagaauugagaaucugaacaagaaaguggaugacggguuccucgauaucuggacauacaaugcugaacugcugguccuccuggagaacgaacggacccuugacuaucaugauagcaaugugaagaaccuguacgagaaaguccgcaaccagcucaagaauaacgccaaggagauuggaaauggcuguuuugaguucuaucacaaaugcgacaacacauguauggaauccgugaagaaugggacguacgauuauccuaaauacagcgaagaggccaagcugaacagagaagagaucgacggcguuaaacuugagucuacccggaucuaucaaauucuggcuaucuacuccacaguggccagcucucucauucuggucgugucccugggagcgaucagcuuuuggaugugcuccaauggcucucuccagugccgcauuuguaucuga

SEQ ID NO: 201913 - RNA, 1701 nt, Artificial Sequence; identical to SEQ ID NO: 198981
  derived and/or modified CDS sequence (opt5) from hemagglutinin__InfluenzaA__AGE89308

SEQ ID NO: 201914 - RNA, 1701 nt, Artificial Sequence; identical to SEQ ID NO: 200423
  derived and/or modified CDS sequence (opt5) from hemagglutinin__InfluenzaA__AGE89318

SEQ ID NO: 201915 - RNA, 1701 nt, Artificial Sequence
  derived and/or modified CDS sequence (opt5) from hemagglutinin__InfluenzaA__AGE89329
augaagaccaucauugcccugagcuacauccucugccugguguucgcucagaaacuucccggcaacgacgauuccacagccacgcugugucucgggcaccaugcggucccuaauggaaccauuguuaagacaaucaccaacgaccaaauugaggugacaaaugcuaccgaacuggugcagucuagcuccacaggcgagaucugcaacucuccgcaccagauccuugauggggaaaauuguacccugauugacgcccuccugggagauccccagugcgacggcuuucaaaacaaaaagugggaucuguucgucgagagaagcaaagcccauuccaauuguuauccuuacgacgugcccgauuaugcuucucuccggagccugguugccuccagcgggacgcuugaauuuaacaaugagucuuucaacuggaccggagugacacagaauggcaccuccagcgcuugcauccgcagaucuaacaauuccuuuuucagccggcugaacuggcucacacaccugaauuuuaaguacccugcccuuaacgucaccaugcccaacaaugagcaguucgacaagcuguauauuuggggcgugcaucacccugggacggauaaagaccagaucuuucucuacgcgcaagccucuggacgcauuacaguuuccaccaagagaagccagcaggcugugaucccgaacauuggcucccggccccgcgucagaaauaucccuucucgggugagcaucuauuggacaauugugaaacccggggauauccugcugauuaacuccaccggaaaucucaucgccccucgcggcuacuucaagauuagaagcgggaaaucuuccaucaugcggagcgacgcucccaucggaaaguguaacucugccugcauuaccccgaauggcagcaucccuaacgacaagcccuuucagaaugucaaccgcauuacauacggcgcguguccuagauauguuaaacaaaauacgcugaaacuugccaccgggaugcggaacgugcccgaaaaacagacacgcggaaucuucggcgcuauugccggguuuaucgagaauggaugggaaggcaugguggaugggugguacggauucagacaccagaacuccgagggccggggccaagcugccgaccugaagucuacccaggccgcuaucgaucagauuaaugggaaacucaacagacugaucggaaagacaaacgagaaauuccaucagauugaaaaggaguuuagcgaagucgagggccgcauccaagaccuugaaaaguauguggaggauaccaaaauugaccugugguccuacaaugcggagcuccugguugcccuggaaaaccagcacacgaucgaucucacagacagcgagaugaauaagcuguucgaaaagaccaagaaacagcuucgggagaacgcugaagauauggggaauggaugcuuuaagauuuaucauaagugugacaacgccugcaucggcucuaucagaaaugggaccuacgaucacgacguguaucgcgacgaggcccugaacaaucgguuccagauuaaaggcgucgagcucaaguccggauacaaagauuggauccuguggauuagcuuugcuaucucuugcuuccuucuguguguggcccuccugggcuuuauuaugugggcgugccaaaaggggaacaucagauguaauaucugcauuuga

SEQ ID NO: 201916 - RNA, 1701 nt, Artificial Sequence; identical to SEQ ID NO: 198526
  derived and/or modified CDS sequence (opt5) from hemagglutinin__InfluenzaA__AGE89340

SEQ ID NO: 201917 - RNA, 1701 nt, Artificial Sequence; identical to SEQ ID NO: 200426
  derived and/or modified CDS sequence (opt5) from hemagglutinin__InfluenzaA__AGE89350

SEQ ID NO: 201918 - RNA, 1701 nt, Artificial Sequence
  derived and/or modified CDS sequence (opt5) from hemagglutinin__InfluenzaA__AGE89361
augaaggccauccuggugguccuccuguacaccuucgcuacagccaacgcggacacgcuuugcauuggcuaucacgcuaauaacagcaccgauacaguugacaccgugcuggagaaaaaugugacagucacccauuccgugaaccuccuggaagauaagcacaaugggaaacuuuguaagcugagaggaguugcuccccuccaucugggcaaaugcaacaucgccggguggauucugggaaauccugagugugaaucucucagcacagccuccucuuggagcuacaucguggagaccuccucuagcgacaacggcacgugcuauccgggggauuuuauuaauuacgaagaacugcgggagcagcuuuccagcgucucuuccuucgaacgcuuugagaucuuccccaagaccagcucuuggccuaaccacgacuccaauaagggagugacagccgcuuguccccaugccggcgcgaaaucuuuuuauaagaaccugaucuggcucguuaaaaagggcaauagcuacccuaaacuguccaagagcuauauuaacgauaaggggaaagaagugcuuguccuguggggaauccaccaccccuccaccacaaccgaccaacagucucucuaccagaaugccgaugcuuacguguucgugggcacgagcagauauuccaagaaauuuaagccugagauugccauccggccgaaaguccgcgaccaggaggggagaaugaacuacuauuggacacugguugaacccggagauaagauuaccuucgaggcuacaggcaaccugguggugccucgguacgccuuugcgauggaacgcaaugccgggagcggaaucauuaucucugacacccccguccaugauugcaacaccacaugucaaacgccuaaaggcgcuaucaauaccucccuccccuuccagaacauucacccgaucacaauuggcaagugcccuaaguaugugaaaagcaccaagcugagacuugccacagggcugcggaauguucccucuauccagagccgcggacucuuuggcgcuauugccggguucaucgagggaggcuggaccgggaugguggacggaugguacggcuaucaucaccagaacgaacaaggcuccggguacgccgcugaccugaaaucuacgcagaaugcgaucgauaagauuacaaacaaagucaauagcgugaucgagaagaugaacacccaguuuaccgccguuggaaaggaguucaaucaccuugagaaaagaauugagaaccugaauaagaaaguggacgauggcuuccucgacaucuggacauacaacgcugaacugcugguccuccuggagaaugaacggacccuugauuaucaugacuccaacgugaagaaccuguacgagaaaguccgcaaucagcucaagaacaaugccaaggagauugggaacggauguuuugaguucuaucacaaaugcgauaauacauguauggaaagcgugaagaacggcacguacgacuauccuaaauacucugaagaggccaagcugaauagagaagagaucgaugggguuaaacuugaguccacccggaucuaucaaauucuggcuaucuacagcacaguggccucuucccucguccuggugguuagccugggcgcgauuuccuuuuggaugugcucuaacggaagccuccagugccgcaucuguauuuga

SEQ ID NO: 201919 - RNA, 1701 nt, Artificial Sequence; identical to SEQ ID NO: 200423
  derived and/or modified CDS sequence (opt5) from hemagglutinin__InfluenzaA__AGE89371

SEQ ID NO: 201920 - RNA, 1701 nt, Artificial Sequence
  derived and/or modified CDS sequence (opt5) from hemagglutinin__InfluenzaA__AGE89382
augaaggccauccuggugguccuccuguacaccuucgcuacagccaacgcggacacgcuuugcauuggcuaucacgcuaauaacagcaccgauacaguugacaccgugcuggagaagaaugugacagucacccauuccgugaaccuccuggaagauaagcacaaugggaaacuuuguaagcugagaggaguugcuccccuccaucugggcaaaugcaacaucgccggguggauucugggaaauccugagugugaaucucucagcacagccuccucuuggagcuacaucguggagaccuccucuagcgacaacggcacgugcuauccgggggauuuuauuaauuacgaggaacugcgggagcagcuuuccagcgucucuuccuucgaacgcuuugagaucuuccccaagaccagcucuuggccuaaccacgacuccaauaagggagugacagccgcuuguccccaugccggcgcgaaaucuuuuuauaagaaccugaucuggcucguuaaaaagggcaauagcuacccuaaacuguccaagagcuauauuaacgauaaggggaaagaagugcuuguccuguggggaauccaccaccccuccaccucugccgaccaacagagccucuaccagaaugcugaugccuacguguucgugggcacauccaaguauagcaaaaaguuuaaaccugagauugcugucagaccgaagguucgggaccaggaggggcgcaugaacuacuauuggacccuggugaaacccggagauaagaucacguucgaagccacaggcaaccugcucgugccuagauacgcguuugccauggagcggaaugcugggucuggaauuaucauuuccgacacccccguccaugauugcaacacaaccugucaaaccccuaagggcgccaucaauacaagccugcccuuccagaacauccacccgauuacgaucggcaaaugcccuaaguaugugaaaucuaccaaacuucgccuggcuacagggcucagaaauguucccagcauucagucccggggacuguuuggcgccaucgccggguucauugaaggaggcuggaccgggaugguggacggaugguacggcuaucaucaccagaacgagcaaggcucuggguacgcugcggaccuuaaaagcacacagaaugccaucgauaagaucaccaacaaggucaauuccgugauugaaaagaugaacacgcaguuuacagcuguuggaaaggaguucaaucaccuggagaaacgcaucgaaaaccucaauaagaaaguggacgauggcuuccuggacauuuggaccuacaacgccgagcugcucguccugcuugaaaaugagagaacccuggauuaucaugacagcaacgugaagaaccucuacgaaaagguccggucucagcugaaaaauaacgccaaggagaucgggaauggauguuuugaguucuaucacaaaugcgauaacacauguauggaauccgugaagaauggcaccuacgacuauccuaaauacagcgaggaagcuaaacuuaaccgcgaggaaauugaugggguuaagcuggagucuacaagaaucuaucaaauccucgccauuuacuccacgguggcgagcucccugguccuggugguuucucucggcgcuaucagcuuuuggaugugcuccaauggaucucugcagugccggauuuguaucuga

SEQ ID NO: 201921 - RNA, 1701 nt, Artificial Sequence
  derived and/or modified CDS sequence (opt5) from hemagglutinin__InfluenzaA__AGE89392
augaagaccaucauugcccugagcuacauccucugccugguguucgcucaggagcuucccggcaacgacaauuccacagccacgcugugucucgggcaccaugcggucccuaacggaaccauuguuaaaacaaucaccaaugaucaaauugaagugacaaacgcuaccgagcuggugcagucuagcuccacaggcgaaaucugcaauucuccgcaccagauccuugacggggagaacuguacccugauugaugcccuccugggagacccccagugcgauggcuuucaaaauaagaaaugggaccuguucgucgaaagaagcaaggcccauuccaacuguuauccuuacgaugugcccgacuaugcuucucuccggagccugguugccuccagcgggacgcuugaguuuaauaacgagucuuucaauuggaccggagugacacagaacggcaccuccagcgcuugcauccgcagaucuaauaacuccuuuuucagccggcugaauuggcucacacaccugaacuuuaaauacccugcccuuaacgucaccaugcccaauaacgaacaguucgauaagcuguauauuuggggcgugcaucacccugggacggacaaggaucagaucuuucucuacgcgcaagccucuggacgcauuacaguuuccaccaaaagaagccagcaggcugugaucccgaauauuggcucccggccccgcgucagaaacaucccuucucgggugagcaucuauuggacaauugugaagcccggggacauccugcugauuaauuccaccggaaaccucaucgccccucgcggcuacuucaaaauuagaagcgggaagucuuccaucaugcggagcgaugcucccaucggaaaauguaauucugccugcauuaccccgaacggcagcaucccuaaugacaagcccuuucagaacgucaaucgcauuacauacggcgcguguccuagauauguuaagcaaaacacgcugaaacuugccaccgggaugcggaaugugcccgagaagcagacacgcggaaucuucggcgcuauugccggguuuaucgaaaacggaugggagggcaugguggacgggugguacggauucagacaccaaaauuccgagggccggggccaggcugccgaucugaaaucuacccaggccgcuaucgaccagauuaacgggaagcucaacagacugaucggaaaaacaaaugaaaaguuccaucagauugagaaagaauuuagcgaggucgaaggccgcauccaagaucuugagaaguauguggaggacaccaagauugaucugugguccuacaacgcggaacuccugguugcccuggagaaucagcacacgaucgaccucacagauagcgaaaugaacaaacuguucgagaagaccaaaaagcagcuucgggaaaaugcugaggacauggggaacggaugcuuuaaaauuuaucauaagugugauaaugccugcaucggcucuaucagaaacgggaccuacgaccacgauguguaucgcgacgaggcccugaauaaccgguuccagauuaagggcgucgaacucaaauccggauacaaggacuggauccuguggauuagcuuugcuaucucuugcuuccuucuguguguggcccuccugggcuuuauuaugugggcgugccaaaaagggaauaucagauguaacaucugcauuuga

SEQ ID NO: 201922 - RNA, 1701 nt, Artificial Sequence; identical to SEQ ID NO: 201909
  derived and/or modified CDS sequence (opt5) from hemagglutinin__InfluenzaA__AGE89422

SEQ ID NO: 201923 - RNA, 1701 nt, Artificial Sequence; identical to SEQ ID NO: 200406
  derived and/or modified CDS sequence (opt5) from hemagglutinin__InfluenzaA__AGE89719

SEQ ID NO: 201924 - RNA, 1701 nt, Artificial Sequence
  derived and/or modified CDS sequence (opt5) from hemagglutinin__InfluenzaA__AGE89730
augaaggccauccuggugguccuccuguacaccuucgcuacagccaacgcggacacgcuuugcauuggcuaucacgcuaauaacagcaccgauacaguugacaccgugcuggagaaaaaugugacagucacccauuccgugaaccuccuggaagauaagcacaaugggaaacuuuguaagcugagaggaguugcuccccuccaucugggcaaaugcaacaucgccggguggauucugggaaauccugagugugaaucucucagcacagccuccucuuggagcuacaucguggagaccuccucuagcgacaacggcacgugcuauccgggggauuuuauuaauuacgaggaacugcgggagcagcuuuccagcgucucuuccuucgaacgcuuugagaucuuccccaagaccagcucuuggccuaaccacgacuccaauaagggagugacagccgcuuguccccaugccggcgcgaaaucuuuuuauaagaaccugaucuggcucguuaaaaagggcaauagcuacccuaaacuguccaagagcuauauuaacgauaaggggaaagaagugcuuguccuguggggaauccaccaccccuccaccucugccgaccaacagagccucuaccagaaugcugaugccuacguguucgugggcacauccaaguauagcaaaaaguuuaaaccugagauugcugucagaccgaagguucgggaccaggaggggcgcaugaacuacuauuggacccugguggaacccggagauaaaaucacguucgaggccacaggcaaccugcucgugccuagauacgcguuugccauggaacggaaugcugggucuggaauuaucauuuccgacacccccguccaugauugcaacacaaccugucaaaccccuaagggcgccaucaauacaagccugcccuuccagaacauccacccgauuacgaucggcaagugcccuaaauaugugaagucuaccaaacuucgccuggcuacagggcucagaaauguucccagcauucagucccggggacuguuuggcgccaucgccggguucauugagggaggcuggaccgggaugguggacggaugguacggcuaucaucaccagaacggccaagggucuggauacgcugcggaccuuaagagcacacagaaugccaucgauaaaaucaccaacaaggucaauuccgugauugaaaagaugaacacgcaguuuacagcuguuggcaaagaguucaaucaccuggagaagcgcaucgaaaaccucaauaaaaagguggacgauggguuccuggacauuuggaccuacaacgccgagcugcucguccugcuugaaaaugagagaacccuggauuaucaugacagcaacgugaaaaaccucuacgaaaagguccggucucagcugaagaauaacgccaaagagaucggaaauggcuguuuugaguucuaucacaagugcgauaacacauguauggaauccgugaaaaaugggaccuacgacuauccuaaguacagcgaggaagcuaaacuuaaccgcgaggaaauugauggcguuaagcuggagucuacaagaaucuaucaaauccucgccauuuacuccacgguggcgagcucccugguccuggugguuucucucggagcuaucagcuuuuggaugugcuccaauggcucucugcagugccggauuuguaucuga

SEQ ID NO: 201925 - RNA, 1701 nt, Artificial Sequence; identical to SEQ ID NO: 200423
  derived and/or modified CDS sequence (opt5) from hemagglutinin__InfluenzaA__AGE89740

SEQ ID NO: 201926 - RNA, 1701 nt, Artificial Sequence
  derived and/or modified CDS sequence (opt5) from hemagglutinin__InfluenzaA__AGE89751
augaagaccaucauugcccugagcuacauccucugccugguguucgcucagaaacuucccggcaacgacaauuccacagccacgcugugucucgggcaccaugcggucccuaacggaaccauuguuaagacaaucaccaaugaucaaauugaggugacaaacgcuaccgaacuggugcagucuagcuccgccggcgagaucugcgacucuccgcaccauauccuugauggggaaaauuguacacugauugacgcccuccugggagauccccagugcgacggcuuucagaacaaaaagugggaucuguucgucgagagaagccgggcuuauuccaauuguuacccuuaugacgugcccgauuacgccucucuccgcagccugguugcuuccagcgggacccuugaauuuaacaaugagucuuucaacuggacgggagugacccaaaauggcacauccagcgccugcaucagacggucuaacaauuccuuuuucagccgccugaacuggcucacccaccugaauuuuaaauauccugcgcuuaacgucacaaugcccaacaaugagcaguucgacaagcuguacauuuggggcgugcaucacccugggaccgauaaggaccagaucuuucucuaugcccaggcuucuggaagaauuacgguuuccacaaaacggagccaacaggccgugaucccgaacauuggcucccgccccagaguccggaauaucccuucucgcaucagcauuuacuggaccaucgugaagcccggggauauucugcugaucaacuccacaggaaaucucauugcuccuagaggcuacuucaaaauccggagcgggaagucuuccaucaugcgcagcgacgcccccauuggaaaauguaacucugaaugcaucaccccgaauggcagcauuccuaacgacaagcccuuucagaaugugaacagaaucaccuauggcgcguguccucgguacgucaagcaguccacacugaaacuugccacggggaugcgcaauguucccgagaagcaaaccagaggaauuuucggcgcuaucgccggguuuaucgaaaacggaugggagggcaugauggaugggugguauggauuccggcaccaaaauucugagggcagaggccaggcugccgaccugaaaagcacacaggccgcuauugaucagaucaacgggaagcucaaucgccugauuggaaaaaccaacgaaaaguuccaucagaucgagaaagaauuuuccgagguggaaggccggauucaggaccuugagaaguacguggaggauacaaagaucgaccuguggagcuauaacgcggaacuccuggucgccauggagaaucaacacaccauugaucugacggacucugaaaugaacaaacucuucgagaagaccaaaaagcagcugagagaaaaugcugaggauauggggaacggaugcuuuaaaaucuaccauaagugugacaaugccugcaucggcuccauucgcaacgggacauaugaucacgacguguaccgggacgaggcccuuagcaauagauuccagaucaagggcguugaacugaaaucuggauacaaggauuggauucucuggaucuccuuugcuauuagcugcuuccugcuuuguguggcccugcucggcuuuaucaugugggcgugccagaaagggaacauccgcuguaauauuugcaucuga

SEQ ID NO: 201927 - RNA, 1701 nt, Artificial Sequence; identical to SEQ ID NO: 200426
  derived and/or modified CDS sequence (opt5) from hemagglutinin__InfluenzaA__AGE89762

SEQ ID NO: 201928 - RNA, 1701 nt, Artificial Sequence
  derived and/or modified CDS sequence (opt5) from hemagglutinin__InfluenzaA__AGF44891
augaaggccauccuggugguccuccuguacaccuucgcuacagccaacgcggacacgcuuugcauuggcuaucacgcuaauaacagcaccgauacaguugacaccgugcuggagaaaaaugugacagucacccauuccgugaaccuccuggaagauaagcacaaugggaaacuuuguaagcugagaggaguugcuccccuccaucugggcaaaugcaacaucgccggguggauucugggaaauccugagugugaaucucucagcacagccuccucuuggagcuacaucguggagaccuccucuagcgacaacggcacgugcuauccgggggauuuuauuaauuacgaagaacugcgggagcagcuuuccagcgucucuuccuucgaacgcuuugagaucuuccccaagaccagcucuuggccuaaccacgacuccaauaagggagugacagccgcuuguccccaugccggcgcgaaaucuuuuuauaagaaccugaucuggcucguuaaaaagggcaauagcuacccuaaacuguccaagagcuauauuaacgauaaggggaaagaagugcuuguccuguggggaauccaccaccccuccaccacagccgaccaacagucucucuaccagaaugcugaugccuacguguucgugggcaccagcagauauuccaagaaauuuaagccugagauugcuauccggccgaaaguccgcgaccaggaggggagaaugaacuacuauuggacgcugauugaacccggagauaagaucacauucgaggccaccggcaaccugguugugccucgguacgcguuugccauggaacgcaaugcugggagcggaauuaucaucucugacacacccgugcaugauugcaacaccaccugucaaacaccugagggcgccauuaauacgucccuccccuuccagaacauccacccgauuaccaucggcaaaugcccuaaguaugucaagagcacaaaacugagacuugcuaccgggcugcggaaugugcccucuauucagagccgcggacucuuuggcgccaucgccggguucaucgaaggaggcuggacagggaugguugacggaugguacggcuaucaucaccagaacgagcaaggcuccggguacgcugcggaccugaagucuacccagaaugccguggauaaaauuacgaacaaggucaauagcgugaucgagaaaaugaacacacaguuuaccgcuguuggaaaggaguucaaucaccuugagaagagaauugaaaaccugaauaaaaagguggacgauggcuuccucgacaucuggaccuacaacgccgagcugcugguccuccuggaaaaugagcggacacuugauuaucaugacuccaacgugaaaaaccuguacgagaagguccgcaaucagcucaaaaacaaugccaaggaaauugggaacggauguuuugaguucuaucacaagugcgauaauaccuguauggaaagcgugaaaaacggcacauacgacuauccuaaguacucugaggaagcuaaacugaauagagagaagaucgaugggguuaaacuugaguccacgcggaucuaucaaauucuggccaucuacagcaccguggcgucuucccucguccuggugguuagccugggcgcuauuuccuuuuggaugugcucuaacggaagccuccagugccgcaucuguauuuga

SEQ ID NO: 201929 - RNA, 1701 nt, Artificial Sequence; identical to SEQ ID NO: 201928
  derived and/or modified CDS sequence (opt5) from hemagglutinin__InfluenzaA__AGF44892

SEQ ID NO: 201930 - RNA, 1701 nt, Artificial Sequence
  derived and/or modified CDS sequence (opt5) from hemagglutinin__InfluenzaA__AGF44895
augaagaccaucauugcccugagcuacauccucugccugguguucgcucagaaacuucccggcaacgacaauuccacagccacgcugugucucgggcaccaugcggucccuaacggaaccauuguuaagacaaucaccaaugauagaauugaggugacaaacgcuaccgaacuggugcaaaauucuagcaucggcgagaucugcgacuccccgcaccagauucuugauggggaaaacuguacacugaucgacgcccuccugggagauccccagugcgacggcuuucagaauaaaaagugggaucuguucgucgagcggucuaaagccuauagcaacuguuacccuuaugacgugcccgauuacgcuucccuccgcucucugguugccagcuccgggacccuugaauuuaauaacgagagcuucaauuggacgggagugacccaaaacggcacaucuuccgcuugcauuagacggagcaauucuuccuuuuucagccgccugaacuggcucacccaucugaauuuuaaguauccugcccuuaacgucacaaugcccaacaaugagcaguucgacaagcuguacaucuggggcgugcaccauccugggaccgauaaagaccagauuuuucucuaugcgcagucuuccggaagaaucacgguuagcacaaagcggucccaacaggccgugauuccgaacaucggcucucgccccagaauccggaauauuccuagccgcaucuccauuuacuggaccaucgucaaacccggggauauucugcugaucaacagcacaggaaaucucaucgcuccuagaggcuacuucaagauucggucugggaaauccagcaucaugcgcucugacgcccccauuggaaaguguaagagcgaaugcaucaccccgaacggcuccauuccuaaugacaaacccuuucagaacgugaauagaaucaccuauggcgcuuguccucgguacgugaagcagucuacacugaaacuugccacggggaugcgcaacguccccgagaagcaaaccagaggaaucuucggcgcgauugccggguuuaucgaaaauggaugggagggcaugguugaugggugguauggauuccggcaccagaacagcgagggcagaggccaggcugccgaccugaaauccacacaagcugccauugaucagaucaaugggaagcucaaccgccugauuggaaaaaccaaugaaaaguuccaccagaucgagaaggaauuuagcgagguggaaggccggauucaggaccuugagaaauacguggaggauacaaagaucgaccuguggucuuauaacgccgaacuccuggucgcucuggagaaccaacauaccaucgaucucacggacuccgaaaugaauaaacuguucgagaagaccaaaaagcagcuuagagaaaacgcggaggauauggggaauggaugcuuuaagauuuaccacaaaugugacaacgccugcaucggcagcauucgcaaugggacauaugaucauaacguguaccgggacgaggcucugaauaacagauuccagaucaagggcguugaacucaaaucuggauacaaggacuggauucuguggaucuccuuugccaucagcugcuuccuucuguguguggcccuccugggcuuuauuaugugggcuugccagaaagggaauauccgcuguaacauuugcaucuga

SEQ ID NO: 201931 - RNA, 1701 nt, Artificial Sequence; identical to SEQ ID NO: 201907
  derived and/or modified CDS sequence (opt5) from hemagglutinin__InfluenzaA__AGF44896

SEQ ID NO: 201932 - RNA, 1701 nt, Artificial Sequence
  derived and/or modified CDS sequence (opt5) from hemagglutinin__InfluenzaA__AGF44897
augaagaccaucauugcccugagcuacauccucugccugguguucgcucaggagcuucccggcaacgacgauuccacagccacgcugugucucgggcaccaugcggucccuaauggaaccauuguuaaaacaaucaccaacgaccaaauugaagugacaaaugcuaccgagcuggugcagucuagcuccacaggcgaaaucugcaacucuccgcaccagauccuugauggggagaauuguacccugauugacgcccuccugggagauccccagugcgacggcuuucaaaacaagaaaugggaucuguucgucgaaagaagcaaggcccauuccaauuguuauccuuacgacgugcccgauuaugcuucucuccggagccugguugccuccagcgggacgcuugaguuuaacaaugagucuuucaacuggaccggagugacacagaauggcaccuccagcgcuugcaugcgcagaucuaacaauuccuuuuucagccggcugaacuggcucacacaccugaauuuuaaauacccugcccuuaacgucaccaugcccaacaaugaacaguucgacaagcuguauaucuggggcgugcaucacccugggacggauaaggaccagauuuuucucuacgcgcaagccucuggacgcaucacaguuuccaccaaaagaagccagcaggcugugauuccgaacaucggcucccggccccgcgucagaaauauuccuucucgggugagcaucuauuggacaaucgugaagcccggggauauucugcugaucaacuccaccggaaaucucauugccccucgcggcuacuucaaaauccagagcgggaagucuuccauuaugagaagcgacgcucccaucggaaaauguaacucugccugcaucaccccgaauggcagcauuccuaacgacaagcccuuucaaaaugucaaccggaucacauacggcgcguguccucgcuauguuaagcagaauacgcugaaacuugccaccgggaugagaaacgugcccgagaagcagacacggggaauuuucggcgcuaucgccggguuuauugaaaauggaugggagggcaugguggaugggugguacggauuccgccaccaaaacuccgagggcagaggccaggcugccgaccugaaaucuacccaggccgcuaucgaucagaucaaugggaagcucaaccggcugauuggaaaaacaaacgaaaaguuccaucaaaucgagaaagaauuuagcgaggucgaaggccgcauucaggaccuugagaaguauguggaggauaccaagaucgaccugugguccuacaaugcggaacuccugguugcccuggagaaccagcacacgauugaucucacagacagcgaaaugaauaaacuguucgagaagaccaaaaagcagcuuagagaaaacgcugaggauauggggaauggaugcuuuaaaaucuaucauaagugugacaacgccugcauuggcucuauccggaaugggaccuacgaucacgacguguauagagacgaggcccugaacaaucgcuuccaaaucaagggcgucgaacucaaauccggauacaaggauuggauucuguggaucagcuuugcuauuucuugcuuccuucuguguguggcccuccugggcuuuaucaugugggcgugccagaaagggaacauucgguguaauaucugcaucuga

SEQ ID NO: 201933 - RNA, 1701 nt, Artificial Sequence; identical to SEQ ID NO: 201930
  derived and/or modified CDS sequence (opt5) from hemagglutinin__InfluenzaA__AGF44900

SEQ ID NO: 201934 - RNA, 1701 nt, Artificial Sequence; identical to SEQ ID NO: 201930
  derived and/or modified CDS sequence (opt5) from hemagglutinin__InfluenzaA__AGF44901

SEQ ID NO: 201935 - RNA, 1701 nt, Artificial Sequence; identical to SEQ ID NO: 201930
  derived and/or modified CDS sequence (opt5) from hemagglutinin__InfluenzaA__AGF44902

SEQ ID NO: 201936 - RNA, 1701 nt, Artificial Sequence; identical to SEQ ID NO: 201930
  derived and/or modified CDS sequence (opt5) from hemagglutinin__InfluenzaA__AGF44903

SEQ ID NO: 201937 - RNA, 1701 nt, Artificial Sequence; identical to SEQ ID NO: 201930
  derived and/or modified CDS sequence (opt5) from hemagglutinin__InfluenzaA__AGF44904

SEQ ID NO: 201938 - RNA, 1701 nt, Artificial Sequence
  derived and/or modified CDS sequence (opt5) from hemagglutinin__InfluenzaA__AGF44905
augaagaccaucauugcccugagcuacauccucugccugguguucgcucagaaacuucccggcaacgacaauuccacagccacgcugugucucgggcaccaugcggucccuaacggaaccauuguuaagacaaucaccaaugauagaauugaggugacaaacgcuaccgaacuggugcaaaauucuagcaucggcgagaucugcgacuccccgcaccagauucuugauggggaaaacuguacacugaucgacgcccuccugggagauccccagugcgacggcuuucagaauaaaaagugggaucuguucgucgagcggucuaaagccuauagcaacuguuacccuuaugacgugcccgauuacgcuucccuccgcucucugguugccagcuccgggacccuugaauuuaauaacgagagcuucaauuggacgggagugacccaaaacggcacaucuuccgcuugcauuagacggagcaauucuuccuuuuucagccgccugaacuggcucacccaucugaauuuuaaguauccugcccuuaacgucacaaugcccaacaaugagcaguucgacaagcuguacaucuggggcgugcaccauccugggaccgauaaagaccagauuuuucucuaugcgcagucuuccggaagaaucacgguuagcacaaagcggucccaacaggccgugauuccgaacaucggcucucgccccagaauccggaauauuccuagccgcaucuccauuuacuggaccaucgucaaacccggggauauucugcugaucaacagcacaggaaaucucaucgcuccuagaggcuacuucaagauucggucugggaaauccagcaucaugcgcucugacgcccccauuggaaaguguaagagcgaaugcaucaccccgaacggcuccauuccuaaugacaaacccuuucagaacgugaauagaaacaccuauggcgcuuguccucgguacgugaagcagucuacacugaaacuugccacggggaugcgcaauguccccgagaagcaaaccagaggaaucuucggcgcgaucgccggguuuauugaaaacggaugggagggcaugguugaugggugguauggauuccggcaccagaauagcgagggcagaggccaggcugccgaccugaaauccacacaagcugccaucgaucagauuaacgggaagcucaaucgccugaucggaaaaaccaacgaaaaguuccaccagauugagaaggaauuuagcgagguggaaggccggauccaggaccuugagaaauacguggaggauacaaagauugaccuguggucuuauaacgccgaacuccuggucgcucuggagaaucaacauaccaucgaucucacggacuccgaaaugaacaaacuguucgagaagaccaaaaagcagcuuagagaaaaugcggaggauauggggaacggaugcuuuaagaucuaccacaaaugugacaaugccugcauuggcagcauccgcaacgggacauaugaucauaauguguaccgggacgaggcucugaacaauagauuccagauuaagggcguugaacucaaaucuggauacaaggacuggauccuguggauuuccuuugccaucagcugcuuccuucuguguguggcccuccugggcuuuaucaugugggcuugccagaaagggaacauucgcuguaauaucugcauuuga

SEQ ID NO: 201939 - RNA, 1701 nt, Artificial Sequence; identical to SEQ ID NO: 201930
  derived and/or modified CDS sequence (opt5) from hemagglutinin__InfluenzaA__AGF44906

SEQ ID NO: 201940 - RNA, 1701 nt, Artificial Sequence
  derived and/or modified CDS sequence (opt5) from hemagglutinin__InfluenzaA__AGF44908
augaagaccaucauugcccugagcuacauccucugccugguguucgcucagaaacuucccggcaacgacaauuccacagccacgcugugucucgggcaccaugcggucccuaacggaaccauuguuaagacaaucaccaaugauagaauugaggugacaaacgcuaccgaacuggugcaaaauucuagcaucggcgagaucugcgacuccccgcaccagauucuugauggggaaaacuguacacugaucgacgcccuccugggagauccccagugcgacggcuuucagaauaaaaagugggaucuguucgucgagcggucuaaagccuauagcaacuguuacccuuaugacgugcccgauuacgcuucccuccgcucucugguugccagcuccgggacccuugaauuuaauaacgagagcuucaauugggcuggagugacgcaaaacggcaccucuuccgccugcauuagaggcagcaauucuuccuuuuucagccggcugaacuggcucacacaucugaauuuuaaguauccugcgcuuaacgucaccaugcccaacaaugagcaguucgacaagcuguacaucuggggagugcaccauccugggacagauaaagaccagauuuuucucuaugcccagucuuccggccgcaucaccguuagcacgaagagaucccaacaggcugugauuccgaacaucgggucucggccccgcaucagaaauauuccuagccggaucuccauuuacuggacaaucgucaaacccggagauauucugcugaucaacagcaccggcaaucucaucgccccucgcggguacuucaagauuagaucuggaaaauccagcaucaugcggucugacgcucccauuggcaaguguaagagcgaaugcaucacaccgaacggcuccauuccuaaugacaaacccuuucagaacgugaaucgcaucaccuauggggccuguccuagauacgugaagcagucuacccugaaacuugcgacaggaaugcggaacguccccgagaagcaaacgcgcggcaucuucggggccauugcuggauuuaucgaaaauggcugggaggggaugauggauggaugguauggcuucagacaccagaacagcgagggccgggggcaggccgcugaccugaaauccacccaagccgccauugaucagaucaauggaaagcucaacagacugauuggcaaaacaaaugaaaaguuccaccagaucgagaaggaauuuagcgagguugaagggcgcauucaggaccuugagaaauacguggaggauaccaagaucgaccuguggucuuauaacgcugaacuccugguggcgcuggagaaccaacauacaaucgaucucaccgacuccgaaaugaauaaacuguucgagaagacgaaaaagcagcuucgggaaaacgccgaggauaugggaaauggcugcuuuaagauuuaccacaaaugugacaacgcuugcaucgggagcauuagaaauggcacauaugaucaugacgucuaccgcgacgaggcccugaacaaucgguuccagaucaagggaguggaacucaaaucuggcuacaaggauuggauucuguggaucuccuuugccaucagcugcuuccuucuguguguugcucuccugggguuuauuaugugggccugccagaaaggaaacaucagauguaauauuugcaucuga

SEQ ID NO: 201941 - RNA, 1701 nt, Artificial Sequence; identical to SEQ ID NO: 201930
  derived and/or modified CDS sequence (opt5) from hemagglutinin__InfluenzaA__AGF44909

SEQ ID NO: 201942 - RNA, 1701 nt, Artificial Sequence; identical to SEQ ID NO: 201930
  derived and/or modified CDS sequence (opt5) from hemagglutinin__InfluenzaA__AGF44910

SEQ ID NO: 201943 - RNA, 1701 nt, Artificial Sequence
  derived and/or modified CDS sequence (opt5) from hemagglutinin__InfluenzaA__AGF44911
augaagaccaucauugcccugagcuacauccucugccugguguucgcucagaaacuucccggcaacgacaauuccacagccacgcugugucucgggcaccaugcggucccuaacggaaccauuguuaagacaaucaccaaugauagaauugaggugacaaacgcuaccgaacuggugcaaaauucuagcaucggcgagaucugcgacuccccgcaccagauucuugauggggaaaacuguacacugaucgacgcccuccugggagauccccagugcgacggcuuucagaauaaaaagugggaucuguucgucgagcggucuaaagccuauagcaacuguuacccuuaugacgugcccgauuacgcuucccuccgcucucugguugccagcuccgggacccuugaauuuaauaacgagagcuucaauugggcuggagugacgcaaaacggcaccucuuccgccugcauuagaggcagcaauucuuccuuuuucagccggcugaacuggcucacacaucugaauuuuaaguauccugcgcuuaacgucaccaugcccaacaaugagcaguucgacaagcuguacaucuggggagugcaccauccugggacagauaaagaccagauuuuucucuaugcccagucuuccggccgcaucaccguuagcacgaagagaucccaacaggcugugauuccgaacaucgggucucggccccgcaucagaaauauuccuagccggaucuccauuuacuggacaaucgucaaacccggagauauucugcugaucaacagcaccggcaaucucaucgccccucgcggguacuucaagauuagaucuggaaaauccagcaucaugcggucugacgcucccauuggcaaguguaagagcgaaugcaucacaccgaacggcuccauuccuaaugacaaacccuuucagaacgugaaucgcaucaccuauggggccuguccuagauacgugaagcagucuacccugaaacuugcgacaggaaugcggaacguccccgagaagcaaacgcgcggcaucuucggggccauugcuggauuuaucgaaaauggcugggaggggaugguugauggaugguauggcuucagacaccagaacagcgagggccgggggcaggccgcugaccugaaauccacccaagccgccauugaucagaucaauggaaagcucaacagacugauuggcaaaacaaaugaaaaguuccaccagaucgagaaggaauuuagcgagguggaagggcgcauucaggaccuugagaaauacguggaggauaccaagaucgaccuguggucuuauaacgcugaacuccuggucgcgcuggagaaccaacauacaaucgaucucaccgacuccgaaaugaauaaacuguucgagaagacgaaaaagcagcuucgggaaaacgccgaggauaugggaaauggcugcuuuaagauuuaccacaaaugugacaacgcuugcaucgggagcauuagaaauggcacauaugaucaugacguguaccgcgacgaggcccugaacaaucgguuccagaucaagggaguugaacucaaaucuggcuacaaggauuggauucuguggaucuccuuugccaccagcugcuuccuucuguguguggcucuccugggguuuaucaugugggccugccagaaaggaaacauuagauguaauaucugcauuuga

SEQ ID NO: 201944 - RNA, 1701 nt, Artificial Sequence; identical to SEQ ID NO: 201930
  derived and/or modified CDS sequence (opt5) from hemagglutinin__InfluenzaA__AGF44912

SEQ ID NO: 201945 - RNA, 1701 nt, Artificial Sequence; identical to SEQ ID NO: 201930
  derived and/or modified CDS sequence (opt5) from hemagglutinin__InfluenzaA__AGF44913

SEQ ID NO: 201946 - RNA, 1701 nt, Artificial Sequence
  derived and/or modified CDS sequence (opt5) from hemagglutinin__InfluenzaA__AGF44914
augaagaccaucauugcccugagcuacauccucugccugguguucgcucagaaacuucccggcaacgacaauuccacagccacgcugugucucgggcaccaugcggucccuaacggaaccauuguuaagacaaucaccaaugauagaauugaggugacaaacgcuaccgaacuggugcaaaauucuagcaucggcgagaucugcgacuccccgcaccagauucuugauggggaaaacuguacacugaucgacgcccuccugggagauccccagugcgacggcuuucagaauaaaaagugggaucuguucgucgagcggucuaaagccuauagcaacuguuacccuuaugacgugcccgauuacgcuucccuccgcucucugguugccagcuccgggacccuugaauuuaauaacgagagcuucaauuggacgggagugacccaaaacggcacaucuuccgcuugcauuagacggagcaauucuuccuuuuucagccgccugaacuggcucacccaucugaauuuuaaguauccugcccuuaacgucacaaugcccaacaaugagcaguucgacaagcuguacaucuggggcgugcaccauccugggaccgauaaagaccagauuuuucucuaugcgcagucuuccggaagaaucacgguuagcacaaagcggucccaacaggccgugauuccgaacaucggcucucgccccagaauccggaauauuccuagccgcaucuccauuuacuggaccaucgucaaacccggggauauucugcugaucaacagcacaggaaaucucaucgcuccuagaggcuacuucaagauucggucugggaaauccagcaucaugcgcucugacgcccccauuggaaaguguaagagcgaaugcaucaccccgaacggcuccauuccuaaugacaaacccuuucagaacgugaauaagaucaccuauggcgcuuguccuagauacgugaaacagucuacacugaaacuugccacggggaugcggaacguccccgagaagcaaacccgcggaaucuucggcgcgauugccggguuuaucgaaaauggaugggagggcaugguugaugggugguauggauucagacaccagaacagcgagggccggggccaggcugccgaccugaaguccacacaagcugccauugaucagaucaaugggaaacucaacagacugauuggaaagaccaaugaaaaguuccaccagaucgagaaagaauuuagcgagguggaaggccgcauucaggaccuugagaaguacguggaggauacaaaaaucgaccuguggucuuauaacgccgaacuccuggucgcucuggagaaccaacauaccaucgaucucacggacuccgaaaugaauaagcuguucgagaaaacaaagaagcagcuucgggaaaacgcggaggauauggggaauggaugcuuuaaaauuuaccacaagugugacaacgccugcaucggcagcauuagaaaugggaccuaugaucauaacguguaccgcgacgaggcucugaauaaccgguuccagaucaaaggcguugaacucaagucuggauacaaagacuggauucuguggaucuccuuugccaucagcugcuuccuucuguguguggcccuccugggcuuuauuaugugggcuugccagaaggggaauaucagauguaacauuugcaucuga

SEQ ID NO: 201947 - RNA, 1701 nt, Artificial Sequence; identical to SEQ ID NO: 201907
  derived and/or modified CDS sequence (opt5) from hemagglutinin__InfluenzaA__AGF44916

SEQ ID NO: 201948 - RNA, 1701 nt, Artificial Sequence
  derived and/or modified CDS sequence (opt5) from hemagglutinin__InfluenzaA__AGF44917
augaagaccaucauugcccugagcuacauccucugccugguguucgcucagaaaauucccggcaacgacaauuccacagccacgcuuugucuggggcaccaugcggucccuaacggaaccaucguuaagacaauuaccaaugagcaaaucgaagugacaaacgcuaccgagcucgugcagucuagcuccacaggcgaaaucugcaauucuccgcaccagauucuggauggggagaacuguacccuuaucgacgcccugcucggagauccccagugcgacggcuuucaaaauaaaaagugggaucuguucgucgaaagaagcaaagccuauuccaacuguuacccuuaugacgugcccgauuacgcuucucugcggagccucguugccuccagcgggacgcuggaguuuaauaacgagucuuucaauuggaccggagugacacagaacggcaccuccagcgcuugcauucgcggcucugacuccagcuuuuucucuagacuuaauuggcugacacaucucaacuuuaaguauccugcccugaaugucaccaugcccaacaacgaacaguucgauaagcuguacaucuggggagugcaccauccugggacggacaaagaucagauuuuucuguaugcgcaagccuccggccggaucacaguuagcaccaagcgcucccagcaggcugugauuccgaauaucgggucuagaccccggauccgcaacauuccuagcagaaucuccauuuacuggacaaucgucaaacccggagacauucuccugaucaauagcaccggcaaccugaucgccccucggggguacuucaagauucgcucuggaaaauccagcaucaugagaucugaugcucccauuggcaaguguaauagcgagugcaucaccccgaacggcuccauuccuaaugacaagcccuuucagaacgugaaucggaucacauauggggccuguccucgcuacgugaaacaaaacacgcucaagcuggcgaccggaaugagaaauguccccgaaaaacagacacggggcaucuucggggccauugcuggauuuaucgagaacggcugggaggggaugauggacggaugguauggcuuccgccaccaaaauucugaaggcagagggcaggccgcugaucuuaagagcacccaggccgccauugaccagaucaacggaaaacugaaucggcucauuggcaagacaaacgagaaauuccaccagaucgaaaaggaguuuuccgaaguugaggggcgcauucaagaucuggagaaguacguggaagacaccaaaaucgaucuuuggagcuauaacgcugagcugcucguggcgcuggaaaaucagcauacgaucgaccugacagauucugagaugaacaaacucuucgaaaagaccaagaaacagcugagagagaaugccgaggacaugggaaacggcugcuuuaagauuuaccacaagugugauaaugcuugcaucggguccauucggaacggcaccuauaaucaugacgucuacagagaugaagcccuuaacaaucgcuuccagaucaaaggaguggagcuuaagagcggcuacaaagacuggauucucuggaucucuuuugccaucuccugcuuccugcuuuguguugcucugcucggguuuauuaugugggccugccaaaagggaaacauccgguguaauauuugcaucuga

SEQ ID NO: 201949 - RNA, 1701 nt, Artificial Sequence; identical to SEQ ID NO: 201907
  derived and/or modified CDS sequence (opt5) from hemagglutinin__InfluenzaA__AGF44918

SEQ ID NO: 201950 - RNA, 1701 nt, Artificial Sequence
  derived and/or modified CDS sequence (opt5) from hemagglutinin__InfluenzaA__AGF44919
augaagaccaucauugcccugagcuacauccucugccugguguucgcucagaaacuucccggcaacgacaauuccacagccacgcugugucucgggcaccaugcggucccuaacggaaccauuguuaagacaaucaccaaugauagaauugaggugacaaacgcuaccgaacuggugcaaaauucuagcaucggcgagaucugcgacuccccgcaccagauucuugauggggaaaacuguacacugaucgacgcccuccugggagauccccagugcgacggcuuucagaauaaaaagugggaucuguucgucgagcggucuaaagccuauagcaacuguuacccuuaugacgugcccgauuacgcuucccuccgcucucugguugccagcuccgggacccuugaauuuaauaacgagagcuucaauugggcuggagugacgcaaaacggcaccucuuccgccugcauuagaggcagcaauucuuccuuuuucagccggcugaacuggcucacacaucugaauuuuaaguauccugcgcuuaacgucaccaugcccaacaaugagcaguucgacaagcuguacaucuggggagugcaccauccugggacagauaaagaccagauuuuucucuaugcccagucuuccggccgcaucaccguuagcacgaagagaucccaacaggcugugauuccgaacaucgggucucggccccgcaucagaaauauuccuagccggaucuccauuuacuggacaaucgucaaacccggagauauucugcugaucaacagcaccggcaaucucaucgccccucgcggguacuucaagauuagaucuggaaaauccagcaucaugcggucugacgcucccauuggcaaguguaagagcgaaugcaucacaccgaacggcuccauuccuaaugacaaacccuuucagaacgugaaucgcaucaccuauggggccuguccuagauacgugaagcagucuacccugaaacuugcgacaggaaugcggaacguccccgagaagcaaacgcgcggcaucuucggggccauugcuggauuuaucgaaaauggcugggaggggaugguugauggaugguauggcuucagacaccagaacagcgagggccgggggcaggccgcugaccugaaauccacccaagccgccauugaucagaucaauggaaagcucaacagacugauuggcaaaacaaaugaaaaguuccaccagaucgagaaggaauuuagcgagguggaagggcgcauucaggaccuugagaaauacguggaggauaccaagaucgaccuguggucuuauaacgcugaacuccuggucgcgcuggagaaccaacauacaaucgaucucaccgacuccgaaaugaauaaacuguucgagaagacgaaaaagcagcuucgggaaaacgccgaggauaugggaaauggcugcuuuaagauuuaccacaaaugugacaacgcuugcaucgggagcauuagaaauggcacauaugaucauuacguguaccgcgacgaggcccugaacaaucgguuccagaucaagggaguugaacucaaaucuggcuauaaggacuggauucuguggaucuccuuugccaucagcugcuuccuucuguguguggcucuccugggguuuauuaugugggccugccagaaaggaaacaucagauguaauauuugcaucuga

SEQ ID NO: 201951 - RNA, 1701 nt, Artificial Sequence; identical to SEQ ID NO: 201907
  derived and/or modified CDS sequence (opt5) from hemagglutinin__InfluenzaA__AGF44920

SEQ ID NO: 201952 - RNA, 1701 nt, Artificial Sequence; identical to SEQ ID NO: 201930
  derived and/or modified CDS sequence (opt5) from hemagglutinin__InfluenzaA__AGF44921

SEQ ID NO: 201953 - RNA, 1701 nt, Artificial Sequence
  derived and/or modified CDS sequence (opt5) from hemagglutinin__InfluenzaA__AGG13411
augaagaccaucauugcccugagcuacauccucugccugguguucgcucaggagcuucccggcaacgacgauuccacagccacgcugugucucgggcaccaugcggucccuaauggaaccauuguuaaaacaaucaccaacgacagaauugaagugacaaaugcuaccgagcuggugcaaucuagcuccacaggcgaaaucugcaacucuccgcaccagauccuugauggggagaauuguacccugauugacgcccuccugggagauccccagugcgacggcuuucagaacaagaaaugggaucuguucgucgaacggagcaaggcccauuccaauuguuauccuuacgacgugcccgauuaugcuucucuccgcagccugguugccuccagcgggacgcuugaguuuaacaaugagucuuucaacuggaccggagugacacaaaauggcaccuccagcgcuugcaucagacggucuaacaauuccuuuuucagccgccugaacuggcucacacaccugaauuuuaaauacccugcccuuaacgucaccaugcccaacaaugaacaguucgacaagcuguauauuuggggcgugcaucacccugggacggauaaggaccagaucuuucucuacgcgcaggccucuggaagaauuacaguuuccaccaaacggaaccaacagacagugaucccgaauauuggcagccgccccagaguccggaacaucccuucccgcgugucuaucuauuggaccauugugaagcccggggauauccugcugauuaauagcaccggaaaccucaucgcuccuagaggcuacuucaaaauucgguccggaaagagcucuaucaugcgcuccgacgcccccaucgggaaauguaauagcgcuugcauuacaccgaacggcucuaucccuaaugacaagcccuuucagaacgucaauagaauuacguacggcgccuguccucgguauguuaagcagaacacccugaaacuugcgacagggaugcgcaaugugcccgagaagcaaaccagaggaaucuucggcgccauugcuggguuuaucgaaaacggaugggagggcaugguggaugggugguacggauuccggcaccagaauagcgagggcagaggccaggccgcugaccugaaauccacacaagccgccaucgaucagauuaacgggaagcucaaccgccugaucggaaaaaccaaugaaaaguuccaucagauugagaaagaauuuucugaggucgaaggccggauccaggaccuugagaaguauguggaggauacgaagauugaccuguggagcuacaacgcugaacuccugguugcgcuggagaaucaacacacaaucgaucucaccgacuccgaaaugaacaaacuguucgagaagaccaaaaagcagcuuagagaaaaugccgaggauauggggaacggaugcuuuaaaauuuaucauaagugugacaaugcuugcaucggcagcauccgcaacgggacauacgaucacgacguguaucgggacgaggcccugaauaacagauuccagauuaagggcgucgaacucaaaucuggauacaaggauuggauccuguggauuuccuuugccaucagcugcuuccuucuguguguggcucuccugggcuuuauuaugugggccugccagaaagggaauauccgcuguaacaucugcauuuga

SEQ ID NO: 201954 - RNA, 1701 nt, Artificial Sequence
  derived and/or modified CDS sequence (opt5) from hemagglutinin__InfluenzaA__AGG13447
augaagaccaucauugcccugagcuacauccucugccugguguucgcucaggagcuucccggcaacgacgauuccacagccacgcugugucucgggcaccaugcggucccuaauggaaccauuguuaaaacaaucaccaacgacagaauugaagugacaaaugcuaccgagcuggugcaaucuagcuccacaggcgaaaucugcaacucuccgcaccagauccuugauggggagaauuguacccugauugacgcccuccugggagauccccagugcgacggcuuucagaacaagaaaugggaucuguucgucgaacggagcaaggcccauuccaauuguuauccuuacgacgugcccgauuaugcuucucuccgcagccugguugccuccagcgggacgcuugaguuuaacaaugagucuuucaacuggaccggagugacacaaaauggcaccuccagcgcuugcaucagacggucuaacaauuccuuuuucagccgccugaacuggcucacacaccugaauuuuaaauacccugcccuuaacgucaccaugcccaacaaugaacaguucgacaagcuguauauuuggggcgugcaucacccugggacggauaaggaccagaucuuucucuacgcgcaggccucuggaagaauuacaguuuccaccaaacggagccaacagacagugaucccgaacauuggcucccgccccagaguccggaauaucccuucucgcgugagcaucuauuggaccauugugaagcccggggauauccugcugauuaacuccaccggaaaucucaucgcuccuagaggcuacuucaaaauucggagcgggaagucuuccaucaugcgcagcgacgcccccaucggaaaauguaacucugcuugcauuacaccgaauggcagcaucccuaacgacaagcccuuucagaaugucaacagaauuacguacggcgccuguccucgguauguuaagcagaauacccugaaacuugcgacagggaugcgcaacgugcccgagaagcaaaccagaggaaucuucggcgccauugcuggguuuaucgaaaauggaugggagggcaugguggaugggugguacggauuccggcaccagaacuccgagggcagaggccaggccgcugaccugaaaucuacacaagccgccaucgaucagauuaaugggaagcucaaccgccugaucggaaaaaccaacgaaaaguuccaucagauugagaaagaauuuagcgaggucgaaggccggauccaggaccuugagaaguauguggaggauacgaagauugaccugugguccuacaaugcugaacuccugguugcgcuggagaaccaacacacaaucgaucucaccgacagcgaaaugaauaaacuguucgagaagacccagaaacagcuuagagaaaacgccgaggauauggggaauggaugcuuuaagauuuaucauaaaugugacaacgcuugcaucggcucuauccgcaaugggacauacgaucacgacguguaucgggacgaggcccugaacaauagauuccagauuaagggcgucgaacucaaguccggauacaaagauuggauccuguggauuagcuuugccaucucuugcuuccuucuguguguggcucuccugggcuuuauuaugugggccugccaaaaggggaacauccgcuguaauaucugcauuuga

SEQ ID NO: 201955 - RNA, 1701 nt, Artificial Sequence
  derived and/or modified CDS sequence (opt5) from hemagglutinin__InfluenzaA__AGG13459
augaagaccaucauugcccugagcuacauccucugccugguguucgcucagaaacuucccggcaacgacaauuccacagccacgcugugucucgggcaccaugcggucccuaacggaaccauuguuaagacaaucaccaaugauagaauugaggugacaaacgcuaccgaacuggugcaaaauucuagcaucggcgagaucugcgacuccccgcaccagauucuugauggggaaaacuguacacugaucgacgcccuccugggagauccccagugcgacggcuuucagaauaaaaagugggaucuguucgucgagcggucuaaagccuauagcaacuguuacccuuaugacgugcccgauuacgcuucccuccgcucucugguugccagcuccgggacccuugaauuuaauaacgagagcuucaauuggacgggagugacccaaaacggcacaucuuccgcuugcauuagacggagcaauucuuccuuuuucagccgccugaacuggcucacccaucugaauuuuaaguauccugcccuuaacgucacaaugcccaacaaugagcaguucgacaagcuguacaucuggggcgugcaccauccugggaccgauaaagaccagauuuuucucuaugcgcagucuuccggaagaaucacgguuagcacaaagcggucccaacaggccgugauuccgaacaucggcucucgccccagaauccggaauauuccuagccgcaucuccauuuacuggaccaucgucaaacccggggauauucugcugaucaacagcacaggaaaucucaucgcuccuagaggcuacuucaagauucggucugggaaauccagcaucaugcgcucugacgcccccauuggaaaguguaagagcgaaugcaucaccccgaacggcuccauuccuaaugacaaacccuuucagaacgugaauagaaucaccuauggcgcuuguccucgguacgugaagcagucuacacugaaacuugccacggggaugcgcaacguccccgagaagcaaaccagaggaaucuucggcgcgauugccggguuuaucgaaaauggaugggagggcaugguugaugggugguauggauuccggcaccagaacagcgagggcagaggccaggcugccgaccugaaauccacacaagcugccauugaucagaucaaugggaagcucaaccgccugauuggaaaaaccaaugaaaaguuccaccagaucgagaaggaauuuagcgagguggaaggccggauucaggaccuugagaaauacguggaggauacaaagaucgaccuguggucuuauaacgccgaacuccuggucgcucuggagaaccaacauaccaucgaucucacggacuccgaaaugaauaaacuguucgagaagaccaaaaagcagcuuagagaaaacgcggaggauauggggaauggaugcuuuaagauuuaccacaaaugugacaacgccugcaucggcagcauucgcaaugggacauaugaucaugacguguaccgggacgaggcucugaacaauagauuccagaucaagggcguugaacucaaaucuggauacaaggauuggauucuguggaucuccuuugccaucagcugcuuccuucuguguguggcccuccugggcuuuauuaugugggcuugccagaaagggaacauccgcuguaauauuugcaucuga

SEQ ID NO: 201956 - RNA, 1701 nt, Artificial Sequence
  derived and/or modified CDS sequence (opt5) from hemagglutinin__InfluenzaA__AGG13495
augaagaccaucauugcccugagcuacauccucugccugguguucgcucagaaacuucccggcaacgacaauuccacagccacgcugugucucgggcaccaugcggucccuaacggaaccauuguuaagacaaucaccaaugaucaaauugaggugacaaacgcuaccgaacuggugcagucuagcuccacaggcgagaucugcgacucuccgcaccagauccuugauggggaaaauuguacccugauugacgcccuccugggagauccccagugcgacggcuuucaaaacaaaaagugggaucuguucgucgagagaagcaaagccuauuccaauuguuacccuuaugacgugcccgauuacgcuucucuccggagccugguugccuccagcgggacgcuugaauuuaacaaugagucuuucaacuggaccggagugacacagaauggcaccuccagcgcuugcauccgcagaucugacuccagcuuuuucucucggcugaacuggcucacacaucugaauuuuaaguauccugcccuuaacgucaccaugcccaauaacgagcaguucgauaagcuguacauuuggggcgugcaccauccugggacggacaaagaucagaucuuucucuaugcgcaagccuccggacgcauuacaguuagcaccaagagaucccagcagucugugaucccgaacauuggcagccggccccgcaucagaaauaucccuucccggauuagcaucuacuggacaauugucaaacccggggacauccugcugauuaacucuaccggaaaucucaucgcuccucgcggcuacuucaagauccaguccgggaaaagcucuauuaugagaagcgacgcccccaucggaaaguguaacuccgaaugcauuaccccgaauggcucuaucccuaacgauaagcccuuucaaaaugugaaccggauuacauauggcgcuuguccucgcuacgugaaacagaauacgcugaaacuugccaccgggaugagaaacguccccgagaagcagacacggggaaucuucggcgcgaucgccggguuuauugaaaauggaugggagggcaugguugacgggugguauggauuccgccaccaaaacagcgagggcagaggccaggcugccgaucugaaguccacccaggcugccaucgaccagauuaaugggaaacucaaccggcugaucggaaagacaaaugaaaaauuccaccaaauugagaaggaauuuagcgagguggaaggcagaauccaggaucuugagaaguacguggaggacaccaaaauugaucuguggucuuauaacgccgaacuccuggucgcucuggagaaccagcauacgaucgaccucacagauuccgaaaugaauaagcuguucgagaaaaccaagaaacagcuucgcgaaaacgcggaggacauggggaauggaugcuuuaagaucuaccacaagugugauaacgccugcauuggcagcauccggaaugggaccuauaaccaugacguguacagagacgaggcucugaauaaccgcuuccaaauuaaaggcguugaacucaagucuggauacaaagauuggauccuguggauuuccuuugccaucagcugcuuccuucuguguguggcccuccugggcuuuaucaugugggcuugccagaaggggaauauucgguguaacaucugcauuuga

SEQ ID NO: 201957 - RNA, 1701 nt, Artificial Sequence; identical to SEQ ID NO: 201955
  derived and/or modified CDS sequence (opt5) from hemagglutinin__InfluenzaA__AGG13507

SEQ ID NO: 201958 - RNA, 1701 nt, Artificial Sequence
  derived and/or modified CDS sequence (opt5) from hemagglutinin__InfluenzaA__AGG13519
augaagaccaucauugcccugagcuacauccucugccugguguucgcucagaaacuucccggcaacgacaauuccacagccacgcugugucucgggcaccaugcggucccuaacggaaccauuguuaagacaaucaccaaugaucaaauugaggugacaaacgcuaccgaacuggugcagucuagcuccacaggcgagaucugcgacucuccgcaccagauccuugauggggaaaauuguacccugauugacgcccuccugggagauccccagugcgacggcuuucaaaacaaaaagugggaucuguucgucgagagaagcaaagccuauuccaauuguuacccuuaugacgugcccgauuacgcuucucuccggagccugguugccuccagcgggacgcuugaauuuaacaaugagucuuucaacuggaccggagugacacagaauggcaccuccagcgcuugcauccgcagaucugacuccagcuuuuucucucggcugaacuggcucacacaucugaauuuuaaguauccugcccuuaacgucaccaugcccaauaacgagcaguucgauaagcuguacauuuggggcgugcaccauccugggacggacaaagaucagaucuuucucuaugcgcaagccuccggacgcauuacaguuagcaccaagagaucccagcagucugugaucccgaacauuggcagccggccccgcaucagaaauaucccuucccggauuagcaucuacuggacaauugucaaacccggggacauccugcugauuaacucuaccggaaaucucaucgcuccucgcggcuacuucaagauccaguccgggaaaagcucuauuaugagaagcgacgcccccaucggaaaguguaacuccgaaugcauuaccccgaauggcucuaucccuaacgauaagcccuuucaaaaugugaaccggauuacauauggcgcuuguccucgcuacgugaaacagaauacgcugaaacuugccaccgggaugagaaacguccccgagaagcagacacggggaaucuucggcgcgaucgccggguuuauugaaaauggaugggagggcaugguugacgggugguauggauuccgccaccaaaacagcgagggcagaggccaggcugccgaucugaaguccacccaggcugccaucgaccagauuaaugggaaacucaaccggcugaucggaaagacaaaugaaaaauuccaccaaauugagaaggaauuuagcgagguggaaggcagagugcaggaucuugagaaguacgucgaggacaccaaaaucgaucuguggucuuauaacgccgaacuccugguggcucuggagaaccagcauacgauugaccucacagauuccgaaaugaauaagcuguucgagaaaaccaagaaacagcuucgcgaaaacgcggaggacauggggaauggaugcuuuaagaucuaccacaagugugauaacgccugcaucggcagcauucggaaugggaccuauaaccaugacguuuacagagacgaggcucugaauaaccgcuuccaaaucaaaggcguggaacucaagucuggauacaaagauuggauucuguggaucuccuuugccauuagcugcuuccuucugugugucgcccuccugggcuuuaucaugugggcuugccagaaggggaauauccgguguaacauuugcaucuga

SEQ ID NO: 201959 - RNA, 1701 nt, Artificial Sequence; identical to SEQ ID NO: 201955
  derived and/or modified CDS sequence (opt5) from hemagglutinin__InfluenzaA__AGG13531

SEQ ID NO: 201960 - RNA, 1701 nt, Artificial Sequence
  derived and/or modified CDS sequence (opt5) from hemagglutinin__InfluenzaA__AGG13543
augaagaccaucauugcccugagcuacauccucugccugguguucgcucagaaacuucccggcaacgacaauuccacagccacgcugugucucgggcaccaugcggucccuaacggaaccauuguuaagacaaucaccaaugauagaauugaggugacaaacgcuaccgaacuggugcaaaauucuagcaucggcgagaucugcgacuccccgcaccagauucuugauggggaaaacuguacacugaucgacgcccuccugggagauccccagugcgacggcuuucagaauaaaaagugggaucuguucgucgagcggucuaaagccuauagcaacuguuacccuuaugacgugcccgauuacgcuucccuccgcucucugguugccagcuccgggacccuugaauuuaauaacgagagcuucaauuggacgggagugacccaaaacggcacaucuuccgcuugcauuagacggagcaauucuuccuuuuucagccgccugaacuggcucacccaucugaauuuuaaguauccugcccuuaacgucacaaugcccaacaaugagcaguucgacaagcuguacaucuggggcgugcaccauccugggaccgauaaagaccagauuuuucucuaugcgcagucuuccggaagaaucacgguuagcacaaagcggucccaacaggccgugauuccgaacaucggcucucgccccagaauccggaauauuccuagccgcaucuccauuuacuggaccaucgucaaacccggggauauucugcugaucaacagcacaggaaaucucaucgcuccuagaggcuacuucaagauucggucugggaaauccagcaucaugcgcucugacgcccccauuggaaaguguaagagcgaaugcaucaccccgaacggcuccauuccuaaugacaaacccuuucagaacgugaauagaaucaccuauggcgcuuguccucgguacgugaagcagucuacacugaaacuugccacggggaugcgcaacguccccgagaagcaaaccagaggaaucuucggcgcgauugccggguuuaucgaaaauggaugggagggcaugguugaugggugguauggauuccggcaccagaacagcgagggcagaggccaggcugccgaccugaaauccacacaagcugccauugaucagaucaaugggaagcucaaccgccugauuggaaaaaccaaugaaaaguuccaccagaucgagaaggaauuuagcgagguggaaggccggauucaggacaucgagaaauacguggaggauacaaagaucgaccuuuggucuuauaacgccgaacugcucgucgcucuggagaaccaacauaccauugaucugacggacuccgaaaugaauaaacucuucgagaagaccaaaaagcagcugagagaaaacgcggaggauauggggaauggaugcuuuaagaucuaccacaaaugugacaacgccugcauuggcagcauccgcaaugggacauaugaucauaacguguaccgggacgaggcucuuaauaacagauuccagauuaagggcguugaacugaaaucuggauacaaggacuggauccucuggaucuccuuugccauuagcugcuuccugcuuuguguggcccugcucggcuuuaucaugugggcuugccagaaagggaauauucgcuguaacaucugcauuuga

SEQ ID NO: 201961 - RNA, 1701 nt, Artificial Sequence; identical to SEQ ID NO: 201955
  derived and/or modified CDS sequence (opt5) from hemagglutinin__InfluenzaA__AGG13555

SEQ ID NO: 201962 - RNA, 1701 nt, Artificial Sequence; identical to SEQ ID NO: 201955
  derived and/or modified CDS sequence (opt5) from hemagglutinin__InfluenzaA__AGG13567

SEQ ID NO: 201963 - RNA, 1701 nt, Artificial Sequence
  derived and/or modified CDS sequence (opt5) from hemagglutinin__InfluenzaA__AGG13591
augaagaccaucauugcccugagcuacauccucugccugguguucgcucagaaacuucccggcaacgacaauuccacagccacgcugugucucgggcaccaugcggucccuaacggaaccauuguuaagacaaucaccaaugauagaauugaggugacaaacgcuaccgaacuggugcaaaauucuagcaucggcgagaucugcgacuccccgcaccagauucuugauggggaaaacuguacacugaucgacgcccuccugggagauccccagugcgacggcuuucagaauaaaaagugggaucuguucgucgagcggucuaaagccuauagcaacuguuacccuuaugacgugcccgauuacgcuucccuccgcucucugguugccagcuccgggacccuugaauuuaauaacgagaauuucaacuggacgggagugacccaaaauggcacaagcucugcuugcauuagacgguccaacagcuccuuuuucucucgccugaauuggcucacccaucugaacuuuaaguauccugcccuuaacgucacaaugcccaauaacgagcaguucgacaagcuguacaucuggggcgugcaccauccugggaccgauaaagaccagauuuuucucuaugcgcagagcucuggaagaaucacgguuuccacaaagcggagccaacaggccgugauuccgaauaucggcucccgccccagaauccggaacauuccuucucgcaucagcauuuacuggaccaucgucaaacccggggauauucugcugaucaauuccacaggaaaccucaucgcuccuagaggcuacuucaagauucggagcgggaaaucuuccaucaugcgcagcgacgcccccauuggaaaguguaagucugaaugcaucaccccgaauggcagcauuccuaacgacagacccuuucagaaugugaaccggaucaccuauggcgcuuguccucgcuacgugaaacaguccacacugaagcuggccacggggaugagaaauguccccgagaaacaaacccggggaaucuucggcgcgauugccggguuuaucgaaaacggaugggagggcaugguugaugggugguauggauucagacaccaaaauucugagggccgcggccaggcugccgaccuuaagagcacacaggcugccauugaucagaucaacgggaaacucaaucggcugauuggaaagaccaacgaaaaauuccaccagaucgagaaggaauuuuccgagguggaaggccgcauucaggaccuugagaaguacguggaggauacaaaaaucgaccuguggagcuauaacgccgaacuccuggucgcucuggagaaucaacauaccaucgaucucacggacucugaaaugaacaagcuguucgagaaaacaaagaaacagcuuagagaaaaugcggaggauauggggaacggaugcuuuaagauuuaccacaagugugacaaugccugcaucggcuccauucggaacgggaccuaugaucaugacguguacagagacgaggcucugaauaaccgcuuccagaucaaaggcguugaacucaagagcggauacaaagauuggauucuguggaucucuuuugccaucuccugcuuccuucuguguguggcccuccugggcuuuauuaugugggcuugccagaaggggaauauccgguguaacauuugcaucuga

SEQ ID NO: 201964 - RNA, 1701 nt, Artificial Sequence
  derived and/or modified CDS sequence (opt5) from hemagglutinin__InfluenzaA__AGG13615
augaagaccaucauugcccugagcuacauccucugccugguguucgcucagaaaauucccggcaacgacaauuccacagccacgcuuugucuggggcaccaugcggucccuaacggaaccaucguuaagacaauuaccaaugauagaaucgaggugacaaacgcuaccgaacucgugcaaaauucuagcaucggcgagauuugcgacuccccgcaccagauccuggauggggaaaacuguacacuuauugacgcccugcucggagauccccagugcgacggcuuucagaauaaaaagugggaucuguucgucgagcggucuaaagccuauagcaacuguuacccuuaugacgugcccgauuacgcuucccugcgcucucucguugccagcuccgggacccuggaauuuaauaacgagagcuucaauuggacgggagugacccaaaacggcacaucuuccgcuugcaucagacggagcaauucuuccuuuuucagccgccuuaacuggcugacccaucucaauuuuaaguauccugcccugaacgucacaaugcccaacaaugagcaguucgacaaacuuuacauuuggggcgugcaccauccugggaccgauaaagaccagaucuuucuguaugcgcagucuuccggaagaauuacgguuagcacaaagcggucccaacaggccgugaucccgaacaucggcucucgcccccggauuagaaauaucccuagccgcauuuccaucuacuggaccauugucaaacccggggauauccuccugaucaacagcacaggaaaucugauugcuccuagaggcuacuucaagauccggucugggaaauccagcauuaugcgcucugacgcccccaucggaaaguguaagagcgaaugcauuaccccgaacggcuccaucccuucugacaaacccuuucagaaugugaacagaaucaccuauggcgcuuguccucgguacgugaagcagagcacacucaaacuggccacggggaugcgcaauguccccgagaagcaaaccagaggaauuuucggcgcgaucgccggguuuauugaaaacggaugggagggcaugguugaugggugguauggauuccggcaccaaaauuccgagggcagaggccaggcugccgaccuuaaaagcacacaggcugccaucgaucagauuaacgggaagcugaaucgccucaucggaaaaaccaacgaaaaguuccaccagauugagaaggaauuuucugagguggaaggccggauccaggaccuggagaaauacguggaggauacaaagaucgaccuuugguccuauaaugccgaacugcucgucgcucuggagaaccaacauaccauugaucugacggacagcgaaaugaacaaacucuucgagaagacaaagaagcagcugagagaaaaugcggaggauauggggaacggaugcuuuaagaucuaccacaaaugugacaaugccugcauuggcucuauccgcaacgggaccuaugaucaugacguguaccgggacgaggcucuuaauaacagauuccagauuaagggcguugaacugaaauccggauacaaggauuggauccucuggaucagcuuugccauuuccugcuuccugcuuuguguggcccugcucggcuuuaucaugugggcuugccagaaagggaauauucgcuguaacaucugcauuuga

SEQ ID NO: 201965 - RNA, 1701 nt, Artificial Sequence; identical to SEQ ID NO: 201963
  derived and/or modified CDS sequence (opt5) from hemagglutinin__InfluenzaA__AGG13627

SEQ ID NO: 201966 - RNA, 1701 nt, Artificial Sequence
  derived and/or modified CDS sequence (opt5) from hemagglutinin__InfluenzaA__AGG13639
augaagaccaucauugcccugagcuacauccucugccugguguucgcucagaaacuucccggcaacgacaauuccacagccacgcugugucucgggcaccaugcggucccuaacggaaccauuguuaagacaaucaccaaugauagaauugaggugacaaacgcuaccgaacuggugcaaaauucuagcaucggcgagaucugcgacuccccgcaccagauucuugauggggaaaacuguacacugaucgacgcccuccugggagauccccagugcgacggcuuucagaauaaaaagugggaucuguucgucgagcggucuaaagccuauagcaacuguuacccuuaugacgugcccgauuacgcuucccuccgcucucugguugccagcuccgggacccuugaauuuaauaacgagagcuucaauugggcuggagugacgcaaaacggcaccucuuccgccugcauuagaggcagcaauucuuccuuuuucagccggcugaacuggcucacacaucugaauuuuaaguauccugcgcuuaacgucaccaugcccaacaaugagcaguucgacaagcuguacaucuggggagugcaccauccugggacaaacaaagaucagauuuuucucuaugcccagucuuccggccgcaucaccguuagcacgaagagaucccaacaggcugugauuccgaauaucgggucucggccccgcaucagaaacauuccuagccggaucuccauuuacuggacaaucgucaaacccggagacauucugcugaucaauagcaccggcaaccucaucgccccucgcggguacuucaagauuagaucuggaaaauccagcaucaugcggucugaugcucccauuggcaaguguaagagcgaaugcaucacaccgaauggcuccauuccuaacgacaaacccuuucagaaugugaaccgcaucaccuauggggccuguccuagauacgugaagcagucuacccugaaacuugcgacaggaaugcggaauguccccgagaagcaaacgcgcggcaucuucggggccauugcuggauuuaucgaaaacggcugggaggggaugguugacggaugguauggcuucagacaccagaauagcgagggccgggggcaggccgcugaucugaaauccacccaagccgccauugaccagaucaacggaaagcucaauagacugauuggcaaaacaaacgaaaaguuccaccagaucgagaaggaauuuagcgagguggaagggcgcauucaggaucuugagaaauacguggaggacaccaagaucgaucuguggucuuauaacgcugaacuccuggucgcgcuggagaaucaacauacaaucgaccucaccgauuccgaaaugaacaaacuguucgagaagacgaaaaagcagcuucgggaaaaugccgaggacaugggaaacggcugcuuuaagauuuaccacaaaugugauaaugcuugcaucgggagcauuagaaacggcacauaugaccaugauguguaccgcgacgaggcccugaauaaccgguuccagaucaagggaguugaacucaaaucuggcuacaaggacuggauucuguggaucuccuuugccaucagcugcuuccuucuguguguggcucuccugggguuuauuaugugggccugccagaaaggaaauaucagauguaacauuugcaucuga

SEQ ID NO: 201967 - RNA, 1701 nt, Artificial Sequence; identical to SEQ ID NO: 201956
  derived and/or modified CDS sequence (opt5) from hemagglutinin__InfluenzaA__AGG13651

SEQ ID NO: 201968 - RNA, 1701 nt, Artificial Sequence; identical to SEQ ID NO: 201955
  derived and/or modified CDS sequence (opt5) from hemagglutinin__InfluenzaA__AGG13663

SEQ ID NO: 201969 - RNA, 1701 nt, Artificial Sequence; identical to SEQ ID NO: 201956
  derived and/or modified CDS sequence (opt5) from hemagglutinin__InfluenzaA__AGG13675

SEQ ID NO: 201970 - RNA, 1701 nt, Artificial Sequence; identical to SEQ ID NO: 201955
  derived and/or modified CDS sequence (opt5) from hemagglutinin__InfluenzaA__AGG13687

SEQ ID NO: 201971 - RNA, 1701 nt, Artificial Sequence; identical to SEQ ID NO: 201956
  derived and/or modified CDS sequence (opt5) from hemagglutinin__InfluenzaA__AGG13711

SEQ ID NO: 201972 - RNA, 1701 nt, Artificial Sequence; identical to SEQ ID NO: 201955
  derived and/or modified CDS sequence (opt5) from hemagglutinin__InfluenzaA__AGG13723

SEQ ID NO: 201973 - RNA, 1701 nt, Artificial Sequence; identical to SEQ ID NO: 201955
  derived and/or modified CDS sequence (opt5) from hemagglutinin__InfluenzaA__AGG13735

SEQ ID NO: 201974 - RNA, 1701 nt, Artificial Sequence; identical to SEQ ID NO: 201955
  derived and/or modified CDS sequence (opt5) from hemagglutinin__InfluenzaA__AGG13747

SEQ ID NO: 201975 - RNA, 1701 nt, Artificial Sequence
  derived and/or modified CDS sequence (opt5) from hemagglutinin__InfluenzaA__AGG13759
augaagaccaucauugcccugagcuacauccucugccugguguucgcucaggagcuucccggcaacgacgauuccacagccacgcugugucucgggcaccaugcggucccuaauggaaccauuguuaaaacaaucaccaacgacagaauugaagugacaaaugcuaccgagcuggugcaaucuagcuccacaggcgaaaucugcaacucuccgcaccagauccuugauggggagaauuguacccugauugacgcccuccugggagauccccagugcgacggcuuucagaacaagaaaugggaucuguucgucgaacggagcaaggcccauuccaauuguuauccuuacgacgugcccgauuaugcuucucuccgcagccugguugccuccagcgggacgcuugaguuuaacaaugagucuuucaacuggaccggagugacacaaaauggcaccuccagcgcuugcaucagacggucuaacaauuccuuuuucagccgccugaacuggcucacacaccugaauuuuaaauacccugcccuuaacgucaccaugcccaacaaugaacaguucgacaagcuguauauuuggggcgugcaucacccugggacggauaaggaccagaucuuucucuacgcgcaggccucuggaagaauuacaguuuccaccaaacggagccaacagacagugaucccgaacauuggcucccgccccagaguccggaauaucccuucucgcgugagcaucuauuggaccauugugaagcccggggauauccugcugauuaacuccaccggaaaucucaucgcuccuagaggcuacuucaaaauucggagcgggaagucuuccaucaugcgcagcgacgcccccaucggaaaauguaacucugcuugcauuacaccgaauggcagcaucccuaacgacaagcccuuucagaaugucaacagaauuacguacggcgccuguccucgguauguuaagcagaauacccugaaacuugcgacagggaugcgcaacgugcccgagaagcaaaccagaggaaucuucggcgccauugcuggguuuaucgaaaauggaugggagggcaugguggaugggugguacggauuccggcaccagaacuccgagggcagaggccaggccgcugaccugaaaucuacacaagccgccaucgaucagauuaaugggaagcucaaccgccugaucggaaaaaccaacgaaaaguuccaucagauugagaaagaauuuagcgaggucgaaggccggauccaggaccuugagaaguauguggaggauacgaagauugaccugugguccuacaaugcugaacuccugguugcgcuggagaaccaacacacaaucgaucucaccgacagcgaaaugaauaaacuguucgagaagaccaaaaagcagcuuagagaaaacgccgaggauauggggaauggaugcuuuaaaauuuaucauaagugugacaacgcuugcaucggcucuauccgcaaugggacauacgaucacgacguguaucgggacgaggcccugaacaauagauuccagauuaagggcgucgaacucaaauccggauacaaggauuggauccuguggauuagcuuugccaucucuugcuuccuucuguguguggcucuccugggcuuuauuaugugggccugccagaaagggaacauccgcuguaauaucugcauuuga

SEQ ID NO: 201976 - RNA, 1701 nt, Artificial Sequence
  derived and/or modified CDS sequence (opt5) from hemagglutinin__InfluenzaA__AGG13771
augaagaccaucauugcccugagcuacauccucugccugguguucgcucagaaacuucccggcaacgacaauuccacagccacgcugugucucgggcaccaugcggucccuaacggaaccauuguuaagacaaucaccaaugaucaaauugaggugacaaacgcuaccgaacuggugcagucuagcuccacaggcgagaucugcgacucuccgcaccagauccuugauggggaaaauuguacccugauugacgcccuccugggagauccccagugcgacggcuuucaaaacaaaaagugggaucuguucgucgagagaagcaaagccuauuccaauuguuacccuuaugacgugcccgauuacgcuucucuccggagccugguugccuccagcgggacgcuugaauuuaacaaugagucuuucaacuggaccggagugacacagaauggcaccuccagcgcuugcauccgcagaucugacuccagcuuuuucucucggcugaacuggcucacacaucugaauuuuaaguauccugcccuuaacgucaccaugcccaauaacgagcaguucgauaagcuguacauuuggggcgugcaccauccugggacggacaaagaucagaucuuucucuaugcgcaagccuccggacgcauuacaguuagcaccaagagaucccagcagucugugaucccgaacauuggcagccggccccgcaucagaaauaucccuucccggauuagcaucuacuggacaauugucaaacccggggacauccugcugauuaacucuaccggaaaucucaucgcuccucgcggcuacuucaagauccaguccgggaaaagcucuauuaugagaagcgacgcccccaucggaaaguguaacuccgaaugcauuaccccgaauggcucuaucccuaacgauaagcccuuucaaaaugugaaccggauuacauauggcgcuuguccucgcuacgugaaacagaauacgcugaaacuugccaccgggaugagaaacguccccgagaagcagacacggggaaucuucggcgcgaucgccggguuuauugaaaauggaugggagggcaugguugacgggugguauggauuccgccaccaaaacagcgagggcagaggccaggcugccgaucugaaguccacccaggcugccaucgaccagauuaaugggaaacucaaccggcugaucggaaagacaaaugaaaaauuccaccaaauugagaaggaauuuagcgagguggaaggcagaauccaggaucuugagaaguacguggaggacaacaaaauugaucuguggucuuauaacgccgaacuccuggucgcucuggagaaucagcauaccaucgaccucacggauuccgaaaugaacaagcuguucgagaaaacaaagaaacagcuucgcgaaaaugcggaggacauggggaacggaugcuuuaagaucuaccacaagugugauaaugccugcauuggcagcauccggaacgggaccuauaaucaugacguguacagagacgaggcucugaacaaucgcuuccaaauuaaaggcguugaacucaagucuggauacaaagauuggauccuguggauuuccuuugccaucagcugcuuccuucuguguguggcccuccugggcuuuaucaugugggcuugccagaaggggaacauucgguguaauaucugcauuuga

SEQ ID NO: 201977 - RNA, 1701 nt, Artificial Sequence
  derived and/or modified CDS sequence (opt5) from hemagglutinin__InfluenzaA__AGG13783
augaagaccaucauugcccugagcuacauccucugccugguguucgcucagaaacuucccggcaacgacaauuccacagccacgcugugucucgggcaccaugcggucccuaacggaaccauuguuaagacaaucaccaaugaucaaauugaggugacaaacgcuaccgaacuggugcaaaauucuagcaugggcgagaucugcgacuccccgcaccagauccuugauggggaaaacuguacacugauugacgcccuccugggagauccccagugcgacggcuuucagaauaaaaagugggaucuguucgucgagagaucuaaagccuauagcaacuguuacccuuaugacgugcccgauuacgcuucccuccggucucugguugccagcuccgggacccuugaauuuaauaacgagagcuucaauugggcuggagugacgcagaacggcaccucuuccgccugcauccgcggcagcaauucuuccuuuuucagcagacugaacuggcucacacaucugaauuuuaaguauccugcgcuuaacgucaccaugcccaacaaugagcaguucgacaagcuguacauuuggggagugcaccauccugggacagauaaagaccagaucuuucucuaugcccaaucuuccggccggauuaccguuagcacgaagcgcucccagcaggcugugaucccgaacauugggucuagaccccggauccgcaaugucccuagcagaaucuccauuuacuggacaaucgugaaacccggagauauucugcugaucaacagcaccggcaaucucauugccccucggggguacuucaagauccgcucuggaaaauccagcaucaugagaucugacgcucccauuggcaaguguaagagcgaaugcaucacaccgaacggcuccauuccuaaugacaaacccuuucagaacgugaaucggaucaccuauggggccuguccucgcuacgucaagcaaucuacccugaaacuugcgacaggaaugagaaacguucccgagaagcagacgcggggcauuuucggggccaucgcuggauuuaucgaaaauggcugggaggggaugguggauggaugguauggcuuccgccaccagaacagcgagggcagagggcaagccgcugaccugaaauccacccaggccgccauugaucagaucaauggaaagcucaaccggcugauuggcaaaacaaaugaaaaguuccaccagaucgagaaggaauuuagcgagguggaagggcgcauucaagaccuugagaaauacgucgaggauaccaagaucgaccuguggucuuauaacgcugaacuccugguggcgcuggagaaccagcauacaauugaucucaccgacuccgaaaugaauaaacuguucgagaagacgaaaaagcagcuuagagaaaacgccgaggauaugggaaauggcugcuuuaagaucuaccacaaaugugacaacgcuugcaucgggagcauucggaauggcacauaugaucaugacguuuacagagacgaggcccugaacaaucgcuuccagaucaagggaguggaacucaaaucuggcuacaaggauuggauucuguggaucuccuuugccauuagcugcuuccuucugugugucgcucuccugggguuuaucaugugggccugccaaaaaggaaacauccgguguaauauuugcaucuga

SEQ ID NO: 201978 - RNA, 1701 nt, Artificial Sequence; identical to SEQ ID NO: 201956
  derived and/or modified CDS sequence (opt5) from hemagglutinin__InfluenzaA__AGG13795

SEQ ID NO: 201979 - RNA, 1701 nt, Artificial Sequence; identical to SEQ ID NO: 201907
  derived and/or modified CDS sequence (opt5) from hemagglutinin__InfluenzaA__AGG13807

SEQ ID NO: 201980 - RNA, 1701 nt, Artificial Sequence; identical to SEQ ID NO: 201956
  derived and/or modified CDS sequence (opt5) from hemagglutinin__InfluenzaA__AGG13819

SEQ ID NO: 201981 - RNA, 1701 nt, Artificial Sequence; identical to SEQ ID NO: 201956
  derived and/or modified CDS sequence (opt5) from hemagglutinin__InfluenzaA__AGG13831

SEQ ID NO: 201982 - RNA, 1701 nt, Artificial Sequence; identical to SEQ ID NO: 201955
  derived and/or modified CDS sequence (opt5) from hemagglutinin__InfluenzaA__AGG13855

SEQ ID NO: 201983 - RNA, 1701 nt, Artificial Sequence
  derived and/or modified CDS sequence (opt5) from hemagglutinin__InfluenzaA__AGG13867
augaagaccaucauugcccugagcuacauccucugccugguguucgcucagaaacuucccggcaacgacaauuccacagccacgcugugucucgggcaccaugcggucccuaacggaaccauuguuaagacaaucaccaaugauagaauugaggugacaaacgcuaccgaacuggugcaaaauucuagcaucggcaaaaucugcgacuccccgcaccagauucuugauggggagaacuguacacugauggacgcccuccugggagauccccagugcgacggcuuucagaauaagaaaugggaucuguucgucgaacggucuaaggccuauagcaacuguuacccuuaugacgugcccgauuacgcuucccuccgcucucugguugccagcuccgggacccuugaguuuaauaacgagagcuucaauuggacgggagugacccaaaacggcacaucuuccgcuugcaucagacggagcaauucuuccuuuuucagccgccugaacuggcucacccaucugaauuuuaaguauccugcccuuaacgucacaaugcccaacaaugaacaguucgacaaacuguacauuuggggcgugcaccauccugggaccgauaaggaccagaucuuucucuaugcgcagucuuccggaagaauuacgguuagcacaaaacggucccaacaggccgugaucccgaacauuggcucucgccccagaauccggaauaucccuagccgcauuuccaucuacuggaccauugucaagcccggggauauccugcugauuaacagcacaggaaaucucaucgcuccuagaggcuacuucaaaauccggucugggaaguccagcauuaugcgcucugacgcccccaucggaaaguguaaaagcgagugcauuaccccgaacggcuccaucccuaaugacaagcccuuucagaacgugaauagaauuaccuauggcgcuuguccucgguacgugaaacagucuacacugaaacuugccacggggaugcgcaacguccccgaaaaacaaaccagaggaaucuucggcgcgaucgccggguuuauugagaauggaugggaaggcaugguugaugggugguauggauuccggcaccagaacagcgagggcagaggccaggcugccgaccugaaguccacacaagcugccaucgaucagauuaaugggaaacucaaccgccugaucggaaagaccaaugagaaguuccaccagauugaaaaagaguuuagcgaaguggagggccggauccaggaccuugaaaaguacguggaggauacaaaaauugaccuguggucuuauaacgccgagcuccuggucgcucuggaaaaccaacauaccaucgaucucacggacuccgagaugaauaagcuguucgaaaagacaaagaagcagcuuagagagaacgcggaagauauggggaauggaugcuuuaaaaucuaccacaagugugacaacgccugcauuggcagcauccgcaaugggaccuaugaucauaacguguaccgggacgaggcucugaauaacagauuccagauuaaaggcguugagcucaagucuggauacaaagacuggauccuguggauuuccuuugccaucagcugcuuccuucuguguguggcccuccugggcuuuaucaugugggcuugccagaaggggaauauucgcuguaacaucugcauuuga

SEQ ID NO: 201984 - RNA, 1701 nt, Artificial Sequence; identical to SEQ ID NO: 201955
  derived and/or modified CDS sequence (opt5) from hemagglutinin__InfluenzaA__AGG13879

SEQ ID NO: 201985 - RNA, 1701 nt, Artificial Sequence; identical to SEQ ID NO: 201955
  derived and/or modified CDS sequence (opt5) from hemagglutinin__InfluenzaA__AGG13891

SEQ ID NO: 201986 - RNA, 1701 nt, Artificial Sequence
  derived and/or modified CDS sequence (opt5) from hemagglutinin__InfluenzaA__AGG13903
augaagaccaucauugcccugagcuacauccucugccugguguucgcucagaaacuucccggcaacgacaauuccacagccacgcugugucucgggcaccaugcggucccuaacggaaccauuguuaagacaaucaccaaugaucaaauugaggugacaaacgcuaccgaacuggugcagucuagcuccacaggcgagaucugcgacucuccgcaccagauccuugauggggaaaauuguacccugauugacgcccuccugggagauccccagugcgacggcuuucaaaacaaaaagugggaucuguucgucgagagaagcaaagccuauuccaauuguuacccuuaugacgugcccgauuacgcuucucuccggagccugguugccuccagcgggacgcuugaauuuaacaaugagucuuucaacuggaccggagugacacagaauggcaccuccagcgcuugcauccgcagaucugacuccagcuuuuucucucggcugaacuggcucacacaucugaauuuuaaguauccugcccuuaacgucaccaugcccaauaacgagcaguucgauaagcuguacauuuggggcgugcaccauccugggacggacaaagaucagaucuuucucuaugcgcaagccuccggacgcauuacaguuagcaccaagagaucccagcagucugugcugccgaacaucggcagccggccccgcauuagaaauaucccuucccggaucagcauuuacuggacaaucgucaaacccggggacauucugcucaucaacucuaccggaaaucugauugcuccucgcggcuacuucaagauccaguccgggaaaagcucuaucaugagaagcgacgcccccauuggaaaguguaacuccgaaugcaucaccccgaauggcucuauuccuaacgauaagcccuuucaaaaugugaaccggaucacauauggcgcuuguccucgcuacgugaaacagaauacgcuuaagcuggccaccgggaugagaaacguccccgagaaacagacacggggaauuuucggcgcgaucgccggguuuaucgaaaauggaugggagggcaugguugacgggugguauggauuccgccaccaaaacagcgagggcagaggccaggcugccgaucucaaguccacccaggcugccauugaccagaucaaugggaaacugaaccggcuuauuggaaagacaaaugaaaaauuccaccaaaucgagaaggaauuuagcgagguggaaggccgcauucaggaucuggagaaguacguggaggacaccaaaaucgaucucuggucuuauaacgccgaacugcuggucgcucucgagaaccagcauacgauugaccugacagauuccgaaaugaauaaacuuuucgagaagaccaagaaacagcugagagaaaacgcggaggacauggggaauggaugcuuuaagaucuaccacaagugugauaacgccugcaucggcagcauucggaaugggaccuauaaccaugacguguacagagacgaggcucucaauaaccgcuuccaaaucaaaggcguugaacugaagucuggauacaaagauuggauucuuuggaucuccuuugccauuagcugcuuccugcucuguguggcccugcugggcuuuaucaugugggcuugccagaaggggaauauccgguguaacauuugcaucuga

SEQ ID NO: 201987 - RNA, 1701 nt, Artificial Sequence; identical to SEQ ID NO: 201955
  derived and/or modified CDS sequence (opt5) from hemagglutinin__InfluenzaA__AGG13927

SEQ ID NO: 201988 - RNA, 1701 nt, Artificial Sequence; identical to SEQ ID NO: 201963
  derived and/or modified CDS sequence (opt5) from hemagglutinin__InfluenzaA__AGG13939

SEQ ID NO: 201989 - RNA, 1701 nt, Artificial Sequence
  derived and/or modified CDS sequence (opt5) from hemagglutinin__InfluenzaA__AGG13962
augaaggccauccuggugguccuccuguacaccuucgcuacagccaacgcggacacgcuuugcauuggcuaucacgcuaauaacagcaccgauacaguugacaccgugcuggagaaaaaugugacagucacccauuccgugaaccuccuggaagauaagcacaaugggaaacuuuguaagcugagaggaguugcuccccuccaucugggcaaaugcaacaucgccggguggauucugggaaauccugagugugaaucucucagcacagccuccucuuggagcuacaucguggagaccuccucuagcgacaacggcacgugcuauccgggggauuuuauuaauuacgaagaacugcgggagcagcuuuccagcgucucuuccuucgaaggauuugagaucuuccccaagaccagcucuuggccuaaccacgacuccaauaagggcgugacagccgcuuguccccaugccggcgcgaaaucuuuuuauaagaaccugaucuggcucguuaaaaaggggaauagcuacccuaaacuguccaagagcuauauuaacgauaagggaaaagaagugcuuguccuguggggcauccaccaccccuccaccacagccgaccaacagucucucuaccagaaugcugaugccuacguguucguggggaccagccgcuauuccaagaaauuuaagccugagauugcuaucagaccgaaaguccgggaccaggagggacgcaugaacuacuauuggacgcugauugaacccggcgauaagaucacauucgaggccaccgggaaccugguugugccuagauacgcguuugccauggaacggaaugcugagagcggaauuaucaucucugacacacccgugcaugauugcaacaccaccugucaaacaccugaaggcgccauuaauacgucccuccccuuccagaacauccacccgauuaccaucggcaaaugcccuaaguaugucaagagcacaaaacugcgccuugcuaccgggcugagaaaugugcccucuauucagagccggggacucuuuggcgccaucgccggguucaucgagggaggcuggacagggaugguugacggaugguacggcuaucaucaccagaacgagcaaggcuccggguacgcugcggaccugaagucuacccagaaugccauugauaaaaucacgaacaaggugaauagcgucauugagaaaaugaacacacaguuuaccgcugugggaaaggaguucaaucaccuugaaaagcgcaucgagaaccugaauaaaaagguugacgauggcuuccucgacauuuggaccuacaacgccgaacugcuggugcuccuggagaaugagagaacacuugauuaucaugacuccaacgucaaaaaccuguacgaaaaggugcggaaucagcucaaaaacaaugccaaggagaucgggaacggauguuuugaguucuaucacaagugcgauaauaccuguauggaaagcgucaaaaacggcacauacgacuauccuaaguacucugaagaggcuaaacugaaucgcgagaagaucgauggggugaaacuugaauccacgagaauuuaucaaauccuggccauuuacagcaccguugcgucuucccucgugcuggucgugagccugggcgcuaucuccuuuuggaugugcucuaacggaagccuccagugccggauuuguaucuga

SEQ ID NO: 201990 - RNA, 1701 nt, Artificial Sequence; identical to SEQ ID NO: 201955
  derived and/or modified CDS sequence (opt5) from hemagglutinin__InfluenzaA__AGG13973

SEQ ID NO: 201991 - RNA, 1701 nt, Artificial Sequence; identical to SEQ ID NO: 201955
  derived and/or modified CDS sequence (opt5) from hemagglutinin__InfluenzaA__AGG13985

SEQ ID NO: 201992 - RNA, 1701 nt, Artificial Sequence; identical to SEQ ID NO: 201955
  derived and/or modified CDS sequence (opt5) from hemagglutinin__InfluenzaA__AGG13997

SEQ ID NO: 201993 - RNA, 1701 nt, Artificial Sequence; identical to SEQ ID NO: 201955
  derived and/or modified CDS sequence (opt5) from hemagglutinin__InfluenzaA__AGG14009

SEQ ID NO: 201994 - RNA, 1701 nt, Artificial Sequence
  derived and/or modified CDS sequence (opt5) from hemagglutinin__InfluenzaA__AGG14021
augaagaccaucauugcccugagcuacauccucugccugguguucgcucaggagcuucccggcaacgacgauuccacagccacgcugugucucgggcaccaugcggucccuaauggaaccauuguuaaaacaaucaccaacgaccaaauugaagugacaaaugcuaccgagcuggugcagucuagcuccacaggcgaaaucugcaacucuccgcaccagauccuugauggggagaauuguacccugauugacgcccuccugggagauccccagugcgacggcuuucaaaacaagaaaugggaucuguucgucgaaagaagcaaggcccauuccaauuguuauccuuacgacgugcccgauuaugcuucucuccggagccugguugccuccagcgggacgcuugaguuuaacaaugagucuuucaacuggaccggagugacacagaauggcaccuccagcgcuugcauccgcagaucuaacaauuccuuuuucagccggcugaacuggcucacacaccugaauuuuaaauacccugcccuuaacgucaccaugcccaacaaugaacaguucgacaagcuguauauuuggggcgugcaucacccugggacggauaaggaccagaucuuucucuacgcgcaagccucuggacgcauuacaguuuccaccaaaagaagccagcaggcugugaucccgaacauuggcucccggccccgcgucagaaauaucccuucucgggugagcaucuauuggacaauugugaagcccggggauauccugcugauuaacuccaccggaaaucucaucgccccucgcggcuacuucaaaauuagaagcgggaagucuuccaucaugcggagcgacgcucccaucggaaaauguaacucugccugcauuaccccgaauggcagcaucccuaacgacaagcccuuucagaaugucaaccgcauuacauacggcgcguguccuagauauguuaagcaaaauacgcugaaacuugccaccgggaugcggaacgugcccgagaagcagacacgcggaaucuucggcgcuauugccggguuuaucgaaaauggaugggagggcaugguggaugggugguacggauucagacaccagaacuccgagggccggggccaagcugccgaccugaaaucuacccaggccgcuaucgaucagauuaaugggaagcucaacagacugaucggaaaaacaaacgaaaaguuccaucagauugagaaagaauuuagcgaggucgaaggccgcauccaagaccuugagaaguauguggaggauaccaagauugaccugugguccuacaaugcggaacuccugguugcccuggagaaccagcacacgaucgaucucacagacagcgaaaugaauaaacuguucgagaagaccaaaaagcagcuucgggaaaacgcugaggauauggggaauggaugcuuuaaaauuuaucauaagugugacaacgccugcaucggcucuaucagaaaugggaccuacgaucacgacguguaucgcgacgaggcccugaacaaucgguuccagauuaagggcaucgaacucaaauccggauacaaggauuggauucuguggaucagcuuugcuauuucuugcuuccuucugugugucgcccuccugggcuuuaucaugugggcgugccaaaaagggaacaucagauguaauauuugcaucuga

SEQ ID NO: 201995 - RNA, 1701 nt, Artificial Sequence; identical to SEQ ID NO: 201956
  derived and/or modified CDS sequence (opt5) from hemagglutinin__InfluenzaA__AGG14033

SEQ ID NO: 201996 - RNA, 1701 nt, Artificial Sequence; identical to SEQ ID NO: 201975
  derived and/or modified CDS sequence (opt5) from hemagglutinin__InfluenzaA__AGG14318

SEQ ID NO: 201997 - RNA, 1701 nt, Artificial Sequence
  derived and/or modified CDS sequence (opt5) from hemagglutinin__InfluenzaA__AGG14330
augaagaccaucauugcccugagcuacauccucugccugguguucgcucagaaacuucccggcaacgacaauuccacagccacgcugugucucgggcaccaugcggucccuaacggaaccauuguuaagacaaucaccaaugauagaauugaggugacaaacgcuaccgaacuggugcaaaauucuagcaucggcgagaucugcgacuccccgcaccagauucuugauggggaaaacuguacacugaucgacgcccuccugggagauccccagugcgacggcuuucagaauaaaaagugggaucuguucgucgagcggucuaaagccuauagcaacuguuacccuuaugacgugcccgauuacgcuucccuccgcucucugguugccagcuccgggacccuugaauuuaauaacgagagcuucaauuggacgggagugacccaaaacggcacaucuuccgcuugcauuagacggagcaauucuuccuuuuucagccgccugaacuggcucacccaucugaauuuuaaguauccugcccuuaacgucacaaugcccaacaaugagcaguucgacaagcuguacaucuggggcgugcaccauccugggaccgauaaagaccagauuuuucucuaugcgcagucuuccggaagaaucacgguuagcacaaagcggucccaacaggccgugauuccgaacaucggcucucgccccagaauccggaauauuccuagccgcaucuccauuuacuggaccaucgucaaacccggggauauucugcugaucaacagcacaggaaaucucaucgcuccuagaggcuacuucaagauucggucugggaaauccagcaucauucgcucugacgcccccaucggaaaguguaagagcgaaugcauuaccccgaacggcuccaucccuaaugacaaacccuuucagaacgugaauagaaucaccuauggcgcuuguccucgguacgugaagcagucuacacugaaacuugccacggggaugcgcaacguccccgagaagcaaaccagaggaauuuucggcgcgaucgccggguuuauugaaaauggaugggagggcaugguugaugggugguauggauuccggcaccagaacagcgagggcagaggccaggcugccgaccugaaauccacacaagcugccaucgaucagauuaaugggaagcucaaccgccugaucggaaaaaccaaugaaaaguuccaccagauugagaaggaauuuagcgagguggaaggccggauccaggaccuugagaaauacguggaggauacaaagaucgaccuguggucuuauaacgccgaacuccuggucgcucuggagaaccaacauaccauugaucucacggacuccgaaaugaauaaacuguucgagaagaccaaaaagcagcuuagagaaaacgcggaggauauggggaauggaugcuuuaagaucuaccacaaaugugacaacgccugcauuggcagcauccgcaaugggacauaugaucaugacguguaccgggacgaggcucugaacaauagauuccagauuaagggcguugaacucaaaucuggauacaaggauuggauccuguggaucuccuuugccauuagcugcuuccuucuguguguggcccuccugggcuuuaucaugugggcuugccagaaagggaacauucgcuguaauaucugcauuuga

SEQ ID NO: 201998 - RNA, 1701 nt, Artificial Sequence
  derived and/or modified CDS sequence (opt5) from hemagglutinin__InfluenzaA__AGG84179
augaagaccaucauugcccugagcuacauccucugccugguguucgcucagaaacuucccggcaacgacaauuccacagccacgcugugucucgggcaccaugcggucccuaacggaaccauuguuaagacaaucaccaaugaucaaauugaggugacaaacgcuaccgaacuggugcagucuagcuccgccucugagaucugcgacagcccgcaccauauccuugauggcgaaaauuguacacugauugacgcccuccugggggauccccagugcgacggauuucagaacaaaaagugggaucuguucgucgagagaucccgggcuuauucuaauuguuacccuuaugacgugcccgauuacgccagccuccgcucccugguugcuagcucuggcacccuugaauuuaacaaugaguccuucaacuggacgggggugacccaaaauggaacaagcucugccugcaucagacgguccaacaauagcuuuuucucucgccugaacuggcucacccaccugaauuuuaaauauccugcgcuuaacgucacaaugcccaacaaugagcaguucgacaagcuguacauuuggggcgugcaucacccuggcaccgauaaggaccagaucuuucucuaugcccaggcuuccgggagaauuacgguuagcacaaaacggucccaacaggccgugaucccgaacauuggaucucgccccagaguccggaauaucccuagccgcaucuccauuuacuggaccaucgugaagcccggcgauauucugcugaucaacagcacagggaaucucauugcuccuagaggauacuucaaaauccggucuggcaaguccagcaucaugcgcucugacgcccccauugggaaauguaacagcgaaugcaucaccccgaauggauccauuccuaacgacaagcccuuucagaaugugaacagaaucaccuauggcgcguguccucgguacgucaagcagucuacacugaaacuugccacgggcaugcgcaauguucccgagaagcaaaccagagggauuuucggagcuaucgccggcuuuaucgaaaacgggugggagggaaugauggauggcugguauggguuccggcaccagaauagcgagggaagaggccaggcugccgaccugaaauccacacaagccgcuauugaucagaucaacggcaagcucaaucgccugauugggaaaaccaacgaaaaguuccaucagaucgagaaagaauuuagcgagguggaaggacggauucaggaccuugagaaguacguggaggauacaaagaucgaccuguggucuuauaacgcggaacuccuggucgcccuggagaaucaacacaccauugaucucacggacuccgaaaugaacaaacuguucgagaagaccaaaaagcagcuuagagaaaaugcugaggauaugggcaacgggugcuuuaaaaucuaccauaagugugacaaugccugcaucggaagcauucgcaacggcacauaugaucacgacguguaccgggacgaggcccugaauaacagauuccagaucaaggggguugaacucaaaucuggcuacaaggauuggauucuguggaucuccuuugcuauuagcugcuuccuucuguguguggcccuccugggauuuaucaugugggcgugccagaaaggcaauauccgcuguaacauuugcaucuga

SEQ ID NO: 201999 - RNA, 1704 nt, Artificial Sequence
  derived and/or modified CDS sequence (opt5) from hemagglutinin__InfluenzaA__AGI02564
auggagaagaucgugcugcuccuggccauugucagccuuguuaaauccgaccagaucugcauuggcuaccacgcuaacaauucuaccgaacaaguggauacaaucauggagaagaacgugacggucacccaugcccaggacauucuggaaaagacacacaaugggaagcucugugaucuggacggagugaaaccccuuauccugagagauugcagcguugcgggcuggcuccuggggaacccuaugugugacgaguucaucaaugugccggaaugguccuauauugucgagaaggcuaaccccaccaaugaucugugcuacccuggaaacuuuaaugacuaugaggaacucaagcaucugcuuucucggaucaaccacuucgagaaaauucagaucauucccaagagcuccuggucuggccaugaagccagcuccggggugagcucugccuguccuuaccagggaacacccuccuuuuuccgcaauguuguguggcugaucaaaaagaacaauaccuauccuacaauuaaaagaagcuacaacaauaccaaccaagaggaucuccugauccuuuggggcauccaccacucuaacgacgcugccgagcagacgaagcuguaucagaauccgaccacauacauuuccgucggcaccagcacacucaaccagcggcuggugcccaagaucgcuacccgcucuaaagugaaugggcaauccggaagaauggauuucuucuggacgauucugaagccuaacgacgccaucaauuuugaaagcaacggcaauuucauugcgcccgaguacgccuauaaaaucgucaagaaaggggauuccgcuaucaugaagucugaaguugaguacggaaacugcaauacaaaaugucagaccccuauuggcgccaucaacagcuccaugcccuuucauaauauucacccgcucacaaucggggaaugcccuaaguaugugaaaagcaacaaacuggugcuugcuaccggacugcgcaauucuccccuccgggagagacggcgcaagagaggccuguucggcgccauugcgggguuuaucgagggaggcuggcaggggauggucgacggaugguacggcuaucaucacuccaacgaacaggggagcggauacgccgcugacaaagagucuacccaaaaggccaucgauggcgugacaaauaaaguuaacagcauuaucgacaagaugaacacgcaguucgaagcugugggccgggaguuuaauaaccuugaacgcagaauugagaaucugaacaagaaaauggaggauggguuccucgacgucuggaccuauaaugccgaacugcuggugcucauggagaacgaacggacacuggauuuccacgacuccaauguuaagaaccuuuacgauaaagugcgccugcagcucagaaauaacgccaaggagcugggaaauggcuguuuugaauuuuaccauaaaugcgacaacgaguguauggagucuguccggaaugggaccuaugauuacccucaauauagcgaagaggcuagacuuaagcgcgaagagaucuccggagugaagcuggagagcauuggcacauaccagauccucucuauuuauuccaccgucgcgagcucucuggcccuggcuaucaugguggccgggcucucccuguggaugugcagcaacggcucccuucagugccggaucuguauuuga

SEQ ID NO: 202000 - RNA, 1707 nt, Artificial Sequence
  derived and/or modified CDS sequence (opt5) from hemagglutinin__InfluenzaA__AGI02565
auggagaagaucgugcugcuccuggccauugucagccuuguuaaauccgaccagaucugcauuggcuaccacgcuaacaauucuaccgaacaaguggauacaaucauggagaagaacgugacggucacccaugcccaggacauucuggaaaagacacacaaugggaaacucugugaucuggacggagugaaaccccuuauccugagagauugcagcguugcgggcuggcuccuggggaacccuaugugugacgaguucaucaaugugccggaaugguccuauauugucgagaaggcuauccccgccaacgaucugugcuacccuggagacuuuaaugauuaugaggaacucaagcaucugcuuucucggauuaaccacuucgagaaaauccagauuauccccaagagcuccuggucuaaucaugaagccagccugggcguguccagcgcuuguccuuaccucgggaaacccuccuuuuuccgcaacguuguguggcugauuaagaaaaauucuaccuauccuacaaucaagagaagcuacaacaauaccaaccaggaggaccuucugguccucuggggaauccaccacccgaaugaugccgcugagcaaacaaagcuguaucagaaccccaccacguacauuucugugggcaccuccacacugaaccagcggcucgugccuaaaaucgccacccgcagcaaggucaauggccagucugggagaauggaauuuuucuggacaauucugaaacccaacgacgcgaucaauuuugaguccaacggaaauuucauugccccugaauacgcuuauaagaucguuaaaaagggcgauagcgccaucaugaaauccgagcuugaauacgggaacugcaauaccaagugucaaacgcccaugggagcuauuaacucuagcaugccguuucauaauauccacccucugacaauuggcgagugccccaaguaugugaaauccaaccggcucgugcuggccaccgggcuucgcaauagcccucagggagagagacggcgcaagaaaagaggccuguucggcgcgaucgccggguuuauugaaggaggcuggcaggggauggucgacggaugguacggcuaucaucacucuaacgagcagggguccggauacgcugccgacaaggaaagcacacaaaaagcuaucgauggcgugaccaauaagguuaacucuaucauugacaagaugaauacccaguucgaggccgugggccgggaauuuaacaaccucgagcgcagaaucgagaaucugaacaaaaagauggaagauggguuccuggacgucuggacauauaaugccgagcuccuggugcuuauggaaaacgagcggacgcuggauuuccacgacagcaauguuaaaaaccucuacgauaaggugcgccugcagcuuagagacaaugcuaaagaacugggaaacggcuguuuugaguucuaccauaagugcgauaaugaguguauggaauccguccggaacgggaccuaugacuacccccaauauucugaggaagcgagacucaagcgcgaggagauuagcggagugaaacuggaauccaucggcacauaccagauucugagcaucuauucuaccgucgccuccagccucgcucuggccauuaugguggccgggcuuucucuguggaugugcuccaauggcagccuccagugccggaucuguaucuga

SEQ ID NO: 202001 - RNA, 1704 nt, Artificial Sequence
  derived and/or modified CDS sequence (opt5) from hemagglutinin__InfluenzaA__AGI02566
auggagaagaucgugcugcuccuggccauugucagccuuguuaaauccgaccagaucugcauuggcuaccacgcuaacaauucuaccgaacaaguggauacaaucauggagaagaacgugacggucacccaugcccaggacauucuggaaaagacacacaaugggaagcucugugaucuggacggagugaaaccccuuauccugagagauugcagcguugcgggcuggcuccuggggaacccuaugugugacgaguucaucaaugugccggaaugguccuauauugucgagaaggcuaaccccgccaaugaucugugcuacccuggaaacuuuaaugacuaugaggaacucaagcaucugcuuucucggaucaaccacuucgagaaaauucagaucauucccaagagcuccuggucugaucaugaagccagcuccggcgugagcucugcuuguccuuaccaggggacccccuccuuuuuccgcaauguuguguggcugaucaaaaagaacaauacauauccuaccauuaaaagaagcuacaacaauacaaaccaagagaaccuccugauccuuuggggaauccaccacucuaaugacgccgcugagcagauuaagcuguaucagaacccgaccacguacaucuccgucggcaccagcacacucaaucagcggcuggugcccaagauugccacccgcucuaaagugaacggccaauccgggagaauggacuuuuucuggacaauccugaagccuaaugaugcgauuaacuuugaaagcaauggaaacuucaucgcccccgaguacgcuuauaaaaucgucaaggaaggcgauuccgccauuaugaaaucugagguugaauacgggaauugcaacaccaagugucagacgccuaucggagcuauuaauagcuccaugcccuuucauaacauccacccgcucacaauuggcgagugcccuaaauaugugaaaagcaauaagcuggugcuugccaccgggcugcggaacucuccccuccgcgagagacggcgcaaaagaggacuguucggcgcgaucgccggcuuuaucgaagggggauggcagggcauggucgacgggugguacggauaucaucacuccaaugagcagggcagcggguacgcugccgacaaggaaucuacacaaaaagcuauugauggagugaccaacaagguuaacagcaucauugacaaaaugaauacccaguucgaggccgugggccgggaauuuaacaaucuugagcgcagaaucgagaaccugaauaagaagauggaagauggcuuccucgacgucuggacauauaacgccgagcugcuggugcucauggaaaaugagcggacgcuggauuuccacgacuccaacguuaaaaaucuuuacgauaaggugcgccugcagcucagagacaacgcuaaagaacuggggaauggauguuuugaguucuaccauaagugcgauaacgaguguauggaaucuguccggaauggcaccuaugacuacccucaauauagcgaggaagcgagacuuaaacgcgaggagauuuccggggugaagcuggaaagcaucggaacauaccagauucucucuaucuauuccaccgucgccagcucucuggcucuggccaucaugguggccggccucucccuguggaugugcagcaacgggucccuucagugccggauuuguaucuga

SEQ ID NO: 202002 - RNA, 1707 nt, Artificial Sequence
  derived and/or modified CDS sequence (opt5) from hemagglutinin__InfluenzaA__AGI02567
auggagaagaucgugcugcuccuggccauugucagccuuguuaaauccgaccagaucugcauuggcuaccacgcuaacaauucuaccgaacaaguggauacaaucauggagaagaacgugacggucacccaugcccaggacauucuggaaaagacacacaaugggaagcucugugaucuggacggagugaaaccccuuauccugagagauugcagcguugcgggcuggcuccuggggaacccuaugugugacgaguuccugaaugugccggaaugguccuauaucgucgagaaggcuaaccccgccaaugaucucugcuacccuggaaacuuuaaugacuaugaggaacugaagcaucuucugucucggauuaaccacuucgagaaaauccagauuauccccaagagcuccuggucugaucaugaagccagcuccggcgugagcucugcuuguccuuaccaggggcgcuccagcuuuuucagaaauguuguguggcucauuaaaaagaacaaugccuaucccaccaucaaacggucuuacaacaauacaaaccaagaggaccugcuuguccuguggggcauucaccacccuaacgaugcugccgagcagacccgccucuaucagaauccgacaaccuacaucuccgugggaacgagcacccugaaccagagacuggugcccaagaucgcgacacggucuaaggucaauggccaauccgggcgcauggaauuuuucuggaccauucucaaaccuaacgacgccaucaauuuugagagcaacggaaauuucauugcucccgaauacgccuauaagaucguuaaaaagggcgauuccacaauuaugaaaucugagcuggaauacgggaacugcaauaccaagugucagacgccuaucggagcuaucaacagcuccaugcccuuucauaauauucacccgcuuacaaucggcgagugcccuaaauaugugaaaagcaacagacuggugcucgccaccgggcugcgcaauucuccccagggagagcggagacggaagaaacgcggccuuuucggcgcgauugccggguuuaucgaaggaggcuggcaggggauggucgacggaugguacggcuaucaucacuccaacgagcaagggagcggauacgcugccgacaaggaaucuacacagaaagcuauugauggcgugaccaauaagguuaacagcaucaucgacaaaaugaacacccaguucgaggccgugggcagagaauuuaauaaccuggagcggcgcauugagaaucucaacaagaagauggaagauggguuccuggacgucuggacauauaaugccgagcugcucgugcugauggaaaacgagagaacgcuugauuuccacgacuccaauguuaaaaaccuguacgauaaggugcggcuccaacugagagacaaugcuaaagaacuuggaaacggcuguuuugaguucuaccaucgcugcgauaaugaguguauggaaucuguccggaacgggaccuaugacuacccucaguauagcgaggaagcgagacugaagcgcgaggagaucuccggagugaaacucgaaagcauuggcacauaccagauccugucuauuuauuccaccgucgccagcucucuggcucucgccaucaugguggccgggcugucccuuuggaugugcagcaauggcucccugcagugccggauuuguaucuga

SEQ ID NO: 202003 - RNA, 1704 nt, Artificial Sequence
  derived and/or modified CDS sequence (opt5) from hemagglutinin__InfluenzaA__AGI02568
auggagaagaucgugcugcuccuggccauugucagccuuguuaaauccgaccagaucugcauuggcuaccacgcuaacaauucuaccgaacaaguggauacaaucauggagaagaacgugacggucacccaugcccaggacauucuggaaaagacacacaaugggaagcucugugaucuggacggagugaaaccccuuauccugagagauugcagcguugcgggcuggcuccuggggaacccuaugugugacgaguucaucaaugugccggaaugguccuauauugucgagaaggcuaaccccgccaaugaucugugcuacccuggaaacuuuaaugacuaugaggaacucaagcaucugcuuucucggaucaaccacuucgagaaaauucagaucauucccaagagcuccuggucugaucaugaagccagcuccggcgugagcucugcuuguccuuaccaggggacccccuccuuuuuccgcaauguuguguggcugaucaaaaagaacaauacauauccuaccauuaaaagaagcuacaacaauacaaaccaagagaaccuccugauccuuuggggaauccaccacucuaaugacgccaccgagcagauuaagcuguaucagaacccgacgaccuacaucuccgucggcacaagcacccucaaucagcggcuggugcccaagauuggcacacgcucuaaagugaacgggcaauccggaagaauggacuuuuucuggaccauccugaagccuaaugaugcuauuaacuuugaaagcaauggcaacuucaucgcccccgaguacgcguauaaaaucgucaaggaaggggauuccgccauuaugaaaucugagguugaauacggaaauugcaacacgaagugucagacaccuaucggcgcuauuaauagcuccaugcccuuucauaacauccacccgcucaccauuggggagugcccuaaauaugugaaaagcaauaagcuggugcuugccacaggacugcggaacucuccccuccgcgagagacggcgcaaaagaggccuguucggcgcuaucgccggguuuaucgaaggaggcuggcaggggauggucgacggaugguacggcuaucaucacuccaaugagcaggggagcggauacgcggccgacaaggaaucuacccaaaaagcuauugauggcgugaccaacaagguuaacagcaucauugacaaaaugaauacacaguucgaggccgugggccgggaauuuaacaaucuugagcgcagaaucgagaaccugaauaagaagauggaagauggguuccucgacgucuggacguauaacgcugagcugcuggugcucauggaaaaugagcggacccuggauuuccacgacuccaacguuaaaaaucuuuacgauaaggugcgccugcagcucagagacaacgccaaagaacugggaaauggcuguuuugaguucuaccauaagugcgauaacgaguguauggaaucuguccggaaugggacauaugacuacccucaauauagcgaggaagccagacuuaaacgcgaggagauuuccggagugaagcuggaaagcaugggcaucuaccagauucucucuaucuauuccaccgucgcuagcucucuggcgcuggccaucaugguggcugggcucucccuguggaugugcagcaacggcucccuucagugccggauuuguaucuga

SEQ ID NO: 202004 - RNA, 1683 nt, Artificial Sequence
  derived and/or modified CDS sequence (opt5) from hemagglutinin__InfluenzaA__AGI60301
augaacacccagauccugguguucgcccucauugcuaucauucccacaaaugccgacaagaucugccugggccaccaugcggucagcaacgggacgaaaguuaauacccuuacagagagaggaguggaaguggucaacgcuaccgagacaguggaacggaccaauauuccucgcaucuguuccaagggcaaaagaacaguugaucuggggcaaugcggacuccugggcaccaucacggggccgccccagugugaccaguuucuugaguucucugccgaucugauuaucgaacggcgcgagggaagcgacgugugcuacccuggcaaguuugucaacgaggaagcccucagacagauucugcgggaguccggcgggaucgauaaagaagcuaugggauucaccuauucuggcauucgcacaaauggggccaccagcgcuuguagacgguccggaucuagcuuuuacgccgagaugaaguggcugcucuccaacacagacaaugcggccuucccccaaaugaccaagagcuauaaaaacacgcgcaagucuccugcucugaucguguggggcauucaccauuccguuagcacagccgagcagaccaaacuuuacgggucuggaaauaagcuggugacagucggcuccagcaacuaucagcagucuuuugugcccuccccuggcgcuagaccgcaagugaaugggaucagcggacggaucgauuuccacuggcucaugcugaaccccaaugacaccgucaccuuuuccuucaacggcgccuuuauugcgccugaucgcgccucuuuccuuagagggaaaagcaugggaauccaguccggcguucagguggacgcuaacugcgaaggggauuguuaccauagcggaggcacaauuaucucuaaucugcccuuucagaacauugacucccgggccgugggcaagugcccucgcuaugucaagcaaagaagccuccugcuggcuacggggaugaaaaaugugcccgagaucccgaagggacggggccucuucggggccaucgccggauucauugaaaacggcugggaggggcugaucgauggcugguacggauuuagacaccagaaugcucagggcgaagggaccgcggccgacuacaaaucuacacaaagcgcuauugaccagaucaccggaaaacuuaaccgccugauugagaagacaaaucagcaguucgagcucaucgauaacgaauuuaaugagguugaaaagcaaaucggcaacgugauuaauuggacccgggacuccaucacggaggucuggucuuauaacgccgaacugcuuguggccauggagaaucagcacacaauugaucuggcugacagcgagauggauaaacucuacgaaagaguuaagcgccagcugcgggagaacgccgaagaggacgggaccggauguuucgaaaucuuucauaagugcgaugacgauuguauggcguccauuagaaauaacaccuaugaccacagcaaauaccgcgaggaggcuaugcagaaccggauccaaauugauccugugaagcugucuuccggcuauaaagacgucauccucugguucagcuuuggggccucuugcuucauccugcuugccauugugaugggccuggucuuuaucugcgugaagaauggaaacaugagauguacaauuugcaucuga

SEQ ID NO: 202005 - RNA, 1683 nt, Artificial Sequence
  derived and/or modified CDS sequence (opt5) from hemagglutinin__InfluenzaA__AGJ72861
augaacacccagauccugguguucgcccucauugcuaucauucccacaaaugccgacaagaucugccugggccaccaugcggucagcaacgggacgaaaguuaauacccuuacagagagaggaggcgaaguggugaacgcuaccgagacagucgaacggaccaauauuccucgcaucuguuccaaggggaaaaagacaguggaucugggacaaggcgggccgagaggaaccaucacggggcccccucagugcgaccaguuucucgaguucucugccgaucugauuauggaacggcgcgagggcagcgacguuuguuaccccggcaaauuugugaacgaggaagcccuuagacagauccugcgggaguccggaggcauugauaaggaagcuaugggguucaccuauucuggaauccgcacaaauggcgccaccagcgcuugcagacgguccgggucuagcuuuuacgccgagaugaaguggcuccuguccaacacagacaaugcggccuucccucaaaugaccaaaagcuauaagaacacgcgcaaaucucccgcucugauugucuggggaauccaccauuccgugagcacagccgagcagaccaagcucuacggcucuggcaauaaacugguuacagugggguccagcaacuaucagcagucuuuugucccuuccccgggagcuagaccccaagugaauggccagagcgggcggauugauuuccacuggcuuaugcugaacccuaaugacaccgugaccuuuuccuucaacggagccuuuaucgcgcccgaucgcgccucuuuccucagaggcaagagcauggggauccaguccggaguccagguugacgcuaacugugaaggcgauugcuaccauagcggcgggacaauuaucucuaaucugccuuuucaaaacauugacucccgggccgugggaaaguguccccgcuaugugaaacagagaagccuucugcucgcuacgggcaugaagaaugucccggagaucccuaaagggcggggacuguucggcgccauugccggguucaucgaaaacggcugggagggacugaucgauggcugguacggguuuagacaccagaaugcucaaggagaaggcaccgcggccgacuacaagucuacacagagcgcuauugaccagaucaccgggaaacucaaccgccugauugagaagacaaaucagcaauucgagcuuaucgauaacgaauuuaaugagguggaaaaacagauuggaaacguuaucaauuggacccgggacuccaucacggagguguggucuuauaacgccgaacugcucgucgccauggagaaucagcacacaauugaucuggcugacagcgagauggauaaacuuuacgaaagagugaagcgccagcugcgggagaacgccgaagaggacggcaccgggugcuucgaaaucuuucauaagugugaugacgauugcauggcguccauuagaaauaacaccuaugaccacagcaaguaccgcgaggaggcuaugcaaaaccggauccagauugaucccguuaaacucucuuccggcuauaaggacgugauccugugguucagcuuuggagccucuuguuucauucugcucgccaucgucaugggccugguguuuaucugcgucaaaaaugggaacaugagaugcacaauuuguaucuga

SEQ ID NO: 202006 - RNA, 1701 nt, Artificial Sequence
  derived and/or modified CDS sequence (opt5) from hemagglutinin__InfluenzaA__AGJ73327
augaaggccauccuggugguccuccuguacaccuucgcuacagccaacgcggacacgcuuugcauuggcuaucacgcuaauaacagcaccgauacaguugacaccgugcuggagaaaaaugugacagucacccauuccgugaaccuccuggaagauaagcacaaugggaaacuuuguaagcugagaggaguugcuccccuccaucugggcaaaugcaacaucgccggguggauucugggaaauccugagugugaaucucucagcacagccuccucuuggagcuacaucguggagaccuccucuagcgacaacggcacgugcuauccgggggauuuuauuaauuacgaagaacugcgggagcagcuuuccagcgucucuuccuucgaacgcuuugagaucuuccccaagaccagcucuuggccuaaccacgacuccaauaagggagugacagccgcuuguccccaugccggcgcgaaaucuuuuuauaagaaccugaucuggcucguuaaaaagggcaauucuuacccuaaacuguccaagagcuauauuaacgauaaggggaaagaagugcuuguccuguggggaauccaccaccccuccaccacagccgaccaucaaucucucuaccagaaugcugaugccuacguguucgugggcaccagcagauauuccaagaaauuuaagccugagauugcuauccggccgaaaguccgcgaccaggaggggagaaugaacuacuauuggacgcugauugaacccggagauaagaucacauucgaggccaccggcaaccugguugugccucgguacgcguuugccauggaacgcaaugcugggagcggaauuaucauccccgacacaccugugcacgauugcaacaccaccugucagacacccaaaggcgccauuaauacgucucucccguuccaaaacauccauccuauuaccaucggcaagugccccaaguaugucaaauccacaaagcugagacuugcuaccgggcugcggaaugugccuagcauucagucucgcggacucuuuggcgccaucgccggguucaucgagggaggcuggacagggaugguugacggaugguacggcuaucaccaccagaacgaacagggcagcggguacgcugcggaccugaaauccacccaaaaugccauugauaagaucacgaacaaagugaauagcgucauugagaagaugaacacacaguuuaccgcugugggaaaggaguucaaucaucuugaaaagagaaucgagaaccugaauaagaaacucgacgauggcuuccuggacauuuggaccuacaacgccgaacugcucguucugcuugagaaugaacggacacuggauuaucacgacagcaacgugaagaaccucuacgagaaaguccgcaaucagcugaagaacaaugccaaggagaucgggaacggauguuuugaguucuaucauaaaugcgauaauaccuguauggaguccgugaagaacggcacauacgacuaucccaaauacagcgaagaggcuaaacuuaauagagagaaaaucgauggggucaagcuggaaucuacgcggauuuaucagauccucgccauuuacuccaccguggcgagcucucugguucugguggucucccucggcgagaucagcuuuuggaugugcuccaacggaucucugcaaugccgcauuuguaucuga

SEQ ID NO: 202007 - RNA, 1701 nt, Artificial Sequence
  derived and/or modified CDS sequence (opt5) from hemagglutinin__InfluenzaA__AGJ73329
augaaggccauccuggugguccuccuguacaccuucgcuacagccaacgcggacacgcuuugcauuggcuaucacgcuaauaacagcaccgauacaguugacaccgugcuggagaaaaaugugacagucacccauuccgugaaccuccuggaagauaagcacaaugggaaacuuuguaagcugagaggaguugcuccccuccaucugggcaaaugcaacaucgccggguggauucugggaaauccugagugugaaucucucagcacagccuccucuuggagcuacaucguggagaccuccucuagcgacaacggcacgugcuauccgggggauuuuauugacuacgaagaacugcgggagcagcuuuccagcgucucuuccuucgaacgcuuugagaucuuccccaagaccagcucuuggccuaaucacgauuccaacaagggagugacagccgcuuguccccaugccggcgcgaaaggcuuuuauaagaaucugaucuggcucguuaaaaaggggaacagcuacccuaaacugucuaaguccuauauuaaugacaagggaaaagaagugcuuguccuguggggcauccaccaccccagcaccacagccgaucaacagucccucuaccagaacgcugacaccuacguguucguggggacgucuagauauagcaagaaauuuaagccugagauugccauccggccgaaaguccgcgaucaggagggaagaaugaauuacuauuggacacugguugaacccggcgacaagauuaccuucgaggcuacagggaaccugguggugccucgguacgccuuugcgauggaacgcaacgccggauccggcaucauuaucagcgaugcucccguccaugacugcaauaccaccugucaaacaccuaaaggcgccaucaacacgucucuccccuuccagaauauucacccgaucaccauugggaagugcccuaaguaugugaaauccacaaagcugagacuugcuaccggacugcggaacguucccagcauccagucucgcggccucuuuggggccauugccggauucaucgagggcggguggacaggaaugguggacggcugguacggcuaucaucaccagaaugaacaagggagcggauacgcugcggaucugaaauccacccagaacgccaucgacaagauuacgaauaaagucaacucugugaucgagaagaugaauacacaguuuaccgcuguuggcaaggaguucaaccaccuugagaaaagaauugagaaucugaacaagaaaguggaugacggguuccucgauaucuggaccuacaaugccgaacugcugguccuccuggagaacgaacggacacuugacuaucaugauagcaaugugaagaaccuguacgagaaaguccgcaaccagcucaagaauaacgccaaggagauuggaaauggcuguuuugaguucuaucacaaaugcgacaacaccuguauggaauccgugaagaaugggacauacgauuauccuaaauacagcgaagaggcuaagcugaacagagaagagaucgacggcguuaaacuugagucuacgcggaucuaucaaauucuggccaucuacuccaccguggcgagcucucucguccuggugguuucccugggagcuauuagcuuuuggaugugcuccaauggcucucuccagugccgcaucuguauuuga

SEQ ID NO: 202008 - RNA, 1701 nt, Artificial Sequence
  derived and/or modified CDS sequence (opt5) from hemagglutinin__InfluenzaA__AGJ73331
augaaggccauccuggugguccuccuguacaccuucgcuacagccaacgcggacacgcuuugcauuggcuaucacgcuaauaacagcaccgauacaguugacaccgugcuggagaaaaaugugacagucacccauuccgugaaccuccuggaagauaagcacaaugggaaacuuuguaagcugagaggaguugcuccccuccaucugggcaaaugcaacaucgccggguggauucugggaaauccugagugugaaucucucagcacagccuccucuuggagcuacaucguggagaccuccucuagcgacaacggcacgugcuauccgggggauuuuauugacuacgaagaacugcgggagcagcuuuccagcgucucuuccuucgaacgcuuugagaucuuccccaagaccagcucuuggccuaaucacgauuccaacaagggagugacaaccgccuguccccaugcuggcgccaagagcuuuuauaaaaaucugaucuggcucguuaaaaagggcaacucuuacccuaaacuguccaagagcuauauuaaugacaaggggaaagaagugcuuguccuguggggaauccaccaucccccuacauccgcggaucaacagucucucuaccagaacgccgacgcuuacguguucgugggcaccagcagauauuccaagaaauuuaagccggagauugccauccggcccaaaguccgcgggcaggagggaagaaugaauuacuauuggacgcugguugaaccuggcgauaagauuacauucgaggcuaccgggaaccugguggugccccgguacgccuuugcgauggaacgcaacgccggaagcggcaucauuaucucugacacaccuguccacgauugcaauaccaccugucaaacacccaaaggcgcuaucaacacgucccucccguuccagaauauucacccuaucaccauugggaagugccccaaguaugugaaaagcacaaagcugagacuugccaccggacugcggaacguuccuucuauccagagccgcggccucuuuggggcuauugccggauucaucgagggcggguggacaggaaugguggacggcugguacggcuaucaucaccagaaugaacaaggguccggauacgccgcugaccugaaaucuacccagaacgcgaucgaugagauuacgaauaaggucaacagcgugaucgagaaaaugaauacacaguuuaccgccguuggcaaggaguucaaccaccuugagaagagaauugaaaaucugaacaaaaagguggacgauggguuccucgacaucuggaccuacaaugcugagcugcugguccuccuggaaaacgagcggacacuugauuaucaugacuccaaagugaagaaucuguacgagaaaguccgcagccagcucaagaacaacgccaaggaaauuggaaauggcuguuuugaguucuaucacaaaugcgauaacaccuguauggaaucugugaagaaugggacauacgacuaucccaaauacuccgaggaagccaagcugaacagagaggagaucgauggcguuaaacuugaaagcacgcggaucuaucaaauucuggcuaucuacucuaccguggccuccagccucguccuggugguuucccugggagcgauuucuuuuuggaugugcagcaauggcucccuccagugccgcaucuguauuuga

SEQ ID NO: 202009 - RNA, 1701 nt, Artificial Sequence
  derived and/or modified CDS sequence (opt5) from hemagglutinin__InfluenzaA__AGJ73333
augaaggccauccuggugguccuccuguacaccuucgcuacagccaacgcggacacgcuuugcauuggcuaucacgcuaauaacagcaccgauacaguugacaccgugcuggagaaaaaugugacagucacccauuccgugaaccuccuggaagauaagcacaaugggaaacuuuguaagcugagaggaguugcuccccuccaucugggcaaaugcaacaucgccggguggauucugggaaauccugagugugaaucucucagcacagccuccucuuggagcuacaucguggagaccuccucuagcgacaacggcacgugcuauccgggggauuuuauugacuacgaagaacugcgggagcagcuuuccagcgucucuuccuucgaacgcuuugagaucuuccccaagaccagcucuuggccuaaucacgauuccaacaagggagugacagccgcuuguccccaugccggcgcgaaaggcuuuuauaagaaucugaucuggcucguuaaaaaggggaacagcuacccuaaacugucuaaguccuauauuaaugacaagggaaaagaagugcuuguccuguggggcauccaccaccccagcaccuccgccgaucaacagucucucuaccagaacgcugacacauacguguucguggggaccagcagauauuccaagaaauuuaagccugagauugccauccggccgaaaguccgcgaucaggagggaagaaugaauuacuauuggacgcugguugaacccggcgacaagauuacauucgaggcuaccgggaaccugguggugccucgguacgccuuugcgauggaacgcaacgccggaagcggcaucauuaucucugauacacccguccaugacugcaauaccaccugucaaacaccuaaaggcgcuaucaacacgucccuccccuuccagaauauucacccgaucaccauugggaagugcccuaaguaugugaaaagcacaaagcugagacuugccaccggacugcggaacguucccucuauccagagccgcggccucuuuggggcuauugccggauucaucgagggcggguggacaggaaugguggacggcugguacggcuaucaucaccagaaugaacaaggguccggauacgccgcugaucugaaaucuacccagaacgcgaucgacaagauuacgaauaaagucaacagcgugaucgagaagaugaauacacaguuuaccgccguuggcaaggaguucaaccaccuugagaaaagaauugagaaucugaacaagaaaguggaugacggguuccucgauaucuggaccuacaaugcugaacugcugguccuccuggagaacgaacggacacuugacuaucaugauuccaaugugaagaaccuguacgagaaaguccgcaaccagcucaagaauaacgccaaggagauuggaaauggcuguuuugaguucuaucacaaaugcgacaacaccuguauggaaagcgugaagaaugggacauacgauuauccuaaauacucugaagaggccaagcugaacagagaagagaucgacggcguuaaacuugaguccacgcggaucuaucaaauucuggcuaucuacagcaccguggccucuucccucguccuggugguuagccugggagcgauuuccuuuuggaugugcucuaauggcagccuccagugccgcaucuguauuuga

SEQ ID NO: 202010 - RNA, 1701 nt, Artificial Sequence
  derived and/or modified CDS sequence (opt5) from hemagglutinin__InfluenzaA__AGJ73335
augaaggccauccuggugguccuccuguacaccuucgcuacagccaacgcggacacgcuuugcauuggcuaucacgcuaauaacagcaccgauacaguugacaccgugcuggagaaaaaugugacagucacccauuccgugaaccuccuggaagauaagcacaaugggaaacuuuguaagcugagaggaguugcuccccuccaucugggcaaaugcaacaucgccggguggauucugggaaauccugagugugaaucucucagcacagccuccucuuggagcuacaucguggagaccuccucuagcgacaacggcacgugcuauccgggggauuuuauugacuacgaggagcugcgggagcagcuuuccagcgucucuuccuucgaacgcuuugagaucuuccccaagaccagcucuuggccuaaucacgauuccaacaagggagugacagccgcuuguccccaugccggcgcgaaaucuuuuuauaagaaucugaucuggcucguuaaaaagggcaacagcuacccuaaacuguccaagagcuauauuaaugacaaggggaaagaagugcuuguccuguggggaauccaccaccccuccaccacagccgaucaacagucucucuaccagaacgcugacaccuacguguucgugggcacgagcagauauuccaagaaauuuaagccugagauugccauccggccgaaaguccgcgaucaggaggggagaaugaauuacuauuggacacugguugaaccccgggacaagauuaccuucgaggcuacaggaaaccugguggugccucgcuacgccuuugcgauggaaagaaacgccggcagcgggaucauuaucucugauacccccguccaugacugcaauaccacaugucaaacgccuaaaggagcuaucaacaccucccuccccuuccagaauauucacccgaucacaauuggcaagugcccuaaguaugugaaaagcaccaagcugcggcuugccacaggccugcgcaacguucccucuauccagagcagagggcucuuuggagcuauugccggcuucaucgaagggggauggaccggcaugguggacgggugguacggauaucaucaccagaaugaacaaggcuccggcuacgccgcugaucugaaaucuacgcagaacgcgaucgacaagauuacaaauaaagucaacagcgugaucgagaagaugaauacccaguuuaccgccguugggaaggaguucaaccaccuugaaaaacggauugagaaucugaacaagaaaguggaugacggauuccucgauaucuggacauacaaugcugaacugcugguccuccuggagaacgaacgcacccuugacuaucaugauuccaaugugaagaaccuguacgagaaagucagaaaccagcucaagaauaacgccaaggagauuggcaauggguguuuugaguucuaucacaaaugcgacaacacauguauggaaagcgugaagaauggaacguacgauuauccuaaauacucugaagaggccaagcugaaccgggaagagaucgacggcguuaaacuugaguccacccgcaucuaucaaauucuggcuaucuacagcacaguggccucuucccucguccuggugguuagccugggggcgauuuccuuuuggaugugcucuaauggcagccuccagugcagaaucuguauuuga

SEQ ID NO: 202011 - RNA, 1701 nt, Artificial Sequence; identical to SEQ ID NO: 198526
  derived and/or modified CDS sequence (opt5) from hemagglutinin__InfluenzaA__AGJ73337

SEQ ID NO: 202012 - RNA, 1701 nt, Artificial Sequence; identical to SEQ ID NO: 198526
  derived and/or modified CDS sequence (opt5) from hemagglutinin__InfluenzaA__AGJ73339

SEQ ID NO: 202013 - RNA, 1701 nt, Artificial Sequence; identical to SEQ ID NO: 198526
  derived and/or modified CDS sequence (opt5) from hemagglutinin__InfluenzaA__AGJ73341

SEQ ID NO: 202014 - RNA, 1701 nt, Artificial Sequence
  derived and/or modified CDS sequence (opt5) from hemagglutinin__InfluenzaA__AGJ73343
augaaggccauccuggugguccuccuguacaccuucgcuacagccaacgcggacacgcuuugcauuggcuaucacgcuaauaacagcaccgauacaguugacaccgugcuggagaaaaaugugacagucacccauuccgugaaccuccuggaagauaagcagaaugggaaacuuuguaagcugagaggaguugcuccccuccaccugggcaaaugcaacaucgccggguggauucugggaaauccugagugugaaucucucagcacagccuccucuuggagcuacaucguggagaccuccucuagcgacaacggcacgugcuauccgggggauuuuauuaauuacgaagaacugcgggagcaacuuuccagcgucucuuccuucgaacgcuuugagaucuuccccaagaccagcucuuggccuaaccaugacuccaauaagggagugacagccgcuuguccccacgccggcgcgaaaucuuuuuauaagaaccugaucuggcucguuaaaaagggcaauagcuacccuaaacuguccaagagcuauauuaacgauaaggggaaagaagugcuuguccuguggggaauccaucaccccuccaccucugccgaccagcagagccucuaccagaaugcugaugccuacguguucgugggcacauccaaguauagcaaaaaguuuaaaccugagauugcugucagaccgaagguucgggaccaagaggggcgcaugaacuacuauuggacccugguggaacccggagauaaaaucacguucgaggccacaggcaaccugcucgugccuagauacgcguuugccauggaacggaaugcugggucuggaauuaucauuuccgacacccccguccacgauugcaacacaaccugucagaccccuaagggcgccaucaauacaagccugcccuuccagaacauccauccgauuacgaucggcaagugcccuaaauaugugaagucuaccaaacuucgccuggcuacagggcucagaaauguucccagcauucagucccggggacuguuuggcgccaucgccggguucauugagggaggcuggaccgggaugguggacggaugguacggcuaucaccaucaaaacgaacagggcucuggguacgcugcggaccuuaagagcacacagaaugccaucgauaaaaucaccaacaaggucaauuccgugauugagaagaugaacacgcaguuuacagcuguuggaaaagaguucaaucaccuggaaaagcgcaucgagaaccucaauaaaaagguggacgauggcuuccuggacauuuggaccuacaacgccgaacugcucguccugcuugagaaugaaagaacccuggauuaucacgacagcaacgugaaaaaccucuacgagaagguccggucucaacugaagaauaacgccaaagagaucgggaauggauguuuugaguucuaucauaagugcgauaacacauguauggaguccgugaaaaauggcaccuacgacuauccuaaguacagcgaagaggcuaaacuuaaccgcgaagagauugaugggguuaagcuggagucuacaagaaucuaucagauccucgccauuuacuccacgguggcgagcucccugguccuggugguuucucucggcgcuaucagcuuuuggaugugcuccaauggaucucugcagugccggauuuguaucuga

SEQ ID NO: 202015 - RNA, 1701 nt, Artificial Sequence
  derived and/or modified CDS sequence (opt5) from hemagglutinin__InfluenzaA__AGJ73345
augaaggccauccuggugguccuccuguacaccuucgcuacagccaacgcggacacgcuuugcauuggcuaucacgcuaauaacagcaccgauacaguugacaccgugcuggagaaaaaugugacagucacccauuccgugaaccuccuggaagauaagcacaaugggaaacuuuguaagcugagaggaguugcuccccuccaucugggcaaaugcaacaucgccggguggauucugggaaauccugagugugaaucucucagcacagccuccucuuggagcuacaucguggagaccuccucuagcgacaacggcacgugcuauccgggggauuuuauuaauuacgaagaacugcgggagcagcuuuccagcgucucuuccuucgaacgcuuugagaucuuccccaagaccagcucuuggccuaaccacgacuccaauaagggagugacagccgcuuguccccaugccggcgcgaaaucuuuuuauaagaaccugaucuggcucguuaaaaagggcaauagcuacccuaaacuguccaagagcuauauuaacgauaaggggaaagaagugcuuguccuguggggaauccaccaccccuccaccucugccgaccaacagagccucuaccagaaugaggaugcuuacguguucgugggcacauccaaguauagcaaaaaguuuaaaccugagauugccgucagaccgaagguucgggaccaggaagggcgcaugaacuacuauuggacccugguggagcccggaaacaaaaucacguucgaagcuacaggcaaucugcucgugccuagauacgccuuugcgauggagcggaacgccgggucuggaauuaucauuuccgauacccccguccaugacugcaauacaaccugucaaaccccuaagggcgcuaucaacacaagccugcccuuccagaauauccacccgauuacgaucggcaagugcccuaaauaugugaagucuaccaaacuucgccuggccacagggcucagaaacguucccagcauucagucccggggacuguuuggcgcuaucgccggguucauugaaggaggcuggaccgggaugguggauggaugguacggcuaucaucaccagaaugagcaaggcucuggguacgccgcugaccuuaagagcacacagaacgcgaucgacaaaaucaccaauaaggucaacuccgugauugagaagaugaauacgcaguuuacagccguuggaaaagaguucaaccaccuggagaagcgcaucgaaaaucucaacaaaaagguggaugacggcuuccuggauauuuggaccuacaaugcugagcugcucguccugcuugaaaacgagagaacccuggacuaucaugauagcaacgugaaaaaucucuacgagaagguccggucucagcugaagaacaaugccaaagaaaucgggaacggauguuuugaguucuaucacaagugcgacaauacauguauggaauccgugaaaaacggcaccuacgauuauccuaaguacagcgaggaagccaaacuuaaucgcgaggagauugacgggguuaagcuggaaucuacaagaaucuaucaaauccucgcuauuuacuccacgguggccagcucccugguccuggugguuucucucggcgcgaucagcuuuuggaugugcuccaacggaucucugcagugccggauuuguaucuga

SEQ ID NO: 202016 - RNA, 1701 nt, Artificial Sequence; identical to SEQ ID NO: 199122
  derived and/or modified CDS sequence (opt5) from hemagglutinin__InfluenzaA__AGJ73347

SEQ ID NO: 202017 - RNA, 1701 nt, Artificial Sequence; identical to SEQ ID NO: 199122
  derived and/or modified CDS sequence (opt5) from hemagglutinin__InfluenzaA__AGJ73349

SEQ ID NO: 202018 - RNA, 1701 nt, Artificial Sequence
  derived and/or modified CDS sequence (opt5) from hemagglutinin__InfluenzaA__AGJ73351
augaaggccauccuggugguccuccuguacaccuucgcuacagccaacgcggacacgcuuugcauuggcuaucacgcuaauaacagcaccgauacaguugacaccgugcuggagaaaaaugugacagucacccauuccgugaaccuccuggaagauaagcacaaugggaaacuuuguaagcugagaggaguugcuccccuccaucugggcaaaugcaacaucgccggguggauucugggaaauccugagugugaaucucucagcacagccuccucuuggagcuacaucguggagaccuccucuagcgacaacggcacgugcuauccgggggauuuuauugacuacgaagaacugcgggagcagcuuuccagcgucucuuccuucgaacgcuuugagaucuuccccaagaccagcucuuggccuaaucacgauuccaacaagggagugacagccgcuuguccccaugccggcgcgaaaggcuuuuauaagaaucugaucuggcucguuaaaaaggggaacagcuacccuaaacugucuaaguccuauauuaaugacaagggaaaagaagugcuuguccuguggggcauccaccaccccagcaccacagccgaucaacagucccucuaccagaacgcugacaccuacguguucguggggacgucuagauauagcaagaaauuuaagccugagauugccauccggccgaaaaugcgcgaucaggagggaagaaugaauuacuauuggacacuggucgaacccggcgacaagauuaccuucgaggcuacagggaaccugguugugccucgguacgccuuugcgauggaacgcaacgccggauccggcaucauuaucagcgauacccccgugcaugacugcaauaccacaugucaaacgccuaaaggcgcuaucaacaccucucuccccuuccagaauauucacccgaucacaauugggaagugcccuaaguaugucaaauccaccaagcugagacuugccacaggacugcggaacgugcccagcauccagucucgcggccucuuuggggcuauugccggauucaucgagggcggguggaccggaaugguugacggcugguacggcuaucaucaccagaaugaacaagggagcggauacgccgcugaucugaaauccacgcagaacgcgaucgacaagauuacaaauaaagugaacucugucaucgagaagaugaauacccaguuuaccgccgugggcaaggaguucaaccaccuugagaaaagaauugagaaucugaacaagaaaguugaugacggguuccucgauaucuggacauacaaugcugaacugcuggugcuccuggagaacgaacggacccuugacuaucaugauagcaaugucaagaaccuguacgagaaagugcgcaaccagcucaagaauaacgccaaggagauuggaaauggcuguuuugaguucuaucacaaaugcgacaacacauguauggaauccgucaagaaugggacguacgauuauccuaaauacagcgaagaggccaagcugaacagagaagagaucgacggcgugaaacuugagucuacccggaucuaucaaauucuggcuaucuacuccacaguugccagcucucucgugcuggucgugucccugggagcgauuagcuuuuggaugugcuccaauggcucucuccagugccgcaucuguauuuga

SEQ ID NO: 202019 - RNA, 1701 nt, Artificial Sequence
  derived and/or modified CDS sequence (opt5) from hemagglutinin__InfluenzaA__AGJ73353
augaaggccauccuggugguccuccuguacaccuucgcuacagccaacgcggacacgcuuugcauuggcuaucacgcuaauaacagcaccgauacaguugacaccgugcuggagaaaaaugugacagucacccauuccgugaaccuccuggaagauaagcacaaugggaaacuuuguaagcugagaggaguugcuccccuccaucugggcaaaugcaacaucgccggguggauucugggaaauccugagugugaaucucucagcacagccuccucuuggagcuacaucguggagaccuccucuagcgacaacggcacgugcuauccgggggauuuuauuaauuacgaagaacugcgggagcagcuuuccagcgucucuuccuucgaacgcuuugagaucuuccccaagaccagcucuuggccuaaccacgacuccaauaagggagugacagccgcuuguccccaugccggcgcgaaaucuuuuuauaagaaccugaucuggcucguuaaaaagggcaauagcuacccuaaacuguccaagagcuauauuaacgauaaggggaaagaagugcuuguccuguggggaauccaccaccccuccaccucugccgaccaacagagccucuaccagaaugcugaugccuacguguucgugggcacauccaaguauagcaaaaaguuuaaaccugagauugcugucagaccgaagguucgggaccaggaggggcgcaugaacuacuauuggacccugguggaacccggagauaaaaucacguucgaggccacaggcaaccugcucgugccuagauacgcguuugccauggaacggaaugcugggucuggaauuaucauuuccgacacccccguccaugauugcaacacaaccugucaaaccccuaagggcgccaucaauacaagccugcccuuccagucuauccacccgauuacgaucggcaagugcccuaaauauguuaagagcaccaaacuucgccuggcuacagggcucagaaacgugcccuccauucagucucggggacuguuuggcgccaucgccggguucauugagggaggcuggaccgggaugguggacggaugguacggcuaucaucaccagaaugaacaaggcagcggguacgcugcggaccuuaaguccacacagaacgccaucgauaaaaucaccaauaaggucaacagcgugauugagaagaugaauacgcaguuuacagcuguuggaaaagaguucaaccaccuggaaaagcgcaucgagaaucucaacaaaaagguggacgauggcuuccuggacauuuggaccuacaaugccgaacugcucguccugcuugagaacgaaagaacccuggauuaucaugacucuaaugugaaaaaccucuacgagaagguccggucccagcugaagaacaaugccaaagagaucgggaacggauguuuugaguucuaucacaagugcgauaauacauguauggagagcgugaaaaacggcaccuacgacuauccuaaguacucugaagaggcuaaacuuaaucgcgaagagauugaugggguuaagcuggaguccacaagaaucuaucaaauccucgccauuuacagcacgguggcguccucucugguccuggugguuagccucggcgcuaucuccuuuuggaugugcucuaacggaagccugcagugccggauuuguaucuga

SEQ ID NO: 202020 - RNA, 1701 nt, Artificial Sequence
  derived and/or modified CDS sequence (opt5) from hemagglutinin__InfluenzaA__AGJ73355
augaaggccauccuggugguccuccuguacaccuucgcuacagccaacgcggacacgcuuugcauuggcuaucacgcuaauaacagcaccgauacaguugacaccgugcuggagaaaaaugugacagucacccauuccgugaaccuccuggaagauaagcacaaugggaaacuuuguaagcugagaggaguugcuccccuccaucugggcaaaugcaacaucgccggguggauucugggaaauccugagugugaaucucucagcacagccuccucuuggagcuacaucguggagaccuccucuagcgacaacggcacgugcuauccgggggauuuuauugacuacgaagaacugcgggagcagcuuuccagcgucucuuccuucgaacgcuuugagaucuuccccaagaccagcucuuggccuaaucacgauuccaacaagggagugacagccgcuuguccccaugccggcgcgaaaggcuuuuauaagaaucugaucuggcucguuaaaaaggggaacagcuacccuaaacugucuaaguccuauauuaaugacaagggaaaagaagugcuuguccuguggggcauccaccaccccagcaccacagccgaucaacagucccucuaccagaacgcugacaccuacguguucguggggacgucuagauauagcaagaaauuuaagccugagauugccauccggccgaaaguccgcgaucaggagggaagaaugaauuacuauuggacacugguugaacccggcgacaagauuaccuucgaggcuacagggaaccugguggugccucgguacgccuuugcgauggaacgcaacgccggauccggcaucauuaucagcgauacccccguccaugacugcaauaccacaugucaaacgccuaaaggcgcuaucaacaccucucuccccuuccagaauauucacccgaucacaauugggaagugcccuaaguaugugaaauccaccaagcugagacuugccacaggacugcggaacguucccagcauccagucucgcggccucuuuggggcuauugccggauucaucgagggcggguggaccggaaugguggacggcugguacggcuaucaucaccagaaugaacaagggagcggauacgccgcugaucugaaauccacgcagaacgcgaucgacaagauuacaaauaaagucaacucugugaucgagaagaugaauacccaguuuaccgccguuggcaaggaguucaaccaccuugagaaaagaauugagaaucugaacaagaaaguggaugacggguuccucgauaucuggacauacaaugcugaacugcugguccuccuggagaacgaacggacccuugacuaucaugauagcaaugugaagaaccuguacgagaaaguccgcaaccagcucaagaauaacgccaaggagauuggaaauggcuguuuugaguucuaucacaaaugcgacaacacauguauggaauccgugaagaaugggacguacgauuauccuaaauacagcgaagaggccaagcugaacagagaagagaucgacggcguuaaacuugagucuacccggaucuaucaaauucuggcuaucuacuccacaguggccagcucucucguccuggugguuucccugggagcgaccagcuuuuggaugugcuccaauggcucucuccagugccgcauuuguaucuga

SEQ ID NO: 202021 - RNA, 1701 nt, Artificial Sequence; identical to SEQ ID NO: 198939
  derived and/or modified CDS sequence (opt5) from hemagglutinin__InfluenzaA__AGJ73357

SEQ ID NO: 202022 - RNA, 1701 nt, Artificial Sequence
  derived and/or modified CDS sequence (opt5) from hemagglutinin__InfluenzaA__AGJ73361
augaaggccauccuggugguccuccuguacaccuucgcuacagccaacgcggacacgcuuugcauuggcuaucacgcuaauaacagcaccgauacaguugacaccgugcuggagaaaaaugugacagucacccauuccgugaaccuccuggaagauaagcacaaugggaaacuuuguaagcugagaggaguugcuccccuccaucugggcaaaugcaacaucgccggguggauucugggaaauccugagugugaaucucucagcacauccucuagcugguccuacaucguggagaccucuagcuccgacaacggcacgugcuauccgggggauuuuauugacuacgaagaacugcgggagcagcuuagcucugucuccagcuucgaacgcuuugagaucuuccccaagaccucuuccuggccuaaucacgauagcaacaagggagugacagccgccuguccccaugcuggcgccaaaggcuuuuauaagaaucugaucuggcucguuaaaaaggggaacucuuacccuaaacuguccaagagcuauauuaaugacaagggaaaagaagugcuuguccuguggggcauccaccaccccuccaccacagcggaucaacagucucucuaccagaacgccgacaccuacguguucguggggacgagcagauauuccaagaaauuuaagccugagauugcuauccggccgaaaguccgcgaucaggagggaagaaugaauuacuauuggacacugguugaacccggcgacaagauuaccuucgaggccacagggaaccugguggugccucgguacgcuuuugccauggaacgcaacgcgggaagcggcaucuucauuucugauacccccguccaugacugcaauaccacaugucaaacgccuaaaggcgccaucaacaccucccuccccuuucagaauauccacccgauuacaaucgggaagugcccuaaguaugugaaaagcaccaagcugagacuugcuacaggacugcggaacguucccucuauucagagccgcggccucuucggggccaucgcuggauuuauugagggcggguggaccggaaugguggacggcugguacggcuaucaucaccagaaugaacaaggguccggauacgccgccgaucugaaaucuacgcagaacgcuaucgacaagaucacaaauaaagucaacagcgugauugagaagaugaauacccaguucaccgcgguuggcaaggaguucaaccaccuugagaaaagaaucgagaaucugaacaagaaaguggaugacggguuucucgauauuuggacauacaaugccgaacugcugguccuccuggagaacgaacggacccuugacuaucaugauuccaaugugaagaaccuguacgagaaaguccgcaaccagcucaagaauaacgcuaaggagaucggaaauggcuguuucgaauuuuaucacaaaugcgacaacacauguauggagagcgugaagaaugggacguacgauuauccuaaauacucugaagaggccaagcugaacagagaagagauugacggcguuaaacuugaguccacccggaucuaucaaauccuggccauuuacagcacaguggcuucuucccucguccuggugguuagccugggagccaucuccuucuggaugugcucuaauggcagccuccagugccgcauuuguaucuga

SEQ ID NO: 202023 - RNA, 1701 nt, Artificial Sequence; identical to SEQ ID NO: 199122
  derived and/or modified CDS sequence (opt5) from hemagglutinin__InfluenzaA__AGJ73363

SEQ ID NO: 202024 - RNA, 1701 nt, Artificial Sequence; identical to SEQ ID NO: 198939
  derived and/or modified CDS sequence (opt5) from hemagglutinin__InfluenzaA__AGJ73365

SEQ ID NO: 202025 - RNA, 1701 nt, Artificial Sequence
  derived and/or modified CDS sequence (opt5) from hemagglutinin__InfluenzaA__AGJ73367
augaaggccauccuggugguccuccuguacaccuucgcuacagccaacgcggacacgcuuugcauuggcuaucacgcuaauaacagcaccgauacaguugacaccgugcuggagaaaaaugugacagucacccauuccgugaaccuccuggaagauaagcacaaugggaaacuuuguaagcugagaggaguugcuccccuccaucugggcaaaugcaacaucgccggguggauucugggaaauccugagugugaaucucucagcacagccuccucuuggccguacaucguggagaccagcuccucugacaacggcacgugcuaucccggggauuuuauuaauuacgaagaacugcgggagcagcuuagcuccgucagcucuuucgaacgcuuugagaucuucccuaagaccuccagcuggcccaaccacgacucuaauaagggaguggccgcugccuguccucaugcgggcgccaaauccuuuuauaagaaccugaucuggcucguuaaaaagggcaauagcuaccccaaacugucuaaguccuauauuaacgauaaggggaaagaagugcuuguccuguggggaauccaccacccuagcacauccgcugaccaacagucucucuaccagaaugccgaugcuuacguguucgugggcaccagcaaguauuccaaaaaguuuaaaccggagauugccgucagacccaagguucgggaccaggaggggcgcaugaacuacuauuggacacugguggaaccuggagauaaaaucaccuucgaggcgacgggcaaccugcucgugcccagauacgccuuugcuauggaacggaaugccgggagcggaauuaucauuucugacacaccuguccaagauugcaacaccacaugucagacccccaagggcgcuaucaauaccucccugccguuccagaacauccauccuauuacaaucggcaagugccccaaauauguuaagagcacgaaacuucgccuggccaccgggcucagaaaugugccuucuauucagagccggggacuguuuggcgccaucgcuggguucauugagggaggcuggacagggaugguggacggaugguacggcuaucaccaucaaaacgaacagggcuccggguacgcggccgaccuuaagucuacccagaaugcuaucgauaaaaucacaaacaaggucaauagcgugauugagaagaugaacacccaguuuacggccguuggaaaagaguucaaucaccuggaaaagcgcaucgagaaccucaauaaaaagguggacgauggcuuccuggacauuuggacauacaacgccgaacugcucguccugcuugagaaugaaagaacccuggauuaucacgacuccaacgugaaaaaccucuacgagaagguccggaaucaacugaagaacaaugcuaaagagaucgggaacggauguuuugaguucuaucauaagugcgauaauaccuguauggagagcgugaaaaacggcacauacgacuaucccaaguacucugaagaggccaaacuuaaucgcgaagagauugaugggguuaagcuggaguccaccagaaucuaucagauccucgcgauuuacagcacaguggcuucuucccugguccuggugguuagccucggcgccaucuccuuuuggaugugcucuaacggaagccugcagugccggauuuguaucuga

SEQ ID NO: 202026 - RNA, 1701 nt, Artificial Sequence
  derived and/or modified CDS sequence (opt5) from hemagglutinin__InfluenzaA__AGJ73369
augaaggccauccuggugguccuccuguacaccuucgcuacagccaacgcggacacgcuuugcauuggcuaucacgcuaauaacagcaccgauacaguugacaccgugcuggagaaaaaugugacagucacccauuccgugaaccuccuggaagauaagcacaaugggaaacuuuguaagcugagaggaguugcuccccuccaucugggcaaaugcaacaucgccggguggauucugggaaauccugagugugaaucucucagcacagccuccucuuggagcuacaucguggagaccuccucuagcgacaacggcacgugcuauccgggggauuuuauugacuacgaagaacugcgggagcagcuuuccagcgucucuuccuucgaacgcuuugagaucuuccccaagaccagcucuuggccuaaucacgauuccaacaagggagugacagccgcuuguccccaugccggcgcgaaaggcuuuuauaagaaucugaucuggcucguuaaaaaggggaacagcuacccuaaacugucuaaguccuauauuaaugacaagggaaaagaagugcuuguccuguggggcauccaccaccccagcaccacagccgaucaacagucccucuaccagaacgcugacaccuacguguucguggggacgucuagauauagcaagaaauuuaagccugagauugccauccggccgaaaguccgcgaucaggagggaagaaugaauuacuauuggacacugguugaacccggcgacaagauuaccuucgaggcuacagggaaccugguggugccucgguacgccuuugcgauggaacgcaacgccggauccggcaucauuaucagcgauacccccguccaugacugcaauaccacaugucaaacgccuaaaggcgcuaucaacaccucucuccccuuccagaauauucacccgaucacaauugggaagugcccuaaguaugugaaauccaccaagcugagacuugccacaggacugcggaacguucccagcauccagucucgcggccucuuuggggcuauugccggauucaucgagggcggguggaccggaaugguggacggcugguacggcuaucaucaccagaaugaacaagggagcggauacgccgcugaucugaaauccacgcagaacgcgaucgacaagauuacaaauaaagucaacucugugaucgagaagaugaauacccaguuuaccgccguuggcaaggaguucaaccaccuugagaaaagaauugagaaucugaacaagaaaguggaugacggguuccucgauaucuggacauacaaugcugaacugcugguccuccuggagaacgaacggacccuugacuaucaugauagcaaugugaagaaccuguacgagaaaguccgcaaccagcucaagaauaacgccaaggagauuggaaauggcuguuuugaguucuaucacaaaugcgacaacacauguauggaauccgugaagaaugggacguacgauuauccuaaauacagcgccgaagcuaagcugaacagagaggaaaucgacggcguuaaacuugagucuacccggaucuaucaaauucuggccaucuacuccacaguggcgagcucucucguccuggugguuucccugggagcuauuagcuuuuggaugugcuccaauggcucucuccagugccgcaucuguauuuga

SEQ ID NO: 202027 - RNA, 1701 nt, Artificial Sequence; identical to SEQ ID NO: 198526
  derived and/or modified CDS sequence (opt5) from hemagglutinin__InfluenzaA__AGJ73371

SEQ ID NO: 202028 - RNA, 1701 nt, Artificial Sequence
  derived and/or modified CDS sequence (opt5) from hemagglutinin__InfluenzaA__AGJ73373
augaaggccauccuggugguccuccuguacaccuucgcuacagccaacgcggacacgcuuugcauuggcuaucacgcuaauaacagcaccgauacaguugacaccgugcuggagaaaaaugugacagucacccauuccgugaaccuccuggaagauaagcacaaugggaaacuuuguaagcugagaggaguugcuccccuccaucugggcaaaugcaacaucgccggguggauucugggaaauccugagugugaaucucucagcacagccuccucuuggagcuacaucguggagaccuccucuagcgacaacggcacgugcuauccgggggauuuuauugacuacgaagaacugcgggagcagcuuuccagcgucucuuccuucgaacgcuuugagaucuuccccaagaccagcucuuggccuaaucacgauuccaacaagggagugacagccgcuuguccccaugccggcgcgaaaggcuuuuauaagaaucugaucuggcucguuaaaaaggggaacagcuacccuaaacugucuaaguccuauauuaaugacaagggaaaagaagugcuuguccuguggggcauccaccaccccagcaccacagccgaucaacagucccucuaccagaacgcugacaccuacguguucguggggacgucuagauauagcaagaaauuuaagccugagauugccauccggccgaaaguccgcgaucaggagggaagaaugaauuacuauuggacacugguugaacccggcgacaagauuaccuucgaggcuacagggaaccugguggugccucgguacgccuuugcgauggaacgcaacgccggauccggcaucauuaucagcgauacccccguccaugacugcaauaccacaugucaaacgccuaaaggcgcuaucaacaccucucaccccuuccagaauauucauccgaucacaauugggaagugcccuaaguaugugaaauccaccaagcucagacuggccacaggacuucggaacguucccagcauccagucucgcggccuguuuggggcuauugccggauucaucgagggcggguggaccggaaugguggacggcugguacggcuaucaccaccagaaugaacaagggagcggauacgccgcugaucucaaauccacgcagaacgcgaucgacaagauuacaaauaaagucaacucugugaucgagaagaugaauacccaguuuaccgccguuggcaaggaguucaaccaucuggagaaaagaauugagaaucuuaacaagaaaguggaugacggguuccuggauaucuggacauacaaugcugaacuccugguccugcucgagaacgaacggacccuggacuaucacgauagcaaugugaagaaccuuuacgagaaaguccgcaaccagcugaagaauaacgccaaggagauuggaaauggcuguuuugaguucuaucauaaaugcgacaacacauguauggaauccgugaagaaugggacguacgauuauccuaaauacagcgaagaggccaagcucaacagagaagagaucgacggcguuaaacuggagucuacccggaucuaucaaauucuugcuaucuacuccacaguggccagcucucugguccucgugguuucccugggagcgauuagcuuuuggaugugcuccaauggcucucugcagugccgcaucuguauuuga

SEQ ID NO: 202029 - RNA, 1701 nt, Artificial Sequence
  derived and/or modified CDS sequence (opt5) from hemagglutinin__InfluenzaA__AGJ73375
augaaggccauccuggugguccuccuguacaccuucgcuacagccaacgcggacacgcuuugcauuggcuaucacgcuaauaacagcaccgauacaguugacaccgugcuggagaaaaaugugacagucacccauuccgugaaccuccuggaagauaagcacaaugggaaacuuuguaagcugagaggaguugcgccccuccaucugggcaaaugcaacaucgccggguggauucugggaaauccugagugugaaucucucagcacagcuuccucuuggagcuacaucguggagaccuccucuagcgacaacggcacgugcuauccgggggauuuuauuaauuacgaagaacugcgggagcagcuuuccagcgucucuuccuucgaacgcuuugagaucuuccccgaaaccagcucuuggccuaaccacgacuccaauaagggagugacagccgcuuguccccaugccggcgccaagagcuuuuauaaaaaccugaucuggcucguuaagaaaggcaauucuuacccuaagcuguccaaaagcuauauuaacgauaaggggaaggaggugcuuguccuguggggaauccaccaccccuccaccacagccgaccaacagucucucuaccagaaugcugaugccuacguguucgugggcaccagcagauauuccaaaaaguuuaaaccugagauugcuauccggccgaagguccgcgaccaggaagggagaaugaacuacuauuggacgcugauugagcccggagauaaaaucacauucgaagccaccggcaaccugguugugccucgguacgcguuugccauggagcgcaaugcugggagcggaauuaucaucucugacacacccgugcaugauugcaacaccaccugucaaacaccugaaggcgccauuaauacgucccuccccuuccagaacauccacccgauuaccaucggcaagugcccuaaauaugucaagagcacaaagcugagacuugcuaccgggcugcggaaugugcccucuauucagagccgcggacucuuuggcgccaucgccggguucaucgagggaggcuggacagggaugguugacggaugguacggcuaucaucaccagaacgagcaaggcuccggguacgcugcggaccugaaaucuacccagaaugccauugauaagaucacgaacaaagugaauagcgucauugaaaagaugaacacacaguuuaccgcugugggaaaagaguucaaucaccuugaaaagagaaucgagaaccugaauaagaaaguugacgauggcuuccucgacauuuggaccuacaacgccgaacugcuggugcuccuggagaaugagcggacacuugauuaucaugacuccaacgucaagaaccuguacgaaaaagugcgcaaucagcucaagaacaaugccaaagagaucgggaacggauguuuugaguucuaucacaagugcgauaauaccuguauggagagcgucaagaacggcacauacgacuauccuaaauacucugaagaggcuaagcugaauagagaggaaaucgauggggugaaacuugaguccacgcggauuuaucaaauccuggccauuuacagcaccguugcgucuucccucgugcuggucgugagccugggcgcuaucuccuuuuggaugugcucuaacggaagccuccagugccgcauuuguaucuga

SEQ ID NO: 202030 - RNA, 1701 nt, Artificial Sequence
  derived and/or modified CDS sequence (opt5) from hemagglutinin__InfluenzaA__AGJ73377
augaaggccauccuggugguccuccuguacaccuucgcuacagccaacgcggacacgcuuugcauuggcuaucacgcuaauaacagcaccgauacaguugacaccgugcuggagaaaaaugugacagucacccauuccgugaaccuccuggaagauaagcacaaugggaaacuuuguaagcugagaggaguugcuccccuccaucugggcaaaugcaacaucgccggguggauucugggaaauccugagugugaaucucucagcacagccuccucuuggagcuacaucguggagaccuccucuagcgacaacggcacgugcuauccgggggauuuuauuaauuacgaagaacugcgggagcagcuuuccagcgucucuuccuucgaacgcuuugagaucuuccccaagaccagcucuuggccuaaccacgacuccaauaagggagugacagccagcugucccagagcuggcgccaaaucuuuuuauaagaaccugaucuggcucguuaaaaagggcaauuccuacccuaaacugagcaaguccuauauuaacgauaaggggaaagaagugcuuguccuguggggaauccaucaccccucuaccacagcggaccaacagagccucuaccagaaugccgaugcuuacguguucgugggcaccucccgguauagcaagaaauuuaagccugagauugccauccgcccgaaagucagagaccaggaggggcggaugaacuacuauuggacgcugguugaacccggagauaagauuacauucgaggcuaccggcaaccugcucgugccucgcuacgccuuugcgauggaaagaaaugccgggucuggaaucauuaucuccgacacacccgugcacgauugcaacaccaccugucaaacaccuaaaggcgcuaucaauacgagccugcccuuccagaacauucauccgaucaccauuggcaagugcccuaaguaugucaaaucuacaaaacuucggcuggccaccgggcuccgcaaugugcccagcauccaguccagaggacuguuuggcgcuauugccggguucaucgagggaggcuggacagggaugguugacggaugguacggcuaucaccaucagaacgaacaaggcucuggguacgccgcugaccuuaagagcacccagaaugcgaucgauaagauuacgaacaaagucaauuccgugaucgagaagaugaacacacaguuuaccgccgugggaaaggaguucaaucaccuggaaaaacggauugagaaccucaauaagaaaguugacgauggcuuccuggacaucuggaccuacaacgcugaacugcucgugcugcuugagaaugaacgcacacuggauuaucacgacagcaacgucaagaaccucuacgagaaagugagaaaucagcugaagaacaaugccaaggagauugggaacggauguuuugaguucaaucauaaaugcgauaacaccuguauggagucugucaagaauggcacauaugacuacccuaaauauuccgaagaggccaaacuuaacaaggaagagaucgauggggugaagcuggagagcacgcggaucuaccaaauucucgcuaucuauucuaccguugccuccagccuggugcuggucgugucccucggcgcgauuucuuuuuggaugugcagcaauggaucccugcagugccgcaucuguauuuga

SEQ ID NO: 202031 - RNA, 1701 nt, Artificial Sequence
  derived and/or modified CDS sequence (opt5) from hemagglutinin__InfluenzaA__AGJ73380
augaaggccauccuggugguccuccuguacaccuucgcuacagccaacgcggacacgcuuugcauuggcuaucacgcuaauaacagcaccgauacaguugacaccgugcuggagaaaaaugugacagucacccauuccgugaaccuccuggaagauaagcacaaugggaaacuuuguaagcugagaggaguugcuccccuccaucugggcaaaugcaacaucgccggguggauucugggaaauccugagugugaaucucucagcacagccuccucuuggagcuacaucguggagaccuccucuagcgacaacggcacgugcuauccgggggauuuuauuaauuacgaagaacugcgggagcagcuuuccagcgucucuuccuucgaacgcuuugagaucuuccccaagaccagcucuuggccuaaccacgacuccaauaagggagugacagccgcuuguccccaugccggcgcgaaauccuuuuauaagaaccugaucuggcucguuaaaaagggcaauucuuacccuaaacuguccaagagcuauauuaacgauaaggggaaagaagugcuuguccuguggggaauccaccaccccuccaccacagccgaccaacagucucucuaccagaaugcugaugccuacguguucgugggcaccagcagauauuccaagaaauuuaagccugagauugcuauccggccgaaaguccgcgggcaggagggaagaaugaacuacuauuggacgcugauugaacccggcgacaagaucacauucgaggccaccgggaaccugguugugccucgguacgcguuugccauggaacgcaaugcuggaagcggcauuaucaucucugauacacccgugcaugacugcaacuccaccugucaaaccccuaaaggcgccauuaauacaagccuccccuuccagaacauccacccgauuacgaucgggaagugcccuaaguaugucaaaucuaccaagcugagacuugcuacaggacugcggaaugugcccagcauucagucccgcggccucuuuggggccaucgccggauucaucgagggcggguggaccggaaugguugauggcugguacggcuaucaucaccagaacgaacaagggucuggauacgcugcggaccugaaaagcacacagaaugccauugacaagaucaccaacaaagugaauagcgucauugagaagaugaacacgcaguuuacagcugugggcaaggaguucaaucaccuugagaaaagaaucgagaaccugaauaagaaaguugaugacggguuccucgauauuuggaccuacaacgccgaacuguuugugcugcucgagaaugaacggacccuggacuaucaugauagcaacgucaaggaccuuuacgagaaagugcgcaaccagcugaagaauaacgccaaggagaucggaaauggcuguuucgaauuuuaucacaaaugcgauaacacauguauggagucugucaagaaugggaccuacgacuauccuaaauacuccgaagaggcuaagcucaacagagagaaaaucgauggcgugaagcuggaaagcacacggauuuaucaaauccuugccauuuacucuacgguugcguccagccuggugcucgucgugucccugggagcuaucucuuucuggaugugcagcaauggcucccugcagugccgcauuuguaucuga

SEQ ID NO: 202032 - RNA, 1701 nt, Artificial Sequence
  derived and/or modified CDS sequence (opt5) from hemagglutinin__InfluenzaA__AGK62991
augaagaccaucauugcccugagcuacauccucugccugguguucgcucagaaacuucccggcaacgacaauuccacagccacgcugugucucgggcaccaugcggucccuaacggaaccauuguuaagacaaucaccaaugaucaaauugaggugacaaacgcuaccgaacuggugcagucuagcuccacaggcgagaucugcgacucuccgcaccagauccuugauggggaaaauuguacccugauugacgcccuccugggagauccccagugcgacggcuuucaaaacaaaaagugggaucuguucgucgagagaagcaaagccuauuccaauuguuacccuuaugacgugcccgauuacgcuucucuccggagccugguugccuccagcgggacgcuugaauuuaacaaugagucuuucaacuggaccggagugacacagaauggcaccuccagcgcuugcauccgcagaucuaacuccagcuuuuucucucggcugaauuggcucacacaucugaacuuuaaguauccugcccuuaaugucaccaugcccaacaacgagcaguucgacaagcuguacauuuggggcgugcaccauccugggacggauaaagaccagaucuuucucuaugcgcaagccuccggacgcauuacaguuagcaccaagagaucccagcaggcugugaucccgaauauuggcucucggccccgcaucagaaacaucccuagccggauuuccaucuacuggacaauugucaaacccggggauauccugcugauuaauagcaccggaaaccucaucgccccucgcggcuacuucaagaucagaucugggaaauccagcauuaugcggucugacgcucccaucggaaaguguaauagcgaaugcauuaccccgaacggcuccaucccuaaugacaagcccuuucagaacgugaaucgcauuacauauggcgccuguccuagauacgugaaacaaucuacgcugaaacuugcgaccgggaugcggaacguccccgagaagcagacacgcggaaucuucggcgccaucgcuggguuuauugaaaauggaugggagggcaugguugaugggugguauggauucagacaccagaacagcgagggccggggccaagccgcugaccugaaguccacccaggccgccaucgaucagauuaaugggaaacucaacagacugaucggaaagacaaaugaaaaauuccaccagauugagaaggaauuuagcgagguggaaggccgcauccaagaccuugagaaguacguggaggauaccaaaauugaccuguggucuuauaacgcugaacuccuggucgcgcuggagaaccagcauacgaucgaucucacagacuccgaaaugaauaagcuguucgagaaaaccaagaaacagcuucgggaaaacgccgaggauauggggaauggaugcuuuaagaucuaccacaagugugacaacgcuugcauuggcagcaucagaaaugggaccuauaaccaugauguguaccgcgacgaggcccugaauaaccgguuccagauuaaaggcguugaacucaagucuggauacaaagacuggauccuguggauuuccuuugccaucagcugcuuccuucuguguguggcucuccugggcuuuaucaugugggccugccaaaaggggaauauuagauguaacaucugcauuuga

SEQ ID NO: 202033 - RNA, 1701 nt, Artificial Sequence
  derived and/or modified CDS sequence (opt5) from hemagglutinin__InfluenzaA__AGK62993
augaagaccaucauugcccugagcuacauccucugccugguguucgcucagaaacuucccggcaacgacaauuccacagccacgcugugucucgggcaccaugcggucccuaacggaaccauuguuaagacaaucaccaaugaucaaauugaggugacaaacgcuaccgaacuggugcagucuagcuccacaggcgagaucugcaauucuccgcaccagauccuugacggggaaaacuguacccugauugaugcccuccugggagacccccagugcgauggcuuucaaaauaaaaagugggaccuguucgucgagagaagcaaagcccauuccaacuguuauccuuacgaugugcccgacuaugcuucucuccggagccugguugccuccagcgggacgcuugaauuuaauaacgagucuuucaauuggaccggagugacacagaacggcaccuccagcgcuugcauccgcagaucuaauaacuccuuuuucagccggcugaauuggcucacacaccugaacuuuaaguacccugcccuuaacgucaccaugcccaauaacgagcaguucgauaagcuguauauuuggggcgugcaucacccugggacggacaaagaucagaucuuucucuacgcgcaagccucuggacgcauuacaguuuccaccaagagaagccagcaggcugugaucccgaauauuggcucccggccccgcgucagaaacaucccuucucgggugagcaucuauuggacaauugugaaacccggggacauccugcugauuaauuccaccggaaaccucaucgccccucgcggcuacuucaagauuagaagcgggaaaucuuccaucaugcggagcgaugcucccaucucuaaguguaauagcgccugcauuaccacaaacggauccaucccgaaugacaagccuuuucagaacgucaaucgcauuacguacggcgcgugucccagauauguuaaacaaaacacccugaaacuugccacaggcaugcggaaugugccugaaaaacagacccgcgggaucuucggagcuauugccggcuuuaucgagaacgggugggaaggaaugguggacggcugguacggguucagacaccagaauagcgagggacggggccaagcugccgaucugaagucuacacaggccgcuaucgaccagauuaacggcaaacucaacagacugaucgggaagaccaaugagaaauuccaucagauugaaaaggaguuuuccgaagucgagggacgcauccaagaucuugaaaaguauguggaggacacgaaaauugaucuguggagcuacaacgcggagcuccugguugcccuggaaaaucagcacacaaucgaccucaccgauucugagaugaacaagcuguucgaaaagaccaagaaacagcuucgggagaaugcugaagacaugggcaacgggugcuuuaagauuuaucauaagugugauaaugccugcaucggauccaucagaaacggcacauacgaccacgauguguaucgcgacgaggcccugaauaaccgguuccagauuaaaggggucgagcucaagagcggcuacaaagacuggauccuguggauuucuuuugcuaucuccugcuuccuucuguguguggcccuccugggauuuauuauguggagcugccaaaagggcaauaucagauguaacaucugcauuuga

SEQ ID NO: 202034 - RNA, 1701 nt, Artificial Sequence
  derived and/or modified CDS sequence (opt5) from hemagglutinin__InfluenzaA__AGK62995
augaagaccaucauugcccugagcuacauccucugccugguguucgcucagaaacuucccggcaacgacaauuccacagccacgcugugucucgggcaccaugcgggaccuaacggcaccauugucaagacaaucaccaaugaucaaauugagguuacaaacgcuaccgaacuggugcagucuagcuccacaggggagaucugcgacucuccgcaccagauccuugauggagaaaauuguacccugauugacgcccuccugggcgauccccagugcgacggguuucaaaacaaaaagugggaucuguucguggagagaagcaaagccuauuccaauuguuacccuuaugacguccccgauuacgcuucucuccggagccugguggccuccagcggaacgcuugaauuuaacaaugagucuuucaacuggaccggcguuacacagaauggcaccuccagcgcuugcauccgcagaucuaacaauuccuuuuucagccggcugaacuggcucacacaucugaauuuuaaguauccugcccuuaacgugaccaugcccaacaaugagcaguucgacaagcuguacauuuggggaguccaccauccugggacggauaaagaccagaucuuucucuaugcgcaaucuuccggccgcauuacagugagcaccaagagaucccagcaggccguuaucccgaacauugggucucggccccgcaucagaaauaucccuagccggauuuccaucuacuggacaauugugaaacccggagauauccugcugauuaacagcaccggcaaucucaucgcuccucgcggguacuucaagaucagaucuggaaaauccagcauuaugcggucugacgcccccaucggcaaguguaacagcgaaugcauuaccccgaauggcuccaucccuaacgacaagcccuuucagaaugucaaccgcauuacauauggggcuuguccuagauacgugaaacaaucuacgcugaaacuugccaccggaaugcggaaugugcccgagaagcagacacgcggcaucuucggggcgaucgccggauuuauugaaaacggcugggaggggauggucgauggaugguauggcuucagacaccagaauagcgagggccgggggcaagcugccgaccugaaguccacccaggcugccaucgaucagauuaacggaaaacucaauagacugaucggcaagacaaacgaaaaauuccaccagauugagaaggaauuuagcgagguugaagggcgcauccaagaccuugagaaguacguggaggauaccaaaauugaccuguggucuuauaacgccgaacuccugguggcucuggagaaucagcauacgaucgaucucacagacuccgaaaugaacaagcuguucgagaaaaccaagaaacagcuucgggaaaaugcggaggauaugggaaacggcugcuuuaagaucuaccacaagugugacaaugccugcauugggagcaucagaaacggcaccuauaaucaugaugucuaccgcgacgaggcucugaacaaucgguuccagauuaaaggaguggaacucaagucuggcuacaaagacuggauccuguggauuuccuuugccaucagcugcuuccuucuguguguugcccuccugggguuuaucaugugggcuugccaaaagggaaacauuagauguaauaucugcauuuga

SEQ ID NO: 202035 - RNA, 1701 nt, Artificial Sequence
  derived and/or modified CDS sequence (opt5) from hemagglutinin__InfluenzaA__AGK62997
augaagaccaucauugcccugagcuacauccucugccugguguucgcucagaaacuucccggcaacgacaauuccacagccacgcugugucucgggcaccaugcggucccuaacggaaccauuguuaagacaaucaccaaugaucaaauugaggugacaaacgcuaccgaacuggugcagucuagcuccacaggcgagaucugcaauucuccgcaccagauccuugacggggaaaacuguacccugauugaugcccuccugggagacccccagugcgauggcuuucaaaauaaaaagugggaccuguucgucgagagaagcaaagcccauuccaacuguuauccuuacgaugugcccgacuaugcuucucuccggagccugguugccuccagcgggacgcuugaauuuaauaacgagucuuucaauuggaccggagugacacagaacggcaccuccagcgcuugcauccgcagaucuaauaacuccuuuuucagccggcugaauuggcucacacaccugaacuuuaaguacccugcccuuaacgucaccaugcccaauaacgauaaguucgacaaacuguauauuuggggcgugcaucacccugggacggauaaggaccagaucuuucucuacgcgcaggccucuggacgcauuacaguuuccaccaaaagaagccaacaggcugugaucccgaauauuggcucccggccccgcgucagaaacaucccuucucgggugagcaucuauuggacaauugugaagcccggggauauccugcugauuaauuccaccggaaaccucaucgccccucgcggcuacuucaaaauuagaagcgggaagucuuccaucaugcggagcgacgcucccaucggaaaguguaauucugccugcauuaccccgaacggcagcaucccuaaugacaaacccuuucagaacgucaaucgcauuacauguggcgcgugcgccagauacguuaagcagaacacgcugaaacuugcuaccgggaugcggaaugugccugagaagcaaacacgcggaaucuucggcgccauugcuguguuuaucgaaaacgggugggagggaauggucgauggcugguauggguucagacaccaaaauuccgaaggacgggagcaggccgccgcuuuccagucuacccaggcggccaucgaccagauuaucggcaaacugaacagacucauuggcgagacaaacgaaaaguuucaucagaucgagaaagaguucagcgaaguggaacgccggauucaagcucuggagaaguacguugaggauaccaagaucgaccuuugguccuauaaugccgaacugcucguggcccuggagaaccagcacacgauugaucugacagacagcgaaaugaauaaacucuuugagaagaccaaaaagcagcugagagaaaacgcugaggauauggggaauggauguuucaaaaucuaccauaagugcgacaacgccugcaucggcucuauucgcaaugggaccuaugaucacgacgucuaccgggaugaggcgcuuaacaauagauuucagaucaagggaguggaacugaaauccggcuauaaggacuggauucucuggaucagcuucgcuauuucuuguuuucugcuuugcguugcccugcucggguucaucaugugguccugucaaaaaggcaacauccgcugcaauauuuguaucuga

SEQ ID NO: 202036 - RNA, 1701 nt, Artificial Sequence
  derived and/or modified CDS sequence (opt5) from hemagglutinin__InfluenzaA__AGK62999
augaagaccaucauugcccugagcuacauccucugccugguguucgcucagaaacuucccggcaacgacaauuccacagccacgcugugucucgggcaccaugcggucccuaacggaaccauuguuaagacaaucaccaaugaucaaauugaggugacaaacgcuaccgaacuggugcagucuagcuccacaggcgagaucugcaauucuccgcaccagauccuugacggggaaaacuguacccugauugaugcccuccugggagacccccagugcgauggcuuucaaaauaaaaagugggaccuguucgucgagagaagcaaagccuauuccaacuguuacccuuaugaugugcccgacuacgcuucucuccggagccugguugccuccagcgggacgcuugaauuuaauaacgagucuuucaauuggaccggagugacacagaacggcaccuccagcgcuugcauccgcagaucuaauaacuccuuuuucagccggcugaauuggcucacacaucugaacuuuaaguauccugcccuuaacgucaccaugcccaauaacgagcaguucgauaagcuguacauuuggggcgugcaccauccugggacggacaaagaucagaucuuucucuaugcgcaagccucuggacgcauuacaguuuccaccaagagaagccagcaggcugugaucccgaauauuggcucccggccccgcgucagaaacaucccuucucgggugagcaucuacuggacaauugugaaacccggggacauccugcugauuaauuccaccggaaaccucaucgccccucgcggcuacuucaagauuagaagcgggaaaucuuccaucaugcggagcgaugcucccaucggaaaguguaauucugccugcauuaccccgaacggcagcaucccuaaugacaagcccuuucagaacgucaaucgcauuacauauggcgcguguccuagauacguuaaacaaaacacgcugaaacuugccaccgggaugcggaaugugcccgaaaaacagacacgcggaaucuucggcgcuauugccggguuuaucgagaacggaugggaaggcaugguggacgggugguauggauucagacaccaaaauuccgagggccggggccaggcugccgaucugaagucuacccaggccgcuaucgaccagauuaacgggaaacucaacagacugaucggaaagacaaaugagaaauuccaccagauugaaaaggaguuuagcgaagucgagggccgcauccaagaucuugaaaaguacguggaggacaccaaaauugaucugugguccuauaacgcggagcuccugguugcccuggaaaaucagcauacgaucgaccucacagauagcgagaugaacaagcuguucgaaaagaccaagaaacagcuucgggagaaugcugaagacauggggaacggaugcuuuaagauuuaccacaagugugauaaugccugcaucggcucuaucagaaacgggaccuaugaccaugauguguaccgcgacgaggcccugaauaaccgguuccagauuaaaggcgucgagcucaaguccggauacaaagacuggauccuguggauuagcuuugcuaucucuugcuuccuucuguguguggcccuccugggcuuuauuaugugggcgugccaaaaggggaauaucagauguaacaucugcauuuga

SEQ ID NO: 202037 - RNA, 1701 nt, Artificial Sequence
  derived and/or modified CDS sequence (opt5) from hemagglutinin__InfluenzaA__AGK63001
augaagaccaucauugcccugagcuacauccucugccugguguucgcucagaaacuucccggcaacgacaauuccacagccacgcugugucucguccaccaugcgguuccuaacgggaccauugugaagacaaucaccaaugaucaaauugaggugacaaacgcuaccgaacugguccagucuagcuccacaggagagaucugcgacucuccgcaccagauccuugauggcgaaaauuguacccugauugacgcccuccugggggauccccagugcgacggauuucaaaacaaagagugggaucuguucguggaaagaagcaaggccuauuccaauuguuacccuuaugacguucccgauuacgcuucucuccggagccugguggccuccagcggcacgcuugaguuuaacaaugagucuuucaacuggaccggggucacacagaauggaaccuccagcgcuugcauccgcagaucuaacuccagcuuuuucucucggcugaauggccucacacaucugaacuuuaaauauccugcccuuaaugugaccaugcccaacaacgaacaguucgacaagcuguacauuuggggcguucaccauccugggacggauaaggaccagaucuuucucuaugcgcaauccagcggacgcauuacaguguccaccaaaagaucucagcaggccgucaucccgaauauuggcagccggccccgcaucagaaacaucccuucccggauuagcaucuacuggacaauugugaagcccggggauauccugcugauuaauucuaccggaaaccucaucgcuccucgcggcuacuucaaaaucagauccggaaagagcucuauuaugcggagcgacgcccccaucgggaaauguaauuccgagugcauuaccccgaacggcucuaucccuaaugacaagcccuuucagaacgugaaucgcauuacauauggcgcuuguccuagauacgucaagcaaagcacgcugaaacuugccaccgggaugcggaacguucccgaaaagcagacacgcggaaucuucggcgcgaucgccggguuuauugagaauggaugggagggcaugguggaugggugguauggauucagacaccagaacuccgaaggccgggagcaagcugccgacuuccagagcacccaggcugccaucgaucagauuaucggcaaacugaauagacucauugggaagacaaacgaaaaauuucaccaaaucgagaaggaguucucugaaguggagcgccggauucaggaccuggaaaaauacgucgaggauaccaagaucgaccuuugguccuauaaugccgaacugcucguggcucuggagaaccagcauacgaucgaucugacagacagcgaaaugaacaagcucuuugagaaaaccaagaaacagcugagagagaaugcggaagauaugggaaacggcugcuucaagauuuaccacaaaugugacaaugccugcaucgggucuauucgcaacggaaccuauaaucaugauguuuaccgggacgaggcucuuaacaauagauuucaaaucaagggcguggaacugaaguccggguacaaagacuggauucucuggaucagcuucgccaucuccugcuuucugcuuugugucgcccugcucggcuucauuauguggucuugccagaagggaaacauccgcuguaauauuugcaucuga

SEQ ID NO: 202038 - RNA, 1701 nt, Artificial Sequence
  derived and/or modified CDS sequence (opt5) from hemagglutinin__InfluenzaA__AGK63003
augaagaccaucauugcccugagcuacauccucugccugguguucgcucagaaacuucccggcaacgacaauuccacagccacgcugugucucgggcaccaugcgggaccuaacggcaccauugucaagacaaucaccaaugaucaaauugagguuacaaacgcuaccgaacuggugcagucuagcuccacaggggagaucugcgacucuccgcaccagauccuugauggagaaaauuguacccugauugacgcccuccugggcgauccccagugcgacggguuucaaaacaaaaagugggaucuguucaucgagagaagcaaagccuauuccaauuguuacccuuaugacgugcccgauuacgcuucucuccggagccuggucgccuccagcggaacgcuugaauuuaacaaugagucuuucaacuggaccggcgugacacagaauggcaccuccagcgcuugcauucgcagaucuaacuccagcuuuuucucucggcugaauuggcucacacaucugaacuuuaaguauccugcccuuaauguuaccaugcccaacaacgagcaguucgacaagcuguacaucuggggagugcaccauccugggacggauaaagaccagauuuuucucuaugcgcaauccagcggccgcaucacagucuccaccaagagaucucagcaggccgugauuccgaauaucgggagccggccccgcaucagaaacauuccuucccggaucagcauuuacuggacaaucguuaaacccggagauauucugcugaucaauucuaccggcaaccucaucgcuccucgcggguacuucaagauuagauccggaaaaagcucuaucaugcggagcgacgcccccauuggcaaguguaauuccgcuugcaucaccccgaacggcucuauuccuaaugacaagcccuuucagaacgugaaucgcaucacauauggggccuguccuagauacgucaaacaaagcacgcugaaacuugcgaccggaaugcggaacgugcccgaaaaacagacacgcggcaucuucggggccauugcuggauuuaucgagaauggcugggaagggaugguggauggaugguauggcuucagacaccagaacuccgagggccgggggcaagccgcugaccucaagagcacccaggccgccauugaucagaucaauggaaaacugaacagacugauuggcaagacaaaugagaaauuccaccagaucgaaaaggaguuuucugaagucgaggggcgcauucaagaccuugaaaaguacguugaggauaccaaaaucgaccugugguccuauaacgcugagcuccugguggcgcuggaaaaccagcauacgaucgaucucacagacagcgagaugaauaagcuguucgaaaagaccaagaaacagcuucgggagaacgccgaagauaugggaaauggcugcuuuaagauuuaccacaagugugacaacgcuugcaucgggucuauuagaaauggcaccuauaaccaugauguguaccgcgacgaggcccugaauaaccgguuccagaucaaaggagucgagcucaaguccggcuacaaagacuggauucuguggaucagcuuugccaucuccugcuuccuucuguguguggcucuccugggguuuauuaugugggccugccaaaagggaaauaucagauguaacauuugcaucuga

SEQ ID NO: 202039 - RNA, 1701 nt, Artificial Sequence
  derived and/or modified CDS sequence (opt5) from hemagglutinin__InfluenzaA__AGK63005
augaagaccaucauugcccugagcuacauccucugccugguguucgcucagaaacuucccggcaacgacaauuccacagccacgcugugucucguccaccaugcgguuccuaacgggaccauugugaagacaaucaccaaugaucaaauugaggugacaaacgcuaccgaacugguccagucuagcuccacaggagagaucugcgacucuccgcaccagauccuugauggcgaaaauuguacccugauugacgcccuccugggggauccccagugcgacggauuucaaaacaaaaagugggaucuguucguggagagaagcaaagccuauuccaauuguuacccuuaugacguucccgauuacgcuucucuccggagccugguggccuccagcggcacgcuugaauuuaacaaugagucuuucaacuggaccggggucacacagaauggaaccuccagcgcuugcauccgcagaucuaacuccagcuuuuucucucggcugaauggccucacacaucugaacuuuaaguauccugcccuugacgugaccaugcccaauaacgauaaguucgacaaacuguacauuuggggcguucaccauccugggacggauaaggaccagaucuuucucuaugcgcaguccagcggacgcauuacaguguccaccaaaagaucucaacaggccgucaucccgaacauuggcagccggccccgcaucagaaauaucccuucccggauuagcaucuacuggacaauugugaagcccggggacauccugcugauuaacucuaccggaaaucucaucgcuccucgcggcuacuucaaaaucagauccgggaaguccucuauuaugcggagcgaugcccccaucggaaaguguaacuccgagugcauuaccccgaauggcucuaucccuaacgacaaacccuuucagaaugugaaccgcauuacauauggcgcuuguccuagauacgucaagcagagcacgcugaaacuugccaccgggaugcggaauguucccgaaaagcaaacacgcggaaucuucggcgcgaucgccguguuuauugagaacgggugggaaggaaugguggauggcugguauggguucagacaccagaauagcgagggacgggagcaggcugccgacuuccaaagcacccaggcugccaucgaucagauuaacggcaaacugaauagacucaucggcaagacaaacgaaaaauuucaccagauugagaaggaguucucugaagucgaagggcgcauccaagaccuggagaaguacguggaggauaccaaaauugaccuuugguccuauaaugccgaacugcucguugcucuggagaaccagcauacgaucgaucugacagacagcgaaaugaacaagcucuuugagaaaaccaagaaacagcugcgggaaaaugcggaggauaugggaaacggcugcuucaagaucuaccacaagugugacaaugccugcauugggucuaucagaaacggaaccuauaaucaugacguguaccgcgaugaggcucuuaacaaucgguuucagauuaaaggcgucgaacugaaguccggguacaaagacuggauccucuggauuagcuucgccaucuccugcuuucugcuuuguguggcccugcucggcuucaucaugugggcuugccaaaagggaaacauuagauguaauaucugcauuuga

SEQ ID NO: 202040 - RNA, 1701 nt, Artificial Sequence
  derived and/or modified CDS sequence (opt5) from hemagglutinin__InfluenzaA__AGK63007
augaagaccaucauugcccugagcuacauccucugccugguguucgcucagaaacuucccggcaacgacaauuccacagccacgcugugucucgggcaccaugcggucccuaacggaaccauuguuaagacaaucaccaaugaucaaauugaggugacaaacgcuaccgaacuggugcagucuagcuccacaggcgagaucugcgacucuccgcaccagauccuugauggggaaaauuguacccugauugacgcccuccugggagauccccagugcgacggcuuucaaaacaaaaagugggaucuguucgucgagagaagcaaagcccauuccaauuguuauccuuacgacgugcccgauuaugcuucucuccggagccugguugccuccagcgggacgcuugaauuuaacaaugagucuuucaacuggaccggagugacacagaauggcaccuccagcgcuugcauccgcagaucuaacaauuccuuuuucagccggcugaacuggcucacacaccugaauuuuaaguacccugcccuuaacgucaccaugcccaacaaugagcaguucgacaagcuguauauuuggggcgugcaucacccugggacggauaaagaccagaucuuucucuacgcgcaagccucuggacgcauuacaguuuccaccaagagaagccagcaggcugugaucccgaacauuggcucccggccccgcgucagaaauaucccuucucgggugagcaucuauuggacaauugugaaacccggggauauccugcugauuaacuccaccggaaaucucaucgccccucgcggcuacuucaagauuagaagcgggaaaucuuccaucaugcggagcgacgcucccaucggaaaguguaacucugaaugcauuaccccgaauggcagcaucccuaacgacaagcccuuucagaaugucaaccgcauuacauacggcgccuguccuagauauguuaaacaaaauacgcugaaacuugcgaccgggaugcggaacgugcccgagaagcagacacgcggaaucuucggcgccauugcuggguuuaucgaaaauggaugggagggcaugguggaugggugguacggauucagacaccagaacuccgagggccggggccaagccgcugaccugaagucuacccaggccgccaucgaucagauuaaugggaaacucaacagacugaucggaaagacaaacgaaaaauuccaucagauugagaaggaauuuagcgaggucgaaggccgcauccaagaccuugagaaguauguggaggauaccaaaauugaccugugguccuacaaugcugaacuccugguugcgcuggagaaccagcacacgaucgaucucacagacagcgaaaugaauaagcuguucgagaaaaccaagaaacagcuucgggaaaacgccgaggauauggggaauggaugcuuuaagauuuaucauaagugugacaacgcuugcaucggcucuaucagaaaugggaccuacgaucacgacguguaucgcgacgaggcccugaacaaucgguuccagauuaaaggcgucgaacucaaguccggauacaaagauuggauccuguggauuagcuuugccaucucuugcuuccuucuguguguggcucuccugggcuuuauuaugugggccugccaaaaggggaacaucagauguaauaucugcauuuga

SEQ ID NO: 202041 - RNA, 1701 nt, Artificial Sequence
  derived and/or modified CDS sequence (opt5) from hemagglutinin__InfluenzaA__AGK63009
augaagaccaucauugcccugagcuacauccucugccugguguucgcucagaaacuucccggcaacgacaauuccacagccacgcugugucucgggcaccaugcggucccuaacggaaccauuguuaagacaaucaccaaugaucaaauugaggugacaaacgcuaccgaacuggugcagucuagcuccacaggcgagaucugcaauucuccgcaccagauccuugacggggaaaacuguacccugauugaugcccuccugggagacccccagugcgauggccugcaaaauaaaaagugggaccucuuugucgagagaagcaaagcccauuccaacuguuauccuuacgaugugcccgacuaugcuucucugcggagccuuguugccuccagcgggacgcuggaguucaauaacgaaucuuuuaauuggaccggagugacacagaacggcaccuccagcgcuugcauccgcagaucuaauaacuccuucuuuagccggcucaauuggcugacacaccuuaacuucaaguacccugcccugaacgucaccaugcccaauaacgagcaguuugauaagcucuauauuuggggcgugcaucacccugggacggacaaagaucagaucuuccuguacgcgcaagccucuggacgcauuacaguuuccaccaagagaagccagcaggcugugaucccgaauauuggcucccggccccgcgucagaaacaucccuucucgggugagcaucuauuggacaauugugaaacccggggacauccugcucauuaauuccaccggaaaccugaucgccccucgcggcuacuuuaagauuagaagcgggaaaucuuccaucaugcggagcgaugcucccaucggaaaguguaauucugccugcauuaccccgaacggcagcaucccuaaugacaagcccuuccagaacgucaaucgcauuacauacggcgcguguccuagauauguuaaacaaaacacgcuuaagcuggccaccgggaugcggaaugugcccgaaaaacagacacgcggaaucuuuggcgcuauugccggguucaucgagaacggaugggaaggcaugguggacgggugguacggauuuagacaccaaaauuccgagggccggggccaggcugccgaucucaagucuacccaggccgcuaucgaccagauuaacgggaaacugaacagacuuaucggaaagacaaaugagaaauuccaucagauugaaaaggaguucagcgaagucgagggccgcauccaagaucuggaaaaguauguggaggacaccaaaauugaucucugguccuacaacgcggagcugcugguugcccucgaaaaucagcacacgaucgaccugacagauagcgagaugaacaaacuuuuugaaaagaccaagaaacagcugcgggagaaugcugaagacauggggaacggaugcuucaagauuuaucauaagugugauaaugccugcaucggcucuaucagaaacgggaccuacgaccacgauguguaucgcgacgaggcccucaauaaccgguuucagauuaaaggcgucgagcugaaguccggauacaaagacuggauccuuuggauuagcuucgcuaucucuugcuuucugcucuguguggcccugcugggcuucauuaugugggcgugccaaaaggggaauaucagauguaacaucugcauuuga

SEQ ID NO: 202042 - RNA, 1701 nt, Artificial Sequence
  derived and/or modified CDS sequence (opt5) from hemagglutinin__InfluenzaA__AGK63011
augaagaccaucauugcccugagcuacauccucugccugguguucgcucagaaacuucccggcaacgacaauuccacagccacgcugugucucgggcaccaugcggucccuaacggaaccauuguuaagacaaucaccaaugaucaaauugaggugacaaacgcuaccgaacuggugcagucuagcuccacaggcgagaucugcgacucuccgcaccagauccuugauggggaaaauuguacccugauugacgcccuccugggagauccccagugcgacggcuuucaaaacaaaaagugggaucuguucgucgagagaagcaaagccuauuccaauuguuacccuuaugacgugcccgauuacgcuucucuccggagccugguugccuccagcgggacgcuugaauuuaacaaugagucuuucaacuggaccggagugacacagaauggcaccuccagcgcuugcauccgcagaucuaacaauuccuuuuucagccggcugaacuggcucacacaucugaauuuuaaguauccugcccuuaacgucaccaugcccaacaaugagcaguucgacaagcuguacauuuggggcgugcaccauccugggacggauaaagaccagaucuuucucuaugcgcaagccucuggacgcauuacaguuuccaccaagagaagccagcaggcugugaucccgaacauuggcucccggccccgcgucagaaauaucccuucucggaucagcauuuacuggacaaucgugaaacccggggauauucugcugaucaacuccaccggaaaucucauugccccucgcggcuacuucaagaucagaagcgggaaaucuuccaucaugcggagcgacgcucccauuggaaaguguaacucugaaugcaucaccccgaauggcagcauuccuaacgacaagcccuuucagaaugugaaccgcaucacauauggcgccuguccuagauacgucaaacaauccacgcugaagcuggcgaccgggaugcggaauguucccgagaaacagacacgcggaauuuucggcgccaucgcuggguuuaucgaaaacggaugggagggcaugguggaugggugguauggauucagacaccaaaauucugagggccggggccaggccgcugaccuuaagagcacccaggccgccauugaucagaucaacgggaaacucaauagacugauuggaaagacaaacgaaaaauuccaccagaucgagaaggaauuuuccgagguggaaggccgcauucaagaccuugagaaguacgucgaggauaccaaaaucgaccuguggagcuauaacgcugaacuccugguggcgcuggagaaucagcauacgauugaucucacagacucugaaaugaacaagcuguucgagaaaaccaagaaacagcuucgggaaaaugccgaggauauggggaacggaugcuuuaagaucuaccacaagugugacaaugcuugcaucggcuccauuagaaacgggaccuaugaucaugacguuuaccgcgacgaggcccugaauaaccgguuccagaucaaaggcguggaacucaagagcggauacaaagauuggauucuguggaucucuuuugccauuuccugcuuccuucugugugucgcucuccugggcuuuaucaugugggccugccaaaaggggaauaucagauguaacauuugcaucuga

SEQ ID NO: 202043 - RNA, 1701 nt, Artificial Sequence
  derived and/or modified CDS sequence (opt5) from hemagglutinin__InfluenzaA__AGK63013
augaagaccaucauugcccugagcuacauccucugccugguguucgcucagaaacuucccggcaacgacaauuccacagccacgcugugucucgggcaccaugcggucccuaacggaaccauuguuaagacaaucaccaaugaucaaauugaggugacaaacgcuaccgaacuggugcagucuagcuccacaggcgagaucugcaauucuccgcaccagauccuugacggggaaaacuguacccugauugaugcccuccugggagacccccagugcgauggcuuucaaaauaaaaagugggaccuguucgucgagagaagcaaagcccauuccaacuguuauccuuacgaugugcccgacuaugcuucucuccggagccugguugccuccagcgggacgcuugaauuuaauaacgagucuuucaauuggaccggagugacacagaacggcaccuccagcgcuugcauccgcagaucuaauaacuccuuuuucagccggcugaauuggcucacacaccugaacuuuaaguacccugcccuugaugucaccaugcccaacaaugagcaguucgacaagcuguauauuuggggcgugcaucacccugggacggauaaagaccagaucuuucucuacgcgcaagccucuggacgcauuacaguuuccaccaagagaagccagcaggcugugaucccgaacauuggcucccggccccgcgucagaaauaucccuucucgggugagcaucuauuggacaauugugaaacccggggauauccugcugauuaacuccaccggaaaucucaucgccccucgcggcuacuucaagauuagaagcgggaaaucuuccaucaugcggagcgacgcucccaucggaaaguguaacucugccugcauuaccccgaauggcagcaucccuaacgacaagcccuuucagaaugucaaccgcauuacauacggcgcgugugccagauauguuaaacaaaauacgcugaaacuugcuaccgggaugcggaacgugccugaaaagcagacacgcggaaucuucggcgccauugcuguguuuaucgagaaugggugggaaggaauggucgauggcugguacggguucagacaccagaacuccgagggacggggccaagccgccgcucugcagucuacccaggcggccaucgaccagauuacaggcaagcucaauagacugaucggggagaccaacgaaaaauuccaucaaauugagaaggaauuuagcgagguggaaggacgcauccaggcucuugagaaauauguugaggauacgaagauugaccugugguccuacaacgccgaacuccugguggcccuggagaaucagcacacaaucgaucucaccgacagcgaaaugaacaagcuguucgagaaaaccaagaaacagcuucgggaaaaugcugaggauaugggcaacgggugcuuuaagauuuaucauaaaugugacaaugccugcaucggaucuaucagaaacggcacauacgaucacgacgucuaucgcgaugaggcgcugaauaaccgguuccaaauuaaggggguggaacucaaguccggcuacaaagacuggauccuguggauuagcuuugcuaucucuugcuuccuucuguguguugcccuccugggauuuauuaugugguccugccagaagggcaauaucagauguaacaucugcauuuga

SEQ ID NO: 202044 - RNA, 1701 nt, Artificial Sequence
  derived and/or modified CDS sequence (opt5) from hemagglutinin__InfluenzaA__AGK63015
augaagaccaucauugcccugagcuacauccucugccugguguucgcucagaaacuucccggcaacgacaauuccacagccacgcugugucucgggcaccaugcggucccuaacggaaccauuguuaagacaaucaccaaugaucaaauugaggugacaaacgcuaccgaacuggugcagucuagcuccacaggcgagaucugcgacucuccgcaccagauccuugauggggaaaauuguacccugauugacgcccuccugggagauccccagugcgacggcuuucaaaacaaaaagugggaucuguucgucgagagaagcaaagccuauuccaauuguuacccuuaugacgugcccgauuacgcuucucuccggagccugguugccuccagcgggacgcuugaauuuaacaaugagucuuucaacuggaccggagugacacagaauggcaccuccagcgcuugcauccgcaagucuaacuccagcuuuuucucuagacugaauuggcucacacaucugaacuuuaaguauccugcccuuaaugucaccaugcccaacaacgagcaguucgacaaacuguacauuuggggcgugcaccauccugggacggauaaggaccagaucuuucucuaugcgcaauccagcggacggauuacaguuuccaccaaacgcucucagcaggccgugaucccgaauauuggcagcagaccccggauccgcaacaucccuuccagaauuagcaucuacuggacaauugucaagcccggggauauccugcugauuaauucuaccggaaaccucaucgcuccucggggcuacuucaaaauccgcuccggaaagagcucuauuaugagaagcgacgcccccaucgggaaguguaauuccgaaugcauuaccccgaacggcucuaucccuaaugacaaacccuuucagaacgugaaucggauuacauauggcgcuuguccucgcuacgugaagcaaagcacgcugaaacuugccaccgggaugagaaacguccccgagaagcagacacggggaaucuucggcgcgaucgccggguuuauugaaaauggaugggagggcaugguugaugggugguauggauuccgccaccagaacuccgagggcagaggccaagcugccgaccugaaaagcacccaggcugccaucgaucagauuaaugggaagcucaaccggcugaucggaaaaacaaaugaaaaguuccaccagauugagaaggaauuuucugagguggaaggcagaauccaagaccuugagaaauacguggaggauaccaagauugaccugugguccuauaacgccgaacuccuggucgcucuggagaaccagcauacgaucgaucucacagacagcgaaaugaauaaacuguucgagaagaccaaaaagcagcuucgcgaaaacgcggaggauauggggaauggaugcuuuaagaucuaccacaaaugugacaacgccugcauuggcucuauccggaaugggaccuauaaccaugauguguacagagacgaggcucugaauaaccgcuuccagauuaagggcguugaacucaaauccggauacaaggacuggauccuguggauuagcuuugccaucuccugcuuccuucuguguguggcccuccugggcuuuaucaugugggcuugccaaaaagggaauauucgguguaacaucugcauuuga

SEQ ID NO: 202045 - RNA, 1701 nt, Artificial Sequence; identical to SEQ ID NO: 199054
  derived and/or modified CDS sequence (opt5) from hemagglutinin__InfluenzaA__AGK63017

SEQ ID NO: 202046 - RNA, 1701 nt, Artificial Sequence
  derived and/or modified CDS sequence (opt5) from hemagglutinin__InfluenzaA__AGK63019
augaagaccaucauugcccugagcuacauccucugccugguguucgcucagaaacuucccggcaacgacaauuccacagccacgcugugucucgggcaccaugcggucccuaacggaaccauuguuaagacaaucaccaaugaucaaauugaggugacaaacgcuaccgaacuggugcagucuagcuccacaggcgagaucugcgacucuccgcaccagauccuugauggggaaaauuguacccugauugacgcccuccugggagauccccagugcgacggcuuucaaaacaaaaagugggaucuguucgucgagagaagcaaagccuauuccaauuguuacccuuaugacgugcccgauuacgcuucucuccggagccugguugccuccagcgggacgcuugaauuuaacaaugagucuuucaacuggaccggagugacacagaauggcaccuccagcgcuugcauccgcagaucuaacuccagcuuuuucucucggcugaauuggcucacacaucugaacuuuaaguauccugcccuuaaugucaccaugcccaacaacgagcaguucgacaagcuguacauuuggggcgugcaccauccugggacggauaaagaccagaucuuucucuaugcgcaauccagcggacgcauuacaguuuccaccaagagaucucagcaggccgugaucccgaauauuggcagccggccccgcaucagaaacaucccuucccggauuagcaucuacuggacaauugucaaacccggggauauccugcugauuaauucuaccggaaaccucaucgcuccucgcggcuacuucaagaucagauccgggaaaagcucuauuaugcggagcgacgcccccaucggaaaguguaauuccgaaugcauuaccccgaacggcucuaucccuaaugacaagcccuuucagaacgugaaucgcauuacauauggcgcuuguccuagauacgugaaacaaagcacgcugaagcuggccaccgggaugcggaacguccccgagaaacagacacgcggaaucuucggcgcgaucgccggguuuauugaaaauggaugggagggcaugguugaugggugguauggauucagacaccagaacuccgagggccggggccaagcugccgaccuuaagagcacccaggcugccaucgaucagauuaaugggaaacucaacagacugaucggaaagacaaaugaaaaauuccaccagauugagaaggaauuuucugagguggaaggccgcauccaagaccuugagaaguacguggaggauaccaaaauugaccugugguccuauaacgccgaacuccuggucgcucuggagaaccagcauacgaucgaucucacagacagcgaaaugaauaagcuguucgagaaaaccaagaaacagcuucgggaaaacgcggaggauauggggaauggaugcuuuaagaucuaccacaagugugacaacgccugcauuggcucuaucagaaaugggaccuaugaucaugacguguaccgcgacgaggcucugaacaaucgguuccagauuaaaggcguugaacucaaguccggauacaaagauuggauccuguggauuagcuuugccaucuccugcuuccuucuguguguggcccuccugggcuuuaucaugugggcuugccaaaaggggaacauuagauguaauaucugcauuuga

SEQ ID NO: 202047 - RNA, 1701 nt, Artificial Sequence; identical to SEQ ID NO: 201921
  derived and/or modified CDS sequence (opt5) from hemagglutinin__InfluenzaA__AGK63021

SEQ ID NO: 202048 - RNA, 1701 nt, Artificial Sequence
  derived and/or modified CDS sequence (opt5) from hemagglutinin__InfluenzaA__AGK63025
augaagaccaucauugcccugagcuacauccucugccugguguucgcucagaaacuucccggcaacgacaauuccacagccacgcugugucucgggcaccaugcggucccuaacggaaccauuguuaagacaaucaccaaugaucaaauugaggugacaaacgcuaccgaacuggugcagucuagcuccacaggcgagaucugcgacucuccgcaccagauccuugauggggaaaauuguacccugauugacgcccuccugggagauccccagugcgacggcuuucaaaacaaaaagugggaucuguucaucgagagaagcaaagccuauuccaauuguuacccuuaugacguccccgauuacgcuucucuccggagccugguggccuccagcgggacgcuugaauuuaacaaugagucuuucaacuggaccggaguuacacagaauggcaccuccagcgcuugcauucgcaagucuaacuccagcuuuuucucuagacugaauuggcucacacaucugaacuuuaaguauccugcccuuaaugugaccaugcccaacaacgagcaguucgacaaacuguacaucuggggcguccaccauccugggacggauaaggaccagauuuuucucuaugcgcaauccagcggacggaucacaguguccaccaaacgcucucagcaggccguuauuccgaauaucggcagcagaccccggauccgcaacauuccuuccagaaucagcauuuacuggacaaucgugaagcccggggauauucugcugaucaauucuaccggaaaccucaucgcuccucggggcuacuucaaaauucgcuccggaaagagcucuaucaugagaagcgacgcccccauugggaaguguaauuccgaaugcaucaccccgaacggcucuauuccuaaugacaaacccuuucagaacgucaaucggaucacauauggcgcuuguccucgcuacgugaagcaaagcacgcugaaacuugccaccgggaugagaaacgugcccgagaagcagacacggggaaucuucggcgcgauugccggguuuaucgaaaauggaugggagggcauggucgaugggugguauggauuccgccaccagaacuccgagggcagaggccaagcugccgaccugaaaagcacccaggcugccauugaucagaucaaugggaagcucaaccggcugauuggaaaaacaaaugaaaaguuccaccagaucgagaaggaauuuucugagguugaaggccgcauucaagaccuugagaaauacguggaggauaccaagaucgaccugugguccuauaacgccgaacuccugguggcucuggagaaccagcauacgaucgaucucacagacagcgaaaugaauaaacuguucgagaagaccaaaaagcagcuuagagaaaacgcggaggauauggggaauggaugcuuuaagauuuaccacaaaugugacaacgccugcaucggcucuauucggaaugggaccuauaaccaugaugucuacagagacgaggcucugaauaaccgcuuccagaucaagggcguggaacucaaauccggauacaaggacuggauucuguggaucagcuuugccaucuccugcuuccuucuguguguugcccuccugggcuuuauuaugugggcuugccaaaaagggaauauccgguguaacauuugcaucuga

SEQ ID NO: 202049 - RNA, 1701 nt, Artificial Sequence; identical to SEQ ID NO: 201146
  derived and/or modified CDS sequence (opt5) from hemagglutinin__InfluenzaA__AGK63027

SEQ ID NO: 202050 - RNA, 1701 nt, Artificial Sequence
  derived and/or modified CDS sequence (opt5) from hemagglutinin__InfluenzaA__AGK63029
augaagaccaucauugcccugagcuacauccucugccugguguucgcucagaaacuucccggcaacgacaauuccacagccacgcugugucucgggcaccaugcggucccuaacggaaccauuguuaagacaaucaccaaugaucaaauugaggugacaaacgcuaccgaacuggugcagucuagcuccacaggcgagaucugcaauucuccgcaccagauccuugacggggaaaacuguacccugauugaugcccuccugggagacccccagugcgauggcuuucaaaauaaaaagugggaccuguucgucgagagaagcaaagcccauuccaacuguuauccuuacgaugugcccgacuaugcuucucuccggagccugguugccuccagcgggacgcuugaauuuaauaacgagucuuucaauuggaccggagugacacagaacggcaccuccagcgcuugcauccgcagaucuaauaacuccuuuuucagccggcugaauuggcucacacaccugaacuuuaaguacccugcccuuaacgucaccaugcccaauaacgagcaguucgauaagcuguauauuuggggcgugcaucacccugggacggacaaagaucagaucuuucucuacgcgcaagccucuggacgcauuacaguuuccaccaagagaagccagcaggcugugaucccgaauauuggcucccggccccgcgucagaaacaucccuucucgggugagcaucuauuggacaauugugaaacccggggacauccugcugauuaauuccaccggaaaccucaucgccccucgcggcuacuucaagauuagaagcgggaaaucuuccaucaugcggagcgaugcucccaucggaaaguguaauucugccugcauuaccacaaacggcagcaucccgaaugacaagccuuuucagaacgucaaucgcauuacguacggcgcgugucccagauauguuaaacaaaacacccugaaacuugccacagggaugcggaaugugccugaaaaacagacccgcggaaucuucggcgcuauugccggguuuaucgagaacggaugggaaggcaugguggacgggugguacggauucagacaccaaaauuccgagggccggggccaggcugccgaucugaagucuacacaggccgcuaucgaccagauuaacgggaaacucaacagacugaucggaaagaccaaugagaaauuccaucagauugaaaaggaguuuagcgaagucgagggccgcauccaagaucuugaaaaguauguggaggacacgaaaauugaucugugguccuacaacgcggagcuccugguugcccuggaaaaucagcacacaaucgaccucaccgauagcgagaugaacaagcuguucgaaaagaccaagaaacagcuucgggagaaugcugaagacauggggaacggaugcuuuaagauuuaucauaagugugauaaugccugcaucggcucuaucagaaacgggacauacgaccacgauguguaucgcgacgaggcccugaauaaccgguuccagauuaaaggcgucgagcucaaguccggauacaaagacuggauccuguggauuagcuuugcuaucucuugcuuccuucuguguguggcccuccugggcuuuauuaugugggcgugccaaaaggggaauaucagauguaacaucugcauuuga

SEQ ID NO: 202051 - RNA, 1701 nt, Artificial Sequence
  derived and/or modified CDS sequence (opt5) from hemagglutinin__InfluenzaA__AGK63031
augaagaccaucauugcccugagcuacauccucugccugguguucgcucagaaacuucccggcaacgacaauuccacagccacgcugugucucgggcaccaugcggucccuaacggaaccauuguuaagacaaucaccaaugaucaaauugaggugacaaacgcuaccgaacuggugcagucuagcuccacaggcgagaucugcgacucuccgcaccagauccuugauggggaaaauuguacccugauugacgcccuccugggagauccccagugcgacggcuuucagaaaaagaaaugggaucuguucgucgagagaagcaaggcccauuccaacuguuauccuuacgacgugcccgauuaugcuucucuccggagccugguugccuccagcgggacgcuugaauuuaauaacgagucuuucaauuggaccggagugacacagaacggcaccuccagcgcuugcauccgcagaucuaauaacuccuuuuucagccggcugaauuggcucacacaccugaacuuuaaguacccugcccuuaaugucauuaugcccaacaacgagcaguucgacaaacuguauaucuggggcgugcaucacccugggaccgauaaggaccagauuuuucucuacgcgcaagccucuggacgcaucacgguuuccacaaaaagaagccagcaggcugugauuccgaauaucggcucccggccccgcgucagaaacaucccuucucgggugagcauuuauuggaccaucgugaagcccggggauauucugcugaucaauuccacaggaaaccucauugccccucgcggcuacuucaaaaucagaagcgggaagucuuccaucaugcggagcgacgcucccauuggaaaguguaauucugccugcaucaccccgaacggcagcauuccuaaugacaaacccuuucagaacgucaaucgcaucaccuacggcgcguguccuagauauguuaagcaaaacacacugaaacuugccacggggaugcggaaugugcccgaaaagcagacccgcggaauuuucggcgcuaucgccggguuuaucgagaacggaugggaaggcaugguggaugggugguacggauucagacaccaaaauuccgagggccggggccaagcugccgaccugaaaucuacacaggccgcuauugaucagaucaacgggaagcucaauagacugauuggaaaaaccaacgagaaacuucaucagaucgaaaaggaguucagcgaagucgagggccgcauucuggaccucgaaaaauauguggaggauacaaagaucgaccugugguccuacaacgcggagcugcucguugcccuggaaaaucaacacaccauugaucuuacggacagcgagaugaacaaacuguuugaaaagacaaagaagcagcuccgggagaaugcugaagauauggggaacggaugcuucaagaucuaucauaaaugugacaaugccugcaucggcucuauuagaaacgggaccuacgaucacgacguguaucgcgacgaggcccugaauaaccgguuucagaucaagggcgucgagcuuaaauccggauacaaggauuggauucuguggaucagcuucgcuauuucuugcuuucuccuguguguggcccugcucggcuucaucaugugggcgugccagaaagggaauaucagauguaacauuugcaucuga

SEQ ID NO: 202052 - RNA, 1701 nt, Artificial Sequence
  derived and/or modified CDS sequence (opt5) from hemagglutinin__InfluenzaA__AGK63033
augaagaccaucauugcccugagcuacauccucugccugguguucgcucagaaacuucccggcaacgacaauuccacagccacgcugugucucgggcaccaugcggucccuaacggaaccauuguuaagacaaucaccaaugaucaaauugaggugacaaacgcuaccgaacuggugcagucuagcuccacaggcgagaucugcgacucuccgcaccagauccuugauggggaaaauuguacccugauugacgcccuccugggagauccccagugcgacggcuuucaaaacaaaaagugggaucugaucgucgagagaagcaaagccuauuccaauuguuacccuuaugacgugcccgauuacgcuucucuccggagccugguugccuccagcgggacgcuugaguucaacaaugaaucuuuuaacuggaccggagugacacagaauggcaccuccagcgcuugcauucgcaagucuaacuccagcuucuuuucuagacugaauuggcucacacaucugaacuucaaguauccugcccuuaaugucaccaugcccaacaacgagcaguuugacaaacuguacaucuggggcgugcaccauccugggacggauaaggaccagauuuuccucuaugcgcaagccuccggacggaucacaguuagcaccaaacgcucccagcaggcugugauuccgaauaucggcucuagaccccggauccgcaacauuccuagcagaaucuccauuuacuggacaaucgucaagcccggggauauucugcugaucaauagcaccggaaaccucaucgccccucggggcuacuuuaaaauucgcucugggaaguccagcaucaugagaucugacgcucccauuggaaaguguaauagcgaaugcaucaccccgaacggcuccauuccuaaugacaaacccuuccagaacgugaaucggaucacauauggcgccuguccucgcuacgugaagcaaucuacgcugaaacuugcgaccgggaugagaaacguccccgagaagcagacacggggaaucuuuggcgccauugcuggguucaucgaaaauggaugggagggcaugguugaugggugguauggauuucgccaccagaacagcgagggcagaggccaagccgcugaccugaaauccacccaggccgccauugaucagaucaaugggaagcucaaccggcugauuggaaaaacaaaugaaaaguuccaccagaucgagaaggaguucagcgaaguggaaggccgcauucaagaccuugagaaauacguggaggauaccaagaucgaccuguggucuuauaacgcugaacuccuggucgcgcuggagaaccagcauacgaucgaucucacagacuccgaaaugaauaaacuguuugagaagaccaaaaagcagcuuagagaaaacgccgaggauauggggaauggaugcuucaagauuuaccacaaaugugacaacgcuugcaucggcagcauucggaaugggaccuaugaucaugacguguacagagacgaggcccugaacaaucgcuuucagaucaagggcguugaacucaaaucuggauacaaggauuggauucuguggaucuccuucgccaucagcugcuuucuucuguguguggcucuccugggcuucauuaugugggccugccaaaaagggaacauccgguguaauauuugcaucuga

SEQ ID NO: 202053 - RNA, 1701 nt, Artificial Sequence
  derived and/or modified CDS sequence (opt5) from hemagglutinin__InfluenzaA__AGK63035
augaagaccaucauugcccugagcuacauccucugccugguguucgcucagaaacuucccggcaacgacaauuccacagccacgcugugucucgggcaccaugcggucccuaacggaaccauuguuaagacaaucaccaaugaucaaauugaggugacaaacgcuaccgaacuggugcagucuagcuccacaggcgagaucugcgacucuccgcaccagauccuugauggggaaaauuguacccugauugacgcccuccugggagauccccagugcgacggcuuucaaaacaaaaagugggaucuguucgucgagagaagcaaagccuauuccaauuguuacccuuaugacgugcccgauuacgcuucucuccggagccugguugccuccagcgggacgcuugaauuuaacaaugagucuuucaacuggaccggagugacacagaauggcaccuccagcgcuugcauccgcagaucuaacaauuccuuuuucagccggcugaacuggcucacacaucugaauuuuaaguauccugcccuuaacgucaccaugcccaacaaugagcaguucgacaagcuguacauuuggggcgugcaccauccugggacggauaaagaccagaucuuucucuaugcgcaagccucuggacgcauuacaguuuccaccaagagaagccagcaggcugugaucccgaacauuggcucccggccccgcaucagaaauaucccuucucggauuagcaucuacuggacaauugucaaacccggggauauccugcugauuaacuccaccggaaaucucaucgccccucgcggcuacuucaagaucagaagcgggaaaucuuccauuaugcggagcgacgcucccaucggaaaguguaacucugaaugcauuaccccgaauggcagcaucccuaacgacaagcccuuucagaaugugaaccgcauuacauauggcgccuguccuagauacgugaaacaauccacgcugaagcuggcgaccgggaugcggaauguccccgagaaacagacacgcggaaucuucggcgccaucgcuggguuuauugaaaacggaugggagggcaugguugaugggugguauggauucagacaccaaaauucugagggccggggccaggccgcugaccuuaagagcacccaggccgccaucgaucagauuaacgggaaacucaauagacugaucggaaagacaaacgaaaaauuccaccagauugagaaggaauuuuccgagguggaaggccgcauccaagaccuugagaaguacguggaggauaccaaaauugaccuguggagcuauaacgcugaacuccuggucgcgcuggagaaucagcauacgaucgaucucacagacucugaaaugaacaagcuguucgagaaaaccaagaaacagcuucgggaaaaugccgaggauauggggaacggaugcuuuaagaucuaccacaagugugacaaugcuugcauuggcuccaucagaaacgggaccuaugaucaugacguguaccgcgacgaggcccugaauaaccgguuccagauuaaaggcguugaacucaagagcggauacaaagauuggauccuguggauuucuuuugccaucuccugcuuccuucuguguguggcucuccugggcuuuaucaugugggccugccaaaaggggaauauuagauguaacaucugcauuuga

SEQ ID NO: 202054 - RNA, 1701 nt, Artificial Sequence
  derived and/or modified CDS sequence (opt5) from hemagglutinin__InfluenzaA__AGK63037
augaagaccaucauugcccugagcuacauccucugccugguguucgcucaggagcuucccggcaacgacaauuccacagccacgcugugucucgggcaccaugcggucccuaacggaaccauuguuaaaacaaucaccaaugaucaaauugaagugacaaacgcuaccgagcuggugcagucuagcuccacaggcgaaaucugcaauucuccgcaccagauccuugacggggagaacuguacccugauugaugcccuccugggagacccccagugcgauggcuuucaaaauaagaaaugggaccuguucgucgaaagaagcaaggcccauuccaacuguaauccuuaugaugugcccgacuacgcuucucuccggagccugguugccuccagcgggacgcuugaguuuaacaaugagucuuucaacuggaccggagugacacagaauggcaccuccagcgcuugcauccgcagaucuaacaauuccuuuuucagccggcugaacuggcucacacaccugaacuuuaaauauccugcccuuaaugucaccaugcccaacaaugaacaguucgauaagcuguacauuuggggcgugcaucacccugggacggacaaggaucagaucuuucucuaugcgcaagccucuggacgcauuacaguuuccaccaaaagaagccagcaggcugugaucccgaacauuggcucccggccccgcgucagaaauaucccuucucgggugagcaucuacuggacaauugugaagcccggggacauccugcugauuaacuccaccggaaaucucaucgccccucgcggcuauuucaaaauuagaagcgggaagucuuccaucaugcggagcgaugcucccaucggaaaauguaacucugccugcauuaccccgaauggcagcaucccuaacgacaagcccuuucagaaugucaaccgcauuacauacggcgcguguccuagauacguuaagcaaaauacgcugaaacuugccaccgggaugcggaacgugcccgagaagcagacacgcggaaucuucggcgcuauugccggguuuaucgaaaauggaugggagggcaugguggacgggugguauggauucagacaccagaacuccgagggccggggccaagcugccgaucugaaaucuacccaggccgcuaucgaccagauuaacgggaagcucaauagacugaucggaaaaacaaacgaaaaguuccaucagauugagaaagaauuuagcgaggucgaaggccgcauccaagaucuugagaaguacguggaggacaccaagauugaucugugguccuauaaugcgcagcuccugguugcccuggaaaaccagcacacgaucgaccucacagauagcgagaugaauaaacuguucgaaaagaccaaaaagcagcuucgggagaacgcugaagacauggggaauggaugcuuuaaaauuuaccauaagugugauaacgccugcaucggcucuaucagaaaugggaccuaugaccacgauguguaccgcgacgaggcccugaacaaucgguuccaaauuaagggcgucgagcucaaauccggauauaaggacuggauccuguggauuagcuuugcuaucucuugcuuccuucuguguguggcccuccugggcuuuauuaugugggcgugccagaaagggaacaucagauguaauaucugcauuuga

SEQ ID NO: 202055 - RNA, 1701 nt, Artificial Sequence
  derived and/or modified CDS sequence (opt5) from hemagglutinin__InfluenzaA__AGK63039
augaagaccaucauugcccugagcuacauccucugccugguguucgcucagaaacuucccggcaacgacaauuccacagccacgcugugucucgggcaccaugcggucccuaacggaaccauuguuaagacaaucaccaaugaucaaauugaggugacaaacgcuaccgaacuggugcagucuagcuccacaggcgagaucugcaauucuccgcaccagauccuugacggggaaaacuguacccugauugaugcccuccugggagacccccagugcgauggcuuucagaaaaagaaaugggaccuguucgucgagagaagcaaggcccauuccaauuguuauccuuacgaugugcccgacuaugcuucucuccggagccugguugccuccagcgggacgcuugaauuuaacaaugagucuuucaacuggaccggagugacacaaaauggcaccuccagcgcuugcauccgcagaucuaacaauuccuuuuucagccggcugaacuggcucacacaccugaauuuuaaguacccugcccuuaacgucacccugcccaacaaugagcaguucgauaaacucuauauuuggggcgugcaucacccugggacggacaaggaucagaucuuucuguacgcgcaagccucuggacgcauuacaguuuccaccaaaagaagccagcaggcugugaucccgaacauuggcucccggccccgcgucagaaauaucccuucucgggugagcaucuauuggacaauugugaagcccggggacauccugcucauuaacuccaccggaaaucugaucgccccucgcggcuacuucaaaauuagaagcgggaagucuuccaucaugcggagcgaugcucccaucucuaaguguaacagcgccugcauuaccccgaauggauccaucccuaacgacaaacccuuucagaaugucaaccgcauuacauacggcgcguguccuagauauguuaagcaaaauacgcuuaaacuggccaccggcaugcggaacgugcccgaaaagcagacacgcgggaucuucggagcuauugccggcuuuaucgagaaugggugggaaggaaugguggacggcugguacggguucagacaccagaacucugagggacggggccaagcugccgaucucaaaagcacccaggccgcuaucgaccagauuaauggcaagcugaacagacuuaucgggaaaacaaacgagaaguuccaucagauugaaaaggaguuuuccgaagucgagggacgcauccaagaucuggaaaaauauguggaggacaccaagauugaucucuggagcuacaaugcggagcugcugguugcccucgaaaaccagcacacgaucgaccugacagauucugagaugaauaaacuuuucgaaaagaccaaaaagcagcugcgggagaacgcugaagacaugggcaaugggugcuuuaagauuuaucauaaaugugauaacgccugcaucggauccaucagaaauggcaccuacgaccacgauguguaucgcgacgaggcccucaacaaucgguuccagauuaagggggucgagcugaaaagcggcuacaaggacuggauccuuuggauuucuuuugcuaucuccugcuuccugcucuguguggcccugcugggauuuauuauguggagcugccaaaaaggcaacaucagauguaauaucugcauuuga

SEQ ID NO: 202056 - RNA, 1701 nt, Artificial Sequence
  derived and/or modified CDS sequence (opt5) from hemagglutinin__InfluenzaA__AGK63041
augaagaccaucauugcccugagcuacauccucugccugguguucgcucagaaacuucccggcaacgacaauuccacagccacgcugugucucgggcaccaugcggucccuaacggaaccauuguuaagacaaucaccaaugaucaaauugaggugacaaacgcuaccgaacuggugcagucuagcuccacaggcgagaucugcgacucuccgcaccagauccuugauggggaaaauuguacccugauugacgcccuccugggagauccccagugcgacggccugcaaaacaaaaagugggaucucaucgucgagagaagcaaagcccauuccuauuguuacccuuaugacgugcccgauuacgcuucucugcggagccuuguugccuccagcgggacgcuggaauuuaauaacgagucuuucaauuggaccgaggugacacagaacggaaccuccagcgcuugcauucgcagaucuaauaacuccuuuuucagccggcucaauuggcugacacaccuuaacuuuaaguauccugcccugaaugucaccaugcccaacaacgaacaguucgacaagcucuacaucuggggcgugcaucacccuggcacggauaaagaccagauuuuucuguaugcgcaagccucugggcgcaucacaguuuccaccaagagaagccagcaggcugugauuccgaauaucggaucccggccccgcgucagaaacaucccuucucgggugagcauuuacuggacaaucgugaaacccggcgauauucugcucaucaauuccaccgggaaccugauugccccucgcggauacuucaagaucagaagcggcaaaucuuccaucaugcggagcgacgcucccauugggaaguguaauucugccugcaucaccccgaacggaagcauuccuaaugacaagcccuuucagaacgucaaucgcaucacauauggcgcguguccuagauacguuaaacaaaacacgcuuaagcuggccaccggcaugcggaaugugcccgagaaacagacacgcgggauuuucggagcuaucgccggcuuuaucgaaaacgggugggagggaaugguggauggcugguauggguucagacaccaaaauuccgagggacggggccaggcugccgaccucaagucuacccaggccgcuauugaucagaucaacggcaaacugaauagacuuauugggaagacaaacgaaaaauuucaucagaucgagaaggaguucagcgaagucgaaggacgcauucaagaccuggagaaguacguggaggauaccaaaaucgaccucugguccuauaacgcggaacugcugguugcccucgagaaucagcacacgauugaucugacagacagcgaaaugaacaaacuuuucgagaagaccaagaaacagcugcgggaaaaugcugaggauaugggcaacgggugcuuuaagaucuaccauaagugugacaaugccugcaucggaucuauuagaaacggcaccuaugaucacgacguguaccgcgacgaggcccucaauaaccgguuccagaucaaaggggucgaacugaaguccggcuacaaagauuggauucuuuggaucagcuuugcuauuucuugcuuccugcucuguguggcccugcugggauuuaucaugugggcgugccaaaagggcaauaucagauguaacauuugcaucuga

SEQ ID NO: 202057 - RNA, 1701 nt, Artificial Sequence
  derived and/or modified CDS sequence (opt5) from hemagglutinin__InfluenzaA__AGK63043
augaagaccaucauugcccugagcuacauccucugccugguguucgcucagaaacuucccggcaacgacaauuccacagccacgcugugucucgggcaccaugcggucccuaacggaaccauuguuaagacaaucaccaaugaucaaauugaggugacaaacgcuaccgaacuggugcagucuagcuccacaggcgagaucugcgacucuccgcaccagauccuugauggggaaaauuguacccugauugacgcccuccugggagauccccagugcgacggcuuucaaaacaaaaagugggaucuguucgucgagagaagcaaagccuauuccaauuguuacccuuaugacgugcccgauuacgcuucucuccggagccugguugccuccagcgggacgcuugaauuuaacaaugagucuuucaacuggaccggagugacacagaauggcaccuccagcgcuugcauccgcagaucuaacaauuccuuuuucagccggcugaacuggcucacacaucugaauuuuaaguauccugcccuuaacgucaccaugcccaacaaugagcaguucgacaagcuguacauuuggggcgugcaccauccugggacggauaaagaccagaucuuucucuaugcgcaagccucuggacgcauuacaguuuccaccaagagaagccagcaggcugugaucccgaacauuggcucccggccccgcgucagaaauaucccuucucgggugagcaucuacuggacaauugugaaacccggggauauccugcugauuaacuccaccggaaaucucaucgccccucgcggcuacuucaagauuagaagcgggaaaucuuccaucaugcggagcgacgcucccaucggaaaguguaacucugccugcauuaccccgaauggcagcaucccuaacgacaagcccuuucagaaugucaaccgcauuacauauggcgcguguccuagauacguuaaacaauccacgcugaaacuugccaccgggaugcggaaugugcccgaaaaacagacacgcggaaucuucggcgcuauugccggguuuaucgagaacggaugggaaggcaugguggaugggugguauggauucagacaccagaauagcgagggccggggccaagcugccgaccugaagucuacccaggccgcuaucgaucagauuaacgggaaacucaauagacugaucggaaagacaaacgagaaauuccaccagauugaaaaggaguuuuccgaagucgagggccgcauccaagaccuugaaaaguacguggaggauaccaaaauugaccuguggagcuauaacgcggagcuccugguugcccuggaaaaucagcauacgaucgaucucacagacucugagaugaacaagcuguucgaaaagaccaagaaacagcuucgggagaaugcugaagauauggggaacggaugcuuuaagauuuaccacaagugugacaaugccugcaucggcuccaucagaaacgggaccuaugaucaugacguguaccgcgacgaggcccugaauaaccgguuccagauuaaaggcgucgagcucaagagcggauacaaagauuggauccuguggauuucuuuugcuaucuccugcuuccuucuguguguggcccuccugggcuuuauuaugugggcgugccaaaaggggaauaucagauguaacaucugcauuuga

SEQ ID NO: 202058 - RNA, 1701 nt, Artificial Sequence
  derived and/or modified CDS sequence (opt5) from hemagglutinin__InfluenzaA__AGK63045
augaagaccaucauugcccugagcuacauccucugccugguguucgcucagaaacuucccggcaacgacaauuccacagccacgcugugucucgggcaccaugcggucccuaacggaaccauuguuaagacaaucaccaaugaucaaauugaggugacaaacgcuaccgaacuggugcagucuagcuccacaggcgagaucugcaauucuccgcaccagauccuugacggggaaaacuguacccugauugaugcccuccugggagacccccagugcgauggcuuucaaaagaagaaaugggaccuguucgucgagagaagcaaggccuauuccaauuguuacccuuaugaugugcccgacuacgcuucucuccggagccugguugccuccagcgggacgcuugaauuuaacaaugagucuuucaacuggaccggagugacacagaauggcaccuccagcgcuugcauccgcaagucuaacuccagcuuuuucucuagacugaauuggcucacacaucugaacuuuaaauauccugcccuuaaugucaccaugcccaacaacgagcaguucgauaagcuguacauuuggggcgugcaccauccugggacggacaaagaucagaucuuucucuaugcgcaagccuccggacggauuacaguuagcaccaagcgcucccagcaggcugugaucccgaauauuggcucuagaccccggauccgcaacaucccuagcagaauuuccaucuacuggacaauugucaaacccggggacauccugcugauuaauagcaccggaaaccucaucgccccucggggcuacuucaagauccgcucugggaaguccagcauuaugagaucugaugcucccaucggaaaauguaauagcgaaugcauuaccccgaacggcuccaucccuaaugacaagcccuuucagaacgugaaucggauuacauauggcgccuguccucgcuacgugaaacaaucuacgcugaaacuugcgaccgggaugagaaacguccccgagaaacagacacggggaaucuucggcgccaucgcuggguuuauugaaaauggaugggagggcaugguugacgggugguauggauuccgccaccagaacagcgagggcagaggccaagccgcugaucugaaguccacccaggccgccaucgaccagauuaaugggaaacucaaccggcugaucggaaagacaaaugaaaaguuccaccagauugagaaagaauuuagcgagguggaaggcagaauccaagaucuugagaaguacguggaggacaccaaaauugaucuguggucuuauaacgcucagcuccuggucgcgcuggaaaaccagcauacgaucgaccucacagauuccgagaugaauaagcuguucgagaaaaccaagaagcagcuucgcgaaaacgccgaagacauggggaauggaugcuuuaaaaucuaccacaagugugauaacgcuugcauuggcagcauccggaaugggaccuaugaccaugauguguacagagacgaggcccugaacaaucgcuuccaaauuaaaggcguugagcucaagucuggauacaaagacuggauccuguggauuuccuuugccaucagcugcuuccuucuguguguggcucuccugggcuuuaucaugugggccugccagaaggggaacauucgguguaauaucugcauuuga

SEQ ID NO: 202059 - RNA, 1701 nt, Artificial Sequence
  derived and/or modified CDS sequence (opt5) from hemagglutinin__InfluenzaA__AGK63047
augaaggccauccuggugguccuccuguacaccuucgcuacagccaacgcggacacgcuuugcauuggcuaucacgcuaauaacagcaccgauacaguugacaccgugcuggagaaaaaugugacagucacccauuccgugaaccuccuggaagauaagcacaaugggaaacuuuguaagcugagaggaguugcuccccuccaucugggcaaaugcaacaucgccggguggauucugggaaauccugagugugaaucucucagcacagccuccucuuggagcuacaucguggagaccuccucuagcgacaacggcacgugcuauccgggggauuuuauuaauuacgaagaacugcgggagcagcuuuccagcgucucuuccuucgaacgcuuugagaucuuccccaagaccagcucuuggccuaaccacgacuccaauaagggagugacagccgcuuguccccaugccggcgcgaaaucuuuuuauaagaaccugaucuggcucguuaaaaagggcaauagcuacccuaaacuguccaagagcuauauuaacgauaaggggaaagaagugcuuguccuguggggaauccaccaccccuccaccacagccgaccaacagucucucuaccagaaugcugaugccuacguguucgugggcaccagcagauauuccaagaaauuuaagccugagauugcuauccggccgaaaguccgcgacagagaggggcggaugaacuacuauuggacgcugauugaacccggagauaagaucacauucgaggccaccggcaaccugguugugccucgcuacgcguuugccauggaaagaaaugcugggagcggaauuaucaucucugacacacccgugcaugauugcaacaccgccugucagaccccugagggcgcuauuaauacaucccuccccuuccaaaacauccacccgauuacgaucggcaaaugcccuaaguaugucaagagcaccaaacugcggcuugccacagggcugcgcaaugugcccucuauucagagcagaggacucuuuggcgccaucgcuggguucaucgaaggaggcuggaccgggaugguugacggaugguacggcuaucaucaccagaacgagcagggcuccggguacgcggccgaccugaagucuacacaaaaugcuauugauaaaaucaccaacaaggugaauagcgucauugagaaaaugaacacgcaguuuacagccgugggaaaggaguucaaucaccuugagaagcggaucgaaaaccugaauaaaaagguugacgauggcuuccucgacauuuggaccuacaacgccgagcugcuggugcuccuggaaaaugagcgcacccuugauuaucaugacuccaacgucaaaaaccuguacgagaaggugagaaaucagcucaaaaacaaugcuaaggaaaucgggaacggauguuuugaguucuaucacaagugcgauaauacauguauggaaagcgucaaaaacggcaccuacgacuauccuaaguacucugaggaagccaaacugaaucgggagaagaucgauggggugaaacuugaguccacacgcauuuaucagauccuggcgauuuacagcacgguugcuucuucccucgugcuggucgugagccugggcgccaucuccuuuuggaugugcucuaacggaagccuccaaugcagaauuuguaucuga

SEQ ID NO: 202060 - RNA, 1683 nt, Artificial Sequence
  derived and/or modified CDS sequence (opt5) from hemagglutinin__InfluenzaA__AGK82158
augaacacccagauccugguguucgcccucauugcuaucauucccacaaaugccgacaagaucugccugggccaccaugcggucagcaacgggacgaaaguuaauacccuuacagagagaggaguggaaguggucaacgcuaccgagacaguggaacggaccaauauuccucgcaucuguuccaagggcaaaagaacaguugaucuggggcaaugcggacuccugggcaccaucacggggccgccccagugugaccaguuucuugaguucucugccgaucugauuaucgaacggcgcgagggaagcgacgugugcuacccuggcaaguuugucaacgaggaagcccucagacagauucugcgggaguccggcgggaucgauaaagaagcuaugggauucaccuauucuggcauucgcacaaauggggccaccagcgcuuguagacgguccggaucuagcuuuuacgccgagaugaaguggcugcucuccaacacagacaaugcggccuucccccaaaugaccaagagcuauaaaaacacgcgcaagucuccugcucugaucguguggggcauucaccauuccguuagcacagccgagcagaccaaacuuuacgggucuggaaauaagcuggugacagucggcuccagcaacuaucagcagucuuuugugcccuccccuggcgcuagaccgcaagugaaugggcucagcggacggaucgauuuccacuggcugaugcuuaaccccaaugacaccgucaccuuuuccuucaacggcgccuuuaucgcgccugaucgcgccucuuuccugagagggaaaagcaugggcauucaguccggaguucagguggacgcuaacugcgaaggggauuguuaccauagcggaggcacaaucauuucuaaucuccccuuucagaacaucgacucccgggccgugggcaagugcccucgcuaugucaagcaaagaagccugcugcucgcuacggggaugaaaaaugugcccgagauuccgaagggacggggccuguucggggccaucgccggauucaucgaaaacggcugggaggggcuuauugauggcugguacggauuuagacaccagaaugcucagggcgaagggaccgcggccgacuacaaaucuacacaaagcgcuaucgaccagauuaccggaaagcugaaccgccucaucgagaaaacaaaucagcaguucgagcugauugauaacgaauuuaaugagguugaaaagcaaaucggcaacgugaucaauuggacccgggacuccauuacggaggucuggucuuauaacgccgaacuucugguggccauggagaaucagcacacaaucgaucucgcugacagcgagauggauaaacuguacgaaagaguuaagcgccagcugcgggagaacgccgaagaggacgggaccggauguuucgaaauuuuucauaagugcgaugacgauuguauggcguccaucagaaauaacaccuaugaccacagcaaauaccgcgaggaggcuaugcagaaccggauucaaaucgauccugugaagcucucuuccggcuauaaagacgucauucugugguucagcuuuggggccucuugcuucauccuucuggccaucgugaugggccucgucuuuauuugcgugaagaauggaaacaugagauguacaaucugcauuuga

SEQ ID NO: 202061 - RNA, 1683 nt, Artificial Sequence
  derived and/or modified CDS sequence (opt5) from hemagglutinin__InfluenzaA__AGK84857
augaacacccagauccugguguucgcccucauugcuaucauucccacaaaugccgacaagaucugccugggccaccaugcggucagcaacgggacgaaaguuaauacccuuacagagagaggaguggaaguggucaacgcuaccgagacaguggaacggaccaauauuccucgcaucuguuccaagggcaaaagaacaguugaucuggggcaaugcggacuccugggcaccaucacggggccgccccagugugaccaguuucuugaguucucugccgaucugauuaucgaacggcgcgagggaagcgacgugugcuacccuggcaaguuugucaacgaggaagcccucagacagauucugcgggaguccggcgggaucgauaaagaagcuaugggauucaccuauucuggcauucgcacaaauggggccaccagcgcuuguagacgguccggaucuagcuuuuacgccgagaugaaguggcugcucuccaacacagacaaugcggccuucccccaaaucaccaagagcuauaaaaacacgcgcaagucuccugcucugauuguguggggcauccaccauuccguuagcacagccgagcagaccaaacuuuacgggucuggaaauaagcuggugacagucggcuccagcaacuaucagcagucuuuugugcccuccccuggcgcuagaccgcaagugaaugggcucagcggacggaucgauuuccacuggcugaugcuuaaccccaaugacaccgucaccuuuuccuucaacggcgccuuuauugcgccugaucgcgccucuuuccugagagggaaaagcaugggaauccaguccggcguucagguggacgcuaacugcgaaggggauuguuaccauagcggaggcacaauuaucucuaaucuccccuuucagaacauugacucccgggccgugggcaagugcccucgcuaugucaagcaaagaagccugcugcucgcuacggggaugaaaaaugugcccgagaucccgaagggacggggccuguucggggccaucgccggauucauugaaaacggcugggaggggcuuaucgauggcugguacggauuuagacaccagaaugcucagggcgaagggaccgcggccgacuacaaaucuacacaaagcgcuauugaccagaucaccggaaagcugaaccgccucauugagaaaacaaaucagcaguucgagcugaucgauaacgaauuuaaugagguugaaaagcaaaucggcaacgugauuaauuggacccgggacuccaucacggaggucuggucuuauaacgccgaacuucugguggccauggagaaucagcacacaauugaucucgcugacagcgagauggauaaacuguacgaaagaguuaagcgccagcugcgggagaacgccgaagaggacgggaccggauguuucgaaaucuuucauaagugcgaugacgauuguauggcguccauuagaaauaacaccuaugaccacagcaaauaccgcgaggaggcuaugcagaaccggauccaaauugauccugugaagcucucuuccggcuauaaagacgucauccugugguucagcuuuggggccucuugcuucauccuucuggccauugugaugggccucgucuuuaucugcgugaagaauggaaacaugagauguacaauuugcaucuga

SEQ ID NO: 202062 - RNA, 1683 nt, Artificial Sequence
  derived and/or modified CDS sequence (opt5) from hemagglutinin__InfluenzaA__AGK84860
augaacacccagauccugguguucgcccucauugcuaucauucccacaaaugccgacaagaucugccugggccaccaugcggucagcaacgggacgaaaguuaauacccuuacagagagaggaguggaaguggucaacgcuaccgagacaguggaacggaccaauauuccucgcaucuguuccaagggcaaaaugacaguugaucuggggcaaugcggacuccugggcaccaucacggggccgccccagugugaccaguuucuugaguucucugccgaucugauuaucgaaagacgggagggaagcgacgugugcuacccuggcaaguuugucaacgaggaagcccuccgccagauucugagagaguccggcgggaucgauaaagaagcuaugggauucaccuauucuggcauucggacaaauggggccaccagcgcuugucgcagauccggaucuagcuuuuacgccgagaugaaguggcugcucuccaacacagacaaugcggccuucccccaaaugaccaagagcuauaaaaacacgcggaagucuccugcucugaucguguggggcauucaccauuccguuagcacagccgagcagaccaaacuuuacgggucuggaaauaagcuggugacagucggcuccagcaacuaucagcagucuuuugugcccuccccuggcgcucgcccgcaagugaaugggcucagcggaagaaucgauuuccacuggcugaugcuuaaccccaaugacaccgucaccuuuuccuucaacggcgccuuuaucgcgccugaucgggccucuuuccugcgcgggaaaagcaugggcauucaguccggaguucagguggacgcuaacugcgaaggggauuguuaccauagcggaggcacaaucauuucuaaucuccccuuucagaacaucgacuccagagccgugggcaagugcccucgguaugucaagcaacgcagccugcugcucgcuacggggaugaaaaaugugcccgagauuccgaagggaagaggccuguucggggccaucgccggauucaucgaaaacggcugggaggggcuuauugauggcugguacggauuucggcaccagaaugcucagggcgaagggaccgcggccgacuacaaaucuacacaaagcgcuaucgaccagauuaccggaaagcugaacagacucaucgagaaaacaaaucagcaguucgagcugauugauaacgaauuuaaugagguugaaaagcaaaucggcaacgugaucaauuggacccgcgacuccauuacggaggucuggucuuauaacgccgaacuucugguggccauggagaaucagcacacaaucgaucucgcugacagcgagauggauaaacuguacgaacggguuaagagacagcugcgcgagaacgccgaagaggacgggaccggauguuucgaaauuuuucauaagugcgaugacgauuguauggcguccauccggaauaacaccuaugaccacagcaaauacagagaggaggcuaugcagaaccgcauucaaaucgauccugugaagcucucuuccggcuauaaagacgucauucugugguucagcuuuggggccucuugcuucauccuucuggccaucgugaugggccucgucuuuauuugcgugaagaauggaaacaugcgguguacaaucugcauuuga

SEQ ID NO: 202063 - RNA, 1683 nt, Artificial Sequence
  derived and/or modified CDS sequence (opt5) from hemagglutinin__InfluenzaA__AGK84863
augaacacccagauccugguguucgcccucauugcuaucauucccacaaaugccgacaagaucugccugggccaccaugcggucagcaacgggacgaaaguuaauacccuuacagagagaggaguggaaguggucaacgcuaccgagacaguggaacggaccaauauuccucgcaucuguuccaagggcaaaaagacaguugaucuggggcaaugcggacuccugggcaccaucacggggccgccccagugugaccaguuucuugaguucucugccgaucugauuaucgaaagacgggagggaagcgacgugugcuacccuggcaaauuugucaacgaggaagcccuccgccagauucugagagaguccggcgggaucgauaaggaagcuaugggauucaccuauucuggcauucggacaaauggggccaccagcgcuugucgcagauccggaucuagcuuuuacgccgagaugaaguggcugcucuccaacacagacaaugcggccuucccccaaaugaccaaaagcuauaagaacacgcggaaaucuccugcucugaucguguggggcauucaccauuccguuagcacagccgagcagaccaaacuuuacgggucuggaaauaagcuggugacagucggcuccagcaacuaucagcagucuuuugugcccuccccuggcgcucgcccgcaagugaaugggcucagcggaagaaucgauuuccacuggcugaugcuuaaccccaaugacaccgucaccuuuuccuucaacggcgccuuuaucgcgccugaucgggccucuuuccugcgcggaaagagcauggggauucaguccggcguucagguggacgcuaacugcgaaggggauuguuaccauagcggaggcacaaucauuucuaaucuccccuuucagaacaucgacuccagagccgugggcaagugcccucgguaugucaaacaacgcagccugcugcucgcuacggggaugaagaaugugcccgagauuccgaaaggaagaggccuguucggggccaucgccggauucaucgaaaacggcugggaggggcuuauugauggcugguacggauuucggcaccagaaugcucagggcgaagggaccgcggccgacuacaagucuacacaaagcgcuaucgaccagauuaccggaaaacugaacagacucaucgagaagacaaaucagcaguucgagcugauugauaacgaauuuaaugagguugaaaaacaaaucggcaacgugaucaauuggacccgcgacuccauuacggaggucuggucuuauaacgccgaacuucugguggccauggagaaucagcacacaaucgaucucgcugacagcgagauggauaagcuguacgaacggguuaagagacagcugcgcgagaacgccgaagaggacgggaccggauguuucgaaauuuuucauaaaugcgaugacgauuguauggcguccauccggaauaacaccuaugaccacagcaaguacagagaggaggcuaugcagaaccgcauucaaaucgauccugugaaacucucuuccggcuauaaggacgucauucugugguucagcuuuggggccucuugcuucauccuucuggccaucgugaugggccucgucuuuauuugcgugaaaaauggaaacaugcgguguacaaucugcauuuga

SEQ ID NO: 202064 - RNA, 1701 nt, Artificial Sequence
  derived and/or modified CDS sequence (opt5) from hemagglutinin__InfluenzaA__AGL07713
augaaggccauccuggugguccuccuguacaccuucgcuacagccaacgcggacacgcuuugcauuggcuaucacgcuaauaacagcaccgauacaguugacaccgugcuggagaagaaugugacagucaccagauccgugaaccuccuggaagauaagcauaaugggaaacuuuguaagcugcggggaguugcuccccuccaccugggcaaaugcaacaucgccggguggauucugggaaauccugagugugaaucucucagcacagccuccucuuggagcuacaucguggagaccuccucuagcgacaacggcacgugcuauccgggggauuuuauugacuacgaagaacugcgcgagcagcuuuccagcgucucuuccuucgaaagauuugagaucuuccccaagaccggaagcuggccuaaucaugauucuaacaagggcgugacagccgcuuguccccacgccggcgcgaaaggguuuuauaagaaucugaucuggcucguugaaaaaggaaacuccuacccuaagcugagcaaaucuuauauuaaugacaagggcaaggaggugcuuguccugugggggauccaucaccccuccaccacagccgaucaacagcggcucuaccagaacgcugacaccuacguguucgugggaacgagccgcuauuccaaaaaguuuaaaccugagauugccaucagaccgaagguccgggaucaggaaggccgcaugaauuacuauuggacacugguugagcccggggacaaaauuaccuucgaagcuacaggaaaccugguggugccuagauacgccuuugcgauggagcggaacgccggcucuggcaucauuaucagcgauacccccguccacgacugcaauaccacaugucaaacgccuaagggggcuaucaacaccucccuccccuuccagaauauucauccgaucacaauuggaaaaugcccuaaguauguuaagagcaccaaacugcgccuugccacaggccugagaaacgugcccucuauccagucccgggggcucuuuggagcuauugccggcuucaucgaagggggauggaccggcaugguggacggcugguacggguaucaccaucagaaugagcaaggaagcggcuacgccgcugaucugaagucuacgcagaacgcgaucgacaaaauuacaaauaaggucaacagcgugaucgagaaaaugaauacccaguuuaccgccguugggaaggaguucaaccaccuugagaagcgcauugaaaaucugaacaaaaagguggaugacggauuccucgauaucuggacauacaaugcugagcugcugguccuccuggaaaacgagagaacccuugacuaucacgauuccaaugugaaaaaccuguacgagaagguccggaaccagcucaaaaauaacgccaaggaaauuggcaauggguguuuugaguucuaucauaagugcgacaacacauguauggaaucugugaaaaauggcacguacgauuauccuaaguacagcgaggaagccaaacugaaccgcgaggagaucgacggaguuaaacuugaauccaccagaaucuaucaaauucuggcuaucuacagcacaguggccucuucccucguccuggugguuagccugggcgcgauuucuuuuuggaugugcuccaaugggagccuccagugccggaucuguauuuga

SEQ ID NO: 202065 - RNA, 1701 nt, Artificial Sequence
  derived and/or modified CDS sequence (opt5) from hemagglutinin__InfluenzaA__AGL09731
augaagaccaucauugcccugagcuacauccucugccugguguucgcucagaaaauucccggcaacgacaauuccacagccacgcuuugucuggggcaccaugcggucccuaacggaaccaucguuaagacaauuaccaaugauagaaucgaggugacaaacgcuaccgaacucgugcaaaauucuagcaucggcgagauuugcgacuccccgcaccagauccuggauggggaaaacuguacacuuauugacgcccugcucggagauccccagugcgacggcuuucagaauaaaaagugggaucuguucgucgagcggucuaaagccuauagcaacuguuacccuuaugacgugcccgauuacgcuucccugcgcucucucguugccagcuccgggacccuggaauuuaauaacgagagcuucaauuggacgggagugacccaaaacggcacaucuuccgcuugcaucagacggagcaauucuuccuuuuucagccgccuuaacuggcugacccaucucaauuuuaaguauccugcccugaacgucacaaugcccaacaaugagcaguucgacaaacuuuacauuuggggcgugcaccauccugggaccgauaaagaccagaucuuucuguaugcgcagucuuccggaagaauuacgguuagcacaaagcggucccaacaggccgugaucccgaacaucggcucucgcccccggauuagaaauaucccuagccgcauuuccaucuacuggaccauugucaaacccggggauauccuccugaucaacagcacaggaaaucugauugcuccuagaggcuacuucaagauccggucugggaaauccagcauuaugcgcucugacgcccccaucggaaaguguaagagcgaaugcauuaccccgaacggcuccaucccuaaugacaaacccuuucagaacgugaauagaaucaccuauggcgcuuguccucgguacgugaagcagucuacacucaaacuggccacggggaugcgcaacguccccgagaagcaaaccagaggaauuuucggcgcgaucgccggguuuauugaaaauggaugggagggcaugguugaugggugguauggauuccggcaccagaacagcgagggcagaggccaggcugccgaccuuaaauccacacaagcugccaucgaucagauuaaugggaagcugaaccgccucaucggaaaaaccaaugaaaaguuccaccagauugagaaggaauuuagcgagguggaaggccggauccaggaccuggagaaauacguggaggauacaaagaucgaccuuuggucuuauaacgccgaacugcucgucgcucuggagaaccaacauaccauugaucugacggacuccgaaaugaauaaacucuucgagaagacaaagaagcagcugagagaaaacgcggaggauauggggaauggaugcuuuaagaucuaccacaaaugugacaacgccugcauuggcagcauccgcaaugggaccuaugaucaugacguguaccgggacgaggcucuuaacaauagauuccagauuaagggcguugaacugaaaucuggauacaaggauuggauccucuggaucuccuuugccauuagcugcuuccugcuuuguguggcccugcucggcuuuaucaugugggcuugccagaaagggaacauucgcuguaauaucugcauuuga

SEQ ID NO: 202066 - RNA, 1701 nt, Artificial Sequence
  derived and/or modified CDS sequence (opt5) from hemagglutinin__InfluenzaA__AGL09732
augaagaccaucauugcccugagcuacauccucugccugguguucgcucagaaacuucccggcaacgacaauuccacagccacgcugugucucgggcaccaugcggucccuaacggaaccauuguuaagacaaucaccaaugauagaauugaggugacaaacgcuaccgaacuggugcaaaauucuagcaucggcgagaucugcgacuccccgcaccagauucuugauggggaaaacuguacacugaucgacgcccuccugggagauccccagugcgacggcuuucagaauaaaaagugggaucuguucgucgagcggucuaaagccuauagcaacuguuacccuuaugacgugcccgauuacgcuucccuccgcucucugguugccagcuccgggacccuugaauuuaauaacgagagcuucaauugggcuggagugacgcaaaacggcaccucuuccgccugcauuagaggcagcaauucuuccuuuuucagccggcugaacuggcucacacaucugaauuuuaaguauccugcgcuuaacgucaccaugcccaacaaugagcaguucgacaagcuguacaucuggggagugcaccauccugggacagauaaagaccagauuuuucucuaugcccagucuuccggccgcaucaccguuagcacgaagagaucccaacaggcugugauuccgaacaucgggucucggccccgcaucagaaauauuccuagccggaucuccauuuacuggacaaucgucaaacccggagauauucugcugaucaacagcaccggcaaucucaucgccccucgcggguacuucaagauuagaucuggaaaauccagcaucaugcggucugacgcucccauuggcaaguguaagagcgaaugcaucacaccgaacggcuccauuccuaaugacaaacccuuucagaacgugaaucgcaucaccuauggggccuguccuagauacgugaagcagucuacccugaaacuugcgacaggaaugcggaacguccccgagaagcaaacgcgcggcaucuucggggccauugcuggauuuaucgaaaauggcugggaggggaugguugauggaugguauggcuucagacaccagaacagcgagggccgggggcaggccgcugaccugaaauccacccaagccgccauugaucagaucaauggaaagcucaacagacugauuggcaaaacaaaugaaaaguuccaccagaucgagaaggaauuuagcgagguggaagggcgcauucaggaccuugagaaauacguggaggauaccaagaucgaccuguggucuuauaacgcugaacuccuggucgcgcuggagaaccaacauacaaucgaucucaccgacuccgaaaugaauaaacuguucgagaagacgaaaaagcagcuucgggaaaacgccgaggauaugggaaauggcugcuuuaagauuuaccacaaaugugacaacgcuugcaucgggagcauuagaaauggcacauaugaucaugacguguaccgcgacgaggcccugaacaaucgguuccagaucaagggaguugaacucaaaucuggcuacaaggauuggauucuguggaucuccuuugccaucagcugcuuccuucuguguguggcucuccugggguuuauuaugugggccugccagaaaggaaacaucagauguaauauuugcaucuga

SEQ ID NO: 202067 - RNA, 1701 nt, Artificial Sequence
  derived and/or modified CDS sequence (opt5) from hemagglutinin__InfluenzaA__AGL09734
augaagaccaucauugcccugagcuacauccucugccugguguucgcucagaaauuucccggcaacgacaauuccacagccacgcuuugucuggggcaccaugcggucccuaacggaaccauuguuaagacaaucaccaaugauagaauugaggugacaaacgcuaccgaacucgugcaaaauucuagcaucggcgagaucugcgacuccccgcaccagauucuggauggggaaaacuguacacuuaucgacgcccugcucggagauccccagugcgacggcuuccagaauaaaaagugggaucuguuuauugagcggucuaaagccuauagcaacuguuacccuuaugacguccccgauuacgcuucccugcgcucucucguggccagcuccgggacccuggaauuuaauaacgagagcuucaauuggacgggaguuacccaaaacggcacaucuuccgcuugcaucagacggagcaauucuuccuucuuuagccgccuuaacuggcugacccaucucaauuucaaguauccugcccugaacgugacaaugcccaacaaugagcaguuugacaaacuuuacauuuggggcguccaccauccugggaccgauaaagaccagaucuuccuguaugcgcagucuuccggaagaauuacggugagcacaaagcggucccaacaggccguuaucccgaacaucggcucucgcccccggauuagaaauaucccuagccgcauuuccaucuacuggaccauugugaaacccggggauauccuccugaucaacagcacaggaaaucugauugcuccuagaggcuacuuuaagauccggucugggaaauccagcauuaugcgcucugacgcccccaucggaaaguguaagagcgaaugcauuaccccgaacggcuccaucccuaaugacaaacccuuccagaacgucaauagaaucaccuauggcgcuuguccucgguacgugaagcagucuacacucaaacuggccacggggaugcgcaacgugcccgagaagcaaaccagaggaauuuuuggcgcgaucgccggguucauugaaaauggaugggagggcauggucgaugggugguauggauuccggcaccagaacagcgagggcagaggccaggcugccgaccuuaaauccacacaagcugccaucgaucagauuaaugggaagcugaaccgccucaucggaaaaaccaaugaaaaguuucaccagauugagaaggaguucagcgaaguugaaggccggauccaggaccuggagaaauacguggaggauacaaagaucgaccuuuggucuuauaacgccgaacugcucguggcucuggagaaccaacauaccauugaucugacggacuccgaaaugaauaaacucuuugagaagacaaagaagcagcugagagaaaacgcggaggauauggggaauggaugcuucaagaucuaccacaaaugugacaacgccugcauuggcagcauccgcaaugggaccuaugaucaugacgucuaccgggacgaggcucuuaacaauagauuucagauuaagggcguggaacugaaaucuggauacaaggauuggauccucuggaucuccuucgccauuagcugcuuucugcuuuguguugcccugcucggcuucaucaugugggcuugccagaaagggaacauucgcuguaauaucugcauuuga

SEQ ID NO: 202068 - RNA, 1701 nt, Artificial Sequence
  derived and/or modified CDS sequence (opt5) from hemagglutinin__InfluenzaA__AGL09735
augaagaccaucauugcccugagcuacauccucugccugguguucgcucagaaacuucccggcaacgacaauuccacagccacgcugugucucgggcaccaugcggucccuaacggaaccauuguuaagacaaucaccaaugauagaauugaggugacaaacgcuaccgaacuggugcaaaauucuagcaucggcgagaucugcgacuccccgcaccagauucuugauggggaaaacuguacacugaucgacgcccuccugggagauccccagugcgacggcuuucagaauaaaaagugggaucuguucgucgagcggucuaaagccuauagcaacuguuacccuuaugacgugcccgauuacgcuucccuccgcucucugguugccagcuccgggacccuugaauuuaauaacgagagcuucaauugggcuggagugacgcaaaacggcaccucuuccgccugcauuagaggcagcaauucuuccuuuuucagccggcugaacuggcucacacaucugaauuuuaaguauccugcgcuuaacgucaccaugcccaacaaugagcaguucgacaagcuguacaucuggggagugcaccauccugggacagauaaagaccagauuuuucucuaugcccagucuuccggccgcaucaccguuagcacgaagagaucccaacaggcugugauuccgaacaucgggucucggccccgcaucagaaauauuccuagccggaucuccauuuacuggacaaucgucaaacccggagauauucugcugaucaacagcaccggcaaucucaucgccccucgcggguacuucaagauuagaucuggaaaauccagcaucaugcggucugacgcucccauuggcaaguguaagagcgaaugcaucacaccgaacggcuccauuccuaaugacaaacccuuucagaacgugaaucgcaucaccuauggggccuguccuagauacgugaagcagucuacccugaaacuugcgacaggaaugcggaacguccccgagaagcaaacgcgcggcaucuucggggccauugcuggauuuaucgaaaauggcugggaggggaugguugauggaugguauggcuucagacaccagaacagcgagggccgggggcaggccgcugaccugaaauccacccaagccgccauugaucagaucaauggaaagcucaacagacugauuggcaaaacaaaugaaaaguuccaccagaucgagaaggaauuuagcgagguggaagggcgcauucaggaccuugagaaauacguggaggauaccaagaucgaccuguggucuuauaacgcugaacuccuggucgcgcuggagaaccaacauacaaucgaucucaccgacuccgaaaugaauaaacuguucgagaagacgaaaaagcagcuucgggaaaacgccgaggauaugggaaauggcugcuuuaagauuuaccacaaaugugacaacgcuugcaucgggagcauuagaaauggcacauaugaucaugacguguaccgcgacgaggcccugaacaaucgguuccagaucaagggaguugaacucaaaucuggcuacaaggauuggauucuguggaucuccuuugccaucagcugcuuccuucuguguguggcucuccugggguuuauuaugugggccugccagaaaggaaacaucagauguaauauuuccaucuga

SEQ ID NO: 202069 - RNA, 1701 nt, Artificial Sequence
  derived and/or modified CDS sequence (opt5) from hemagglutinin__InfluenzaA__AGL09736
augaagaccaucauugcccugagcuacauccucugccugguguucgcucagaaacuucccggcaacgacaauuccacagccacgcugugucucgggcaccaugcggucccuaacggaaccauuguuaagacaaucaccaaugaucaaauugaggugacaaacgcuaccgaacuggugcaaaauucuagcaucggcgagaucugcgacuccccgcaccagauucuugauggggaaaacuguacacugaucgacgcccuccugggagauccccagugcgacggcuuucagaauaaaaagugggaucuguucgucgagagaucuaaagccuauagcaacuguuacccuuaugacgugcccgauuacgcuucccuccggucucugguugccagcuccgggacccuugaauuuaauaacgagagcuucaauugggcuggagugacgcagaacggcaccucuuccgccugcauucgcggcagcaauucuuccuuuuucagcagacugaacuggcucacacaucugaauuuuaaguauccugcgcuuaacgucaccaugcccaacaaugagcaguucgacaagcuguacaucuggggagugcaccauccugggacagauaaagaccagauuuuucucuaugcccaaucuuccggccggaucaccguuagcacgaagcgcucccagcaggcugugauuccgaacaucgggucuagaccccggauccgcaauauuccuagcagaaucuccauuuacuggacaaucgucaaacccggagauauucugcugaucaacagcaccggcaaucucaucgccccucggggguacuucaagauucgcucuggaaaauccagcaucaugagaucugacgcucccauuggcaaguguaagagcgaaugcaucacaccgaacggcuccauuccuaaugacaaacccuuucagaacgugaaucggaucaccuauggggccuguccucgcuacgugaagcaaucuacccugaaacuugcgacaggaaugagaaacguccccgagaagcagacgcggggcaucuucggggccauugcuggauuuaucgaaaauggcugggaggggaugguugauggaugguauggcuuccgccaccagaacagcgagggcagagggcaagccgcugaccugaaauccacccaggccgccauugaucagaucaauggaaagcucaaccggcugauuggcaaaacaaaugaaaaguuccaccagaucgagaaggaauuuagcgagguggaagggcgcauucaagaccuugagaaauacguggaggauaccaagaucgaccuguggucuuauaacgcugaacuccuggucgcgcuggagaaccagcauacaaucgaucucaccgacuccgaaaugaauaaacuguucgagaagacgaaaaagcagcuuagagaaaacgccgaggauaugggaaauggcugcuuuaagauuuaccacaaaugugacaacgcuugcaucgggagcauucggaauggcacauaugaucaugacguguacagagacgaggcccugaacaaucgcuuccagaucaagggaguugaacucaaaucuggcuacaaggauuggauucuguggaucuccuuugccaucagcugcuuccuucuguguguggcucuccugggguuuauuaugugggccugccaaaaaggaaacauccgguguaauauuugcaucuga

SEQ ID NO: 202070 - RNA, 1701 nt, Artificial Sequence; identical to SEQ ID NO: 201955
  derived and/or modified CDS sequence (opt5) from hemagglutinin__InfluenzaA__AGL09737

SEQ ID NO: 202071 - RNA, 1701 nt, Artificial Sequence
  derived and/or modified CDS sequence (opt5) from hemagglutinin__InfluenzaA__AGL09739
augaagaccaucauugcccugagcuacauccucugccugguguucgcucagaaacuucccggcaacgacaauuccacagccacgcugugucucgggcaccaugcggucccuaacggaaccauuguuaagacaaucaccaaugauagaauugaggugacaaacgcuaccgaacuggugcaaaauucuagcaucggcgagaucugcgacuccccgcaccagauucuugauggggaaaacuguacacugaucgacgcccuccugggagauccccagugcgacggcuuucagaauaaaaagugggaucuguucgucgagcggucuaaagccuauagcuccuguuacccuuaugacgugcccgauuacgcuucucuccgcagccugguugccuccagcgggacccuugaauuuaacaaugagucuuucaacuggacgggagugacccaaaauggcacauccagcgcuugcauuagacggucuaacuccagcuuuuucucucgccugaauuggcucacccaucugaacuuuaaguauccugcccuuaaugucacaaugcccaacaacgagcaguucgacaagcuguacaucuggggcgugcaccauccugggaccgauaaagaccagauuuuucucuaugcgcaguccagcggaagaaucacgguuuccacaaagcggucucaacaggccgugauuccgaauaucggcagccgccccagaauccggaacauuccuucccgcaucagcauuuacuggaccaucgucaaacccggggauauucugcugaucaauucuacaggaaaccucaucgcuccuagaggcuacuucaagauucgguccgggaaaagcucuaucaugcgcagcgacgcccccauuggaaaguguaaguccgaaugcaucaccccgaauggcucuauuccuaacgacaaacccuuucagaaugugaacagaaucaccuauggcgcuuguccucgguacgugaagcagagcacacugaaacuugccacggggaugcgcaauguccccgagaagcaaaccagaggaaucuucggcgcgauugccggguuuaucgaaaacggaugggagggcaugguugaugggugguauggauuccggcaccaaaauuccgagggcagaggccaggcugccgaccugaaaagcacacaggcugccauugaucagaucaacgggaagcucaaucgccugauuggaaaaaccaacgaaaaguuccaccagaucgagaaggaauuuucugagguggaaggccggauucaggaccuugagaaauacguggaggauacaaagaucgaccugugguccuauaaugccgaacuccuggucgcucuggagaaccaacauaccaucgaucucacggacagcgaaaugaacaaacuguucgagaagaccaaaaagcagcuuagagaaaaugcggaggauauggggaacggaugcuuuaagauuuaccacaaaugugacaaugccugcaucggcucuauucgcaacgggacauaugaucauaauguguaccgggacgaggcucugaacaauagauuccagaucaagggcguugaacucaaauccggauacaaggacuggauucuguggaucagcuuugccaucuccugcuuccuucuguguguggcccuccugggcuuuauuaugugggcuugccagaaagggaacauccgcuguaauauuugcaucuga

SEQ ID NO: 202072 - RNA, 1701 nt, Artificial Sequence; identical to SEQ ID NO: 201907
  derived and/or modified CDS sequence (opt5) from hemagglutinin__InfluenzaA__AGL09740

SEQ ID NO: 202073 - RNA, 1701 nt, Artificial Sequence; identical to SEQ ID NO: 201146
  derived and/or modified CDS sequence (opt5) from hemagglutinin__InfluenzaA__AGL09741

SEQ ID NO: 202074 - RNA, 1701 nt, Artificial Sequence
  derived and/or modified CDS sequence (opt5) from hemagglutinin__InfluenzaA__AGL09742
augaagaccaucauugcccugagcuacauccucugccugguguucgcucaggagcuucccggcaacgacgauuccacagccacgcugugucucgggcaccaugcggucccuaauggaaccauuguuaaaacaaucaccaacgaccaaauugaagugacaaaugcuaccgagcuggugcagucuagcuccacaggcgaaaucugcaacucuccgcaccagauccuugauggggagaauuguacccugauugacgcccuccugggagauccccagugcgacggcuuucaaaacaagaaaugggaucuguucgucgaaagaagcaaggcccauuccaauuguuauccuuacgacgugcccgauuaugcuucucuccggagccugguugccuccagcgggacgcuugaguuuaacaaugagucuuucaacuggaccggagugacacagaauggcaccuccagcgcuugcauccgcagaucuaacaauuccuuuuucagccggcugaacuggcucacacaccugaauuuuaaauacccugcccuuaacgucaccaugcccaacaaugaacaguucgacaagcuguauauuuggggcgugcaucacccugggacggauaaggaccagaucuuucucuacgcgcaagccucuggacgcauuacaguuuccaccaaaagaagccagcaggcugugaucccgaacauuggcucccggccccgcgucagaaauaucccuucucgggugagcaucuauuggacaauugugaagcccggggauauccugcugauuaacuccaccggaaaucucaucgccccucgcggcuacuucaaaauuagaagcgggaagucuuccaucaugcggagcgacgcucccaucggaaaauguaacucugccugcauuaccccgaauggcagcaucccuaacgacaagcccuuucagaaugucaaccgcauuacauacggcgcguguccuagauauguuaagcaaaauacgcugaaacuugccaccgggaugcggaacgugcccgagacacagacccgcggaaucuucggcgcuauugccggguuuaucgaaaauggaugggagggcaugguggaugggugguacggauucagacaccagaacuccgagggccggggccaagcugccgaccugaagucuacacaggccgcuaucgaucagauuaaugggaaacucaacagacugaucggaaagaccaacgaaaaauuccaucagauugagaaggaauuuagcgaggucgaaggccgcauccaagaccuugagaaauauguggaggauacgaagauugaccugugguccuacaaugcggaacuccugguugcccuggagaaccagcacacaaucgaucucaccgacagcgaaaugaauaagcuguucgagaaaaccaagaaacagcuucgggaaaacgcugaggauauggggaauggaugcuuuaagauuuaucauaaaugugacaacgccugcaucggcucuaucagaaaugggacauacgaucacgacguguaucgcgacgaggcccugaacaaucgguuccagauuaagggcgucgaacucagauccggauacaaggauuggauccuguggauuagcuuugcuaucucuugcuuccuucuguguguggcccuccugggcuuuauuaugugggcgugccaaaaagggaacauccgcuguuccaucugcauuuga

SEQ ID NO: 202075 - RNA, 1701 nt, Artificial Sequence; identical to SEQ ID NO: 201930
  derived and/or modified CDS sequence (opt5) from hemagglutinin__InfluenzaA__AGL09744

SEQ ID NO: 202076 - RNA, 1701 nt, Artificial Sequence
  derived and/or modified CDS sequence (opt5) from hemagglutinin__InfluenzaA__AGL09745
augaagaccaucauugcccugagcuacauccucugccugguguucgcucagaaacuucccggcaacgacaauuccacagccacgcugugucucgggcaccaugcggucccuaacggaaccauuguuaagacaaucaccaaugauagaauugaggugacaaacgcuaccgaacuggugcaaaauucuagcaucggcgagaucugcgacuccccgcaccagauucuugauggggaaaacuguacacugaucgacgcccuccugggagauccccagugcgacggcuuucagaauaaaaagugggaucuguucgucgagcggucuaaagccuauagcaacuguuacccuuaugacgugcccgauuacgcuucccuccgcucucugguugccagcuccgggacccuugaauuuaauaacgagagcuucaauuggacgggagugacccaaaacggcacaucuuccgcuugcauuagacggagcaauucuuccuuuuucagccgccugaacuggcucacccaucugaauuuuaaguauccugcccuuaacgucacaaugcccaacaaugagcaguucgacaagcuguacaucuggggcgugcaccauccugggaccgauaaagaccagauuuuucucuaugcgcagucuuccggaagaaucacgguuagcacaaagcggucccaacaggccgugauuccgaacaucggcucucgccccagaauccggaauauuccuagccgcaucuccauuuacuggaccaucgucaaacccggggauauucugcugaucaacagcacaggaaaucucaucgcuccuagaggcuacuucaagauucggucugggaaauccagcaucaugcgcucugacgcccccauuggaaaguguaagagcgaaugcaucaccccgaacggcuccauuccuaaugacaaacccuuucagaacgugaauagaaucaccuauggcgcuuguccucgguacgugaagcagucuacacugaaacuugccacggggaugcgcaacguccccgagaagcaaaccagaggaaucuucggcgcgauugccggguuuaucgaaaauggaugggagggcaugguugaugggugguauggauuccggcaccagaacagcgagggcagaggccaggcugccgaccugaaauccacacaagcugccauugaucagaucaaugggaagcucaaccgccugauuggaaaaaccaaugaaaaguuccaccagaucgagaaggaauuuagcgagguggaaggccggauucaggaccuugagaaauacguggaggauacaaagaucgaccuguggucuuauaacgccgaacuccuggucgcucuggagaaccaacauaccaucgaucucacggacuccgaaaugaauaaacuguucgagaagaccaaaaagcagcuuagagaaaacgcggaggauguggggaauggaugcuuuaagauuuaccacaaaugugacaacacaugcaucggcagcauucgcaaugggaccuaugaucauaacguuuaccgggacgaggcccugaauaacagauuccagaucaagggcguggaacucaaaucuggauacaaggacuggauucuguggaucuccuuugcuaucagcugcuuccuucugugugucgcccuccugggcuuuauuaugugggccugccagaaagggaauauccgcuguaacauuugcaucuga

SEQ ID NO: 202077 - RNA, 1701 nt, Artificial Sequence; identical to SEQ ID NO: 202069
  derived and/or modified CDS sequence (opt5) from hemagglutinin__InfluenzaA__AGL09746

SEQ ID NO: 202078 - RNA, 1701 nt, Artificial Sequence; identical to SEQ ID NO: 201907
  derived and/or modified CDS sequence (opt5) from hemagglutinin__InfluenzaA__AGL09747

SEQ ID NO: 202079 - RNA, 1701 nt, Artificial Sequence; identical to SEQ ID NO: 201930
  derived and/or modified CDS sequence (opt5) from hemagglutinin__InfluenzaA__AGL09748

SEQ ID NO: 202080 - RNA, 1701 nt, Artificial Sequence; identical to SEQ ID NO: 201928
  derived and/or modified CDS sequence (opt5) from hemagglutinin__InfluenzaA__AGL09749

SEQ ID NO: 202081 - RNA, 1701 nt, Artificial Sequence; identical to SEQ ID NO: 202066
  derived and/or modified CDS sequence (opt5) from hemagglutinin__InfluenzaA__AGL09750

SEQ ID NO: 202082 - RNA, 1701 nt, Artificial Sequence; identical to SEQ ID NO: 201907
  derived and/or modified CDS sequence (opt5) from hemagglutinin__InfluenzaA__AGL09751

SEQ ID NO: 202083 - RNA, 1701 nt, Artificial Sequence; identical to SEQ ID NO: 202066
  derived and/or modified CDS sequence (opt5) from hemagglutinin__InfluenzaA__AGL09753

SEQ ID NO: 202084 - RNA, 1701 nt, Artificial Sequence
  derived and/or modified CDS sequence (opt5) from hemagglutinin__InfluenzaA__AGL09754
augaagaccaucauugcccugagcuacauccucugccugguguucgcucagaaacuucccggcaacgacaauuccacagccacgcugugucucgggcaccaugcggucccuaacggaaccauuguuaagacaaucaccaaugauagaauugaggugacaaacgcuaccgaacuggugcaaaauucuagcaucggcgagaucugcgacuccccgcaccagauucuugauggggaaaacuguacacugaucgacgcccuccugggagauccccagugcgacggcuuucagaauaaaaagugggaucuguucgucgagcggucuaaagccuauagcaacuguuacccuuaugacgugcccgauuacgcuucccuccgcucucugguugccagcuccgggacccuugaauuuaauaacgagagcuucaauuggacgggagugacccaaaacggcacaucuuccgcuugcauuagacggagcaauucuuccuuuuucagccgccugaacuggcucacccaucugaauuuuaaguauccugcccuuaacgucacaaugcccaacaaugagcaguucgacaagcuguacaucuggggcgugcaccauccugggaccgauaaagaccagauuuuucucuaugcgcagucuuccggaagaaucacgguuagcacaaagcggucccaacaggccgugauuccgaacaucggcucucgccccagaauccggaauauuccuagccgcaucuccauuuacuggaccaucgucaaacccggggauauucugcugaucaacagcacaggaaaucucaucgcuccuagaggcuacuucaagauucggucugggaaauccagcaucaugcgcucugacgcccccauuggaaaguguaagagcgaaugcaucaccccgaacggcuccauuccuaaugacaaacccuuucagaacgugaauagaaucaccuauggcgcuuguccucgguacgugaagcagucuacacugaaacuugccacggggaugcgcaacguccccgagaagcaaaccagaggaaucuucggcgcgauugccggguuuaucgaaaauggaugggagggcaugguugaugggugguauggauuccggcaccagaacagcgagggcagaggccaggcugccgaccugaaauccacacaagcugccauugaucagaucaaugggaagcucaaccgccugauuggaaaaaccaaugaaaaguuccaccagaucgagaaggaauuuagcgagguggaaggccggauucaggaccuugagaaauacguggaggauacaaagaucgaccuguggucuuauaacgccgaacuccuggucgcucuggagaaccaacauaccaucgaucucacggacuccgaaaugaauaaacuguucgagaagaccaaaaagcagcuuagagaaaacgcggaggauauggggaauggaugcuuuaagauuuaccacaaaugugacaacgccugcaucggcagcauucgcaaugggacauaugaucauaacguguaccgggacgaggcucugaauaacagauuccagaucaagggcguugaacucaaaucuggauacaaggacuggauucuguggaucuccuuugccaucagcugccuucugcucuguguggcccugcugggcuucauuaugugggcuugccagaaagggaauauccgcuguaacauuugcaucuga

SEQ ID NO: 202085 - RNA, 1701 nt, Artificial Sequence; identical to SEQ ID NO: 202069
  derived and/or modified CDS sequence (opt5) from hemagglutinin__InfluenzaA__AGL09756

SEQ ID NO: 202086 - RNA, 1701 nt, Artificial Sequence
  derived and/or modified CDS sequence (opt5) from hemagglutinin__InfluenzaA__AGL09758
augaaggccauccuggugguccuccuguacaccuucgcuacagccaacgcggacacgcuuugcauuggcuaucacgcuaauaacagcaccgauacaguugacaccgugcuggagaaaaaugugacagucacccauuccgugaaccuccuggaagauaagcacaaugggaaaaucuguaaacuuagaggaguugcuccccugcaucucggcaagugcaacauugccggguggauccugggaaauccugagugugaaucucugagcacagccuccucuuggagcuacauuguggagaccuccucuagcgacaacggcacgugcuauccgggggauuuuaucgacuacgaagaacuccgggagcagcuguccagcgucucuuccuucgaacgcuuugagaucuuccccaagaccagcucuuggccuaaucacgauuccaacaagggagugacagccgcuuguccccaugccggcgcgaaaggcuuuuauaagaaucuuauuuggcugguuaaaaaggggaacagcuacccuaaacucucuaauuccuauaucaacgacaagggaaaggaagugcugguccuuuggggcauucaccaccccagcaccacagccgaucaacagucccuguaccagaaugcugacaccuacguguucguggggacgucuagauauagcaaaaaguuuaaaccugagaucgccauucggccgaagguccgcgaucaggagggaagaaugaacuacuauuggacacucguugaacccggcgacaaaaucaccuucgaggcuacagggaaccugguggugccucgguacgccuuugcgauggaacgcaaugccggauccggcauuaucaucagcgauaccaccguccaugacugcaacacaacgugucaaacccccaagggcgcuauuaauacaucucugccuuuccagaacauccaccccauuaccaucgggaaaugcccgaaguaugugaaguccacaaaacucagacuggccaccggacuucggaauguuccuagcauucagucucgcggccuguuuggggcuaucgccggauucaucgagggcggguggacgggaaugguggacggcugguacggcuaucaucaccagaacgaacaagggagcggauacgccgcugaucucaaguccacacagaaugcgauugacaaaaucaccaacaaggucaauucugugauugagaaaaugaacacccaguuuacagccguuggcaaggaguucaaucaccuggaaaagagaaucgagaaccuuaauaaaaagguggaugacggguuccuggauauuuggaccuacaacgcugaacuccugguccugcucgagaaugaacggacacuggacuaucaugauagcaacgugaaaaaccuuuacgagaagguccgcaaucagcugaaaaacaaugccaaggagaucggaaacggcuguuuugaguucuaucacaagugcgacaauauguguauggaguccgugaaaaacgggacguacgauuaucccaaguacagcgaagaggccaaacucaauagagaaaagaucgacggcguuaaacuggagucuacccggauuuaucaaauccuugcuauuuacuccacaguggccagcucucugguccucgugguuucccugggagcgaucagcuuuuggaugugcuccaacggcucucugcagugccgcauuuguaucuga

SEQ ID NO: 202087 - RNA, 1701 nt, Artificial Sequence
  derived and/or modified CDS sequence (opt5) from hemagglutinin__InfluenzaA__AGL09760
augaagaccaucauugccgugagcuacauccugugccucgucuucgcucaggagcugcccggcaacgacgauuccacagccacgcuuugucuggggcaccaugcgguuccuaauggaaccauugugaaaacaaucaccaacgaccaaauugaagugacaaaugcuaccgagcucguccagucuagcuccacaggcgaaaucugcaacucuccgcaccagauccuggauggggagaauuguacccuuauugacgcccugcucggagauccccagugcgacggcuuucaaaacaagaaaugggaucuguucguggaaagaagcaaggcccauuccaauuguuauccuuacgacguucccgauuaugcuucucugcggagccucguggccuccagcgggacgcuggaguuuaacaaugagucuuucaacuggaccggagucacacagaauggcaccuccagcgcuugcauccgcagaucuaacaauuccuuuuucagccggcuuaacuggcugacacaccucaauuuuaaauacccugcccugaacgugaccaugcccaacaaugaacaguucgacaaacuuuauauuuggggcguucaucacccugggacggauaaggaccagaucuuucuguacgcgcaagccucuggacgcauuacaguguccaccaagagaagccagcaggcugucaucccgaacauuggcucccggccccgcgugagaaauaucccuucucgggugagcaucuauuggacaauugucaagcccggggauauccuccugauuaacuccaccggaaaucugaucgccccucgcggcuacuucaaaauuagaagcgggaagucuuccaucaugcggagcgacgcucccaucggaaaauguaacucugccugcauuaccccgaauggcagcaucccuaacgacaagcccuuucagaauguuaaccgcauuacauacggcgcguguccuagauaugugaagcaaaauacgcucaaacuggccaccgggaugcggaacgugcccgagaagcagacacgcggaaucuucggcgcuauugccggguuuaucgaaaauggaugggagggcauggucgaugggugguacggauucagacaccagaacuccgagggccggggccaagcugccgaccuuaaaucuacccaggccgcuaucgaucagauuaaugggaagcugaacagacucaucggaaaaacaaacgaaaaguuccaucagauugagaaagaauuuagcgagguggaaggccgcauccaagaccuggagaaguauguugaggauaccaagauugaccuuugguccuacaaugcggaacugcucguggcccuggagaaccagcacacgaucgaucugacagacagcgaaaugaauaaacucuucgagaagaccaaaaagcagcugcgggaaaacgcugaggauauggggaauggaugcuuuaaaauuuaucauaagugugacaacgccugcaucggcucuaucagaaaugggaccuacgaucacgacgucuaucgcgacgaggcccuuaacaaucgguuccagauuaagggcguggaacugaaauccggauacaaggauuggauccucuggauuagcuuugcuaucucuugcuuccugcuuuguguugcccugcucggcuuuauuaugugggcgugccaaaaagggaacaucagauguaauaucugcauuuga

SEQ ID NO: 202088 - RNA, 1701 nt, Artificial Sequence; identical to SEQ ID NO: 201940
  derived and/or modified CDS sequence (opt5) from hemagglutinin__InfluenzaA__AGL09761

SEQ ID NO: 202089 - RNA, 1701 nt, Artificial Sequence
  derived and/or modified CDS sequence (opt5) from hemagglutinin__InfluenzaA__AGL09762
augaagaccaucauugcccugagcuacauccucugccugguguucgcucagaaacuucccggcaacgacaauuccacagccacgcugugucucgggcaccaugcggucccuaacggaaccauuguuaagacaaucaccaaugaucaaauugaggugacaaacgcuaccgaacuggugcaaaauucuagcaucggcgagaucugcgacuccccgcaccagauucuugauggggaaaacuguacacugaucgacgcccuccugggagauccccagugcgacggcuuucagaauaaaaagugggaucuguucgucgagagaucuaaagccuauagcaacuguuacccuuaugacgugcccgauuacgcuucccuccggucucugguugccagcuccgggacccuugaauuuaauaacgagagcuucaauuggacgggagugacccagaacggcacaucuuccgcuugcauucgcggcagcaauucuuccuuuuucagcagacugaacuggcucacccaucugaauuuuaaguauccugcccuuaacgucacaaugcccaacaaugagcaguucgacaagcuguacaucuggggagugcaccauccugggaccgauaaagaccagauuuuucucuaugcgcaaucuuccggccggaucacgguuagcacaaagcgcucccagcaggccgugauuccgaacaucgggucuagaccccggauccgcaauauuccuagcagaaucuccauuuacuggaccaucgucaaacccggagauauucugcugaucaacagcacaggcaaucucaucgcuccucggggguacuucaagauucgcucuggaaaauccagcaucaugagaucugacgcccccauuggcaaguguaagagcgaaugcaucaccccgaacggcuccauuccuaaugacaaacccuuucagaacgugaaucggaucaccuauggggcuuguccucgcuacgugaagcaaucuacacugaaacuugccacgggaaugagaaacguccccgagaagcagacccggggcaucuucggggcgauugccggauuuaucgaaaauggcugggaggggaugguugauggaugguauggcuuccgccaccagaacagcgagggcagagggcaagcugccgaccugaaauccacacaggcugccauugaucagaucaauggaaagcucaaccggcugauuggcaaaaccaaugaaaaguuccaccagaucgagaaggaauuuagcgagguggaagggcgcauucaagaccuugagaaauacguggaggauacaaagaucgaccuguggucuuauaacgccgaacuccuggucgcucuggagaaccagcauaccaucgaucucacggacuccgaaaugaauaaacuguucgagaagaccaaaaagcagcuuagagaaaacgcggaggauaugggaaauggcugcuuuaagauuuaccacaaaugugacaacgccugcaucgggagcauucggaauggcacauaugaucaugacguguacagagacgaggcucugaacaaucgcuuccagaucaagggaguugaacucaaaucuggcuacaaggauuggauucuguggaucuccuuugccaucagcugcuuccuucuguguguggcccuccugggguuuauuaugugggcuugccaaaaaggaaacauccgguguaauauuugcaucuga

SEQ ID NO: 202090 - RNA, 1701 nt, Artificial Sequence; identical to SEQ ID NO: 202066
  derived and/or modified CDS sequence (opt5) from hemagglutinin__InfluenzaA__AGL09763

SEQ ID NO: 202091 - RNA, 1701 nt, Artificial Sequence
  derived and/or modified CDS sequence (opt5) from hemagglutinin__InfluenzaA__AGL09764
augaagaccaucauugcccugagcuacauccucugccugguguucgcucagaaaauucccggcaacgacaauuccacagccacgcuuugucuggggcaccaugcggucccuaacggaaccaucguuaagacaauuaccaaugaucaaaucgaggugacaaacgcuaccgaacucgugcaaaauucuagcaucggcgagauuugcgacuccccgcaccagauccuggauggggaaaacuguacacuuauugacgcccugcucggagauccccagugcgacggcuuucagaauaaaaagugggaucuguucgucgagagaucuaaagccuauagcaacuguuacccuuaugacgugcccgauuacgcuucccugcggucucucguugccagcuccgggacccuggaauuuaauaacgagagcuucaauuggacgggagugacccagaacggcacaucuuccgcuugcauccgcagaagcaauucuuccuuuuucagccggcuuaacuggcugacccaucucaauuuuaaguauccugcccugaacgucacaaugcccaacaaugagcaguucgacaaacuuuacauuuggggcgugcaccauccugggaccgauaaagaccagaucuuucuguaugcgcaaucuuccggacgcauuacgguuagcacaaagagaucccagcaggccgugaucccgaacaucggcucucggccccgcauuagaaauaucccuagccggauuuccaucuacuggaccauugucaaacccggggauauccuccugaucaacagcacaggaaaucugauugcuccucgcggcuacuucaagaucagaucugggaaauccagcauuaugcggucugacgcccccaucggaaaguguaagagcgaaugcauuaccccgaacggcuccaucccuaaugacaaacccuuucagaacgugaaucgcaucaccuauggcgcuuguccuagauacgugaagcaaucuacacucaaacuggccacggggaugcggaacguccccgagaagcagacccgcggaauuuucggcgcgaucgccggguuuauugaaaauggaugggagggcaugguugaugggugguauggauucagacaccagaacagcgagggccggggccaagcugccgaccuuaaauccacacaggcugccaucgaucagauuaaugggaagcugaacagacucaucggaaaaaccaaugaaaaguuccaccagauugagaaggaauuuagcgagguggaaggccgcauccaagaccuggagaaauacguggaggauacaaagaucgaccuuuggucuuauaacgccgaacugcucgucgcucuggagaaccagcauaccauugaucugacggacuccgaaaugaauaaacucuucgagaagacaaagaagcagcugcgggaaaacgcggaggauauggggaauggaugcuuuaagaucuaccacaaaugugacaacgccugcauuggcagcaucagaaaugggaccuaugaucaugacguguaccgcgacgaggcucuuaacaaucgguuccagauuaagggcguugaacugaaaucuggauacaaggauuggauccucuggaucuccuuugccauuagcugcuuccugcuuuguguggcccugcucggcuuuaucaugugggcuugccaaaaagggaacauuagauguaauaucugcauuuga

SEQ ID NO: 202092 - RNA, 1701 nt, Artificial Sequence; identical to SEQ ID NO: 201930
  derived and/or modified CDS sequence (opt5) from hemagglutinin__InfluenzaA__AGL09765

SEQ ID NO: 202093 - RNA, 1701 nt, Artificial Sequence
  derived and/or modified CDS sequence (opt5) from hemagglutinin__InfluenzaA__AGL09766
augaagaccaucauugcccugagcuacauccucugccugguguucgcucagaaacuucccggcaacgacaauuccacagccacgcugugucucgggcaccaugcggucccuaacggaaccauuguuaagacaaucaccaaugaucaaauugaggugacaaacgcuaccgaacuggugcaaaauucuagcaucggcgagaucugcgacuccccgcaccagauucuugauggggaaaacuguacacugaucgacgcccuccugggagauccccagugcgacggcuuucagaauaaaaagugggaucuguucgucgagagaucuaaagccuauagcaacuguuacccuuaugacgugcccgauuacgcuucccuccggucucugguugccagcuccgggacccuugaauuuaauaacgagagcuucaauugggcuggagugacgcagaacggcaccucuuccgccugcauucgcggcagcaauucuuccuuuuucagcagacugaacuggcucacacaucugaauuuuaaguauccugcgcuuaacgucaccaugcccaacaaugagcaguucgacaagcuguacaucuggggagugcaccauccugggacagauaaagaccagauuuuucucuaugcccaaucuuccggccggaucaccguuagcacgaagcgcucccagcaggcugugauuccgaacaucgggucuagaccccggauccgcaauauuccuagcagaaucuccauuuacuggacaaucgucaaacccggagauauucugcugaucaacagcaccggcaaucucaucgccccucggggguacuucaagauucugucuggaaaauccagcaucaugcgcucugacgcucccauuggcaaguguaagagcgaaugcaucacaccgaacggcuccauuccuaaugacaaacccuuucagaacgugaauagaaucaccuauggggccuguccucgguacgugaagcaaucuacccuuaaacuggcgacaggaaugcgcaacguccccgagaagcagacgagaggcaucuucggggccauugcuggauuuaucgaaaauggcugggaggggaugguugauggaugguauggcuuccggcaccagaacagcgagggccgcgggcaagccgcugaccucaaauccacccaggccgccauugaucagaucaauggaaagcugaacagacuuauuggcaaaacaaaugaaaaguuccaccagaucgagaaggaauuuagcgagguggaagggcggauucaagaccuggagaaauacguggaggauaccaagaucgaccucuggucuuauaacgcugaacugcuggucgcgcucgagaaccagcauacaaucgaucugaccgacuccgaaaugaauaaacuuuucgagaagacgaaaaagcagcugagagaaaacgccgaggauaugggaaauggcugcuuuaagauuuaccacaaaugugacaacgcuugcaucgggagcauucgcaauggcacauaugaucaugacguguaccgggacgaggcccucaacaauagauuccagaucaagggaguugaacugaaaucuggcuacaaggauuggauucuuuggaucuccuuugccaucagcugcuuccugcucuguguggcucugcugggguuuauuaugugggccugccaaaaaggaaacauccgcuguaauauuugcaucuga

SEQ ID NO: 202094 - RNA, 1701 nt, Artificial Sequence
  derived and/or modified CDS sequence (opt5) from hemagglutinin__InfluenzaA__AGL09767
augaagaccaucauugcccugagcuacauccucugccugguguucgcucagaaacuucccggcaacgacaauuccacagccacgcugugucucgggcaccaugcggucccuaacggaaccauuguuaagacaaucaccaaugauagaauugaggugacaaacgcuaccgaacuggugcaaaauucuagcaucggcgagaucugcgacuccccgcaccagauucuugauggggaaaacuguacacugaucgacgcccuccugggagauccccagugcgacggcuuucagaauaaaaagugggaucuguucgucgagcggucuaaagccuauagcaacuguuacccuuaugacgugcccgauuacgcuucccuccgcucucugguugccagcuccgggacccuugaauuuaauaacgagagcuucaauugggcuggagugacgcaaaacggcaccucuuccgccugcauuagaggcagcaauucuuccuuuuucagccggcugaacuggcucacacaucugaauuuuaaguauccugcgcuuaacgucaccaugcccaacaaugagcaguucgacaagcuguacaucuggggagugcaccauccugggacagauaaagaccagauuuuucucuaugcccagucuuccggccgcaucaccguuagcacgaagagaucccaacaggcugugauuccgaacaucgggucucggccccgcaucagaaauauuccuagccggaucuccauuuacuggacaaucgucaaacccggagauauucugcugaucaacagcaccggcaaucucaucgccccucgcggguacuucaagauuagaucuggaaaauccagcaucaugcggucugacgcucccauuggcaaguguaagagcgaaugcaucacaccgaacggcuccauuccuaaugacaaacccuuucagaacgugaaucgcaucaccuauggggccuguccuagauacgugaagcagucuacccugaaacuugcgacaggaaugcggaacguccccgagaagcaaacgcgcggcaucuucggggccauugcuggauuuaucgaaaauggcugggaggggaugguugauggaugguauggcuucagacaccagaacagcgagggccgggggcaggccgcugaccugaaauccacccaagccgccauugaucagaucaauggaaagcucaacagacugauuggcaaaacaaaugaaaaguuccaccagaucgagaaggaauuuagcgagguggaagggcgcauucaggaccuugagaaauacguggaggauaccaagaucgaccuguggucuuauaacgcugaacuccuggucgcgcuggagaaccaacauacaaucgaucucaccgacuccgaaaugaauaaacuguucgagaagacgaaaaagcagcuucgggaaaacgccgaggauaugggaaauggcugcuuuaagauuuaccacaaaugugacaacgcuugcaucgggagcauuagaaauggcacauaugaucauaacguguaccgcgacgaggcccugaauaaccgguuccagaucaagggaguugaacucaaaucuggcuacaaggacuggauucuguggaucuccuuugccaucagcugcuuccuucuguguguggcucuccugggguuuauuaugugggccugccagaaaggaaauaucagauguaacauuugcaucuga

SEQ ID NO: 202095 - RNA, 1701 nt, Artificial Sequence
  derived and/or modified CDS sequence (opt5) from hemagglutinin__InfluenzaA__AGL09769
augaagaccaucauugcccugagcuacauccucugccugguguucgcucagaaaauucccggcaacgacaauuccacagccacgcuuugucuggggcaccaugcggucccuaacggaaccaucguuaagacaauuaccaaugauagaaucgaggugacaaacgcuaccgaacucgugcaaaauucuagcaucggcgagauuugcgacuccccgcaccagauccuggauggggaaaacuguacacuuauugacgcccugcucggagauccccagugcgacggcuuucagaauaaaaagugggaucuguucgucgagcggucuaaagccuauagcaacuguuacccuuaugacgugcccgauuacgcuucccugcgcucucucguugccagcuccgggacccuggaauuuaauaacgagagcuucaauuggacgggagugacccaaaacggcacaucuuccgcuugcaucagaggcagcaauucuuccuuuuucagccggcuuaacuggcugacccaucucaauuuuaaguauccugcccugaacgucacaaugcccaacaaugagcaguucgacaaacuuuacauuuggggagugcaccauccugggaccgauaaagaccagaucuuucuguaugcgcagucuuccggccgcauuacgguuagcacaaagagaucccaacaggccgugaucccgaacaucgggucucggccccgcauuagaaauaucccuagccggauuuccaucuacuggaccauugucaaacccggagauauccuccugaucaacagcacaggcaaucugauugcuccucgcggguacuucaagaucagaucuggaaaauccagcauuaugcggucugacgcccccaucggcaaguguaagagcgaaugcauuaccccgaacggcuccaucccuaaugacaaacccuuucagaacgugaaucgcaucaccuauggggcuuguccuagauacgugaagcagucuacacucaaacuggccacgggaaugcggaacguccccgagaagcaaacccgcggcauuuucggggcgaucgccggauuuauugaaaauggcugggaggggaugguugauggaugguauggcuucagacaccagaacagcgagggccgggggcaggcugccgaccuuaaauccacacaagcugccaucgaucagauuaauggaaagcugaacagacucaucggcaaaaccaaugaaaaguuccaccagauugagaaggaauuuagcgagguggaagggcgcauccaggaccuggagaaauacguggaggauacaaagaucgaccuuuggucuuauaacgccgaacugcucgucgcucuggagaaccaacauaccauugaucugacggacuccgaaaugaauaaacucuucgagaagacaaagaagcagcugcgggaaaacgcggaggauaugggaaauggcugcuuuaagaucuaccacaaaugugacaacgccugcauugggagcaucagaaauggcaccuaugaucaugacguguaccgcgacgaggcucuuaacaaucgguuccagauuaagggaguugaacugaaaucuggcuacaaggauuggauccucuggaucuccuuugccauuagcugcuuccugcuuuguguggcccugcucggguuuaucaugugggcuugccagaaaggaaacauuagauguaauaucugcauuuga

SEQ ID NO: 202096 - RNA, 1701 nt, Artificial Sequence; identical to SEQ ID NO: 201930
  derived and/or modified CDS sequence (opt5) from hemagglutinin__InfluenzaA__AGL09770

SEQ ID NO: 202097 - RNA, 1701 nt, Artificial Sequence
  derived and/or modified CDS sequence (opt5) from hemagglutinin__InfluenzaA__AGL09771
augaagaccaucauugcccugagcuacauccucugccugguguucgcucagaaacuucccggcaacgacaauuccacagccacgcugugucucgggcaccaugcggucccuaacggaaccauuguuaagacaaucaccaaugauagaauugaggugacaaacgcuaccgaacuggugcaaaauucuagcaucggcgagaucugcgacuccccgcaccagauucuugauggggaaaacuguacacugaucgacgcccuccugggagauccccagugcgacggcuuucagaauaaaaagugggaucuguucgucgagcggucuaaagccuauagcaacuguuacccuuaugacgugcccgauuacgcuucccuccgcucucugguugccagcuccgggacccuugaauuuaauaacgagagcuucaauugggcuggagugacgcaaaacggcaccucuuccgccugcauuagaggcagcaauucuuccuuuuucagccggcugaacuggcucacacaucugaauuuuaaguauccugcgcuuaacgucaccaugcccaacaaugagcaguucgacaagcuguacaucuggggagugcaccauccugggacagauaaagaccagauuuuucucuaugcccagucuuccggccgcaucaccguuagcacgaagagaucccaacaggcugugauuccgaacaucgggucucggccccgcaucagaaauauuccuagccggaucuccauuuacuggacaaucgucaaacccggagauauucugcugaucaacagcaccggcaaucucaucgccccucgcggguacuucaagauuagaucuggaaaauccagcaucaugcggucugacgcucccauuggcaaguguaagagcgaaugcaucacaccgaacggcuccauuccuaaugacaaacccuuucagaacgugaaucgcaucaccuauggggccuguccuagauacgugaagcagucuacccugaaacuugcgacaggaaugcggaacguccccgagaagcaaacgcgcggcaucuucggggccauugcuggauuuaucgaaaauggcugggaggggaugguugauggaugguauggcuucagacaccagaacagcgagggccgggggcaggccgcugaccugaaauccacccaagccgccauugaucagaucaauggaaagcucaacagacugauuggcaaaacaaaugaaaaguuccaccagaucgagaaggaauuuagcgagguggaagggcgcauucaggaccuugagaaauacguggaggauaccaagaucgaccuguggucuuauaacgcugaacuccuggucgcgcuggagaaccaacauacaaucgaucucaccgacuccgaaaugaauaaacuguucgagaagacgaaaaagcagcuucgggaaaacgccgaggauaugggaaauggcugcuuuaagauuuaccacaaaugugacaacgcuugcaucgggagcauuagaaauggcacauaugaucaugacaucuaccgcgacgaggcccugaacaaucgguuccagauuaagggaguggaacucaaaucuggcuacaaggauuggauccuguggaucuccuuugccauuagcugcuuccuucuguguguugcucuccugggguuuaucaugugggccugccagaaaggaaacauuagauguaauaucugcauuuga

SEQ ID NO: 202098 - RNA, 1701 nt, Artificial Sequence
  derived and/or modified CDS sequence (opt5) from hemagglutinin__InfluenzaA__AGL09772
augaagaccaucauugcccugagcuacauccucugccugguguucgcucagaaacuucccggcaacgacaauuccacagccacgcugugucucgggcaccaugcggucccuaacggaaccauuguuaagacaaucaccaaugaucaaauugaggugacaaacgcuaccgaacuggugcagucuagcuccacaggcgagaucugcaauucuccgcaccagauccuugacggggaaaacuguacccugauugaugcccuccugggagacccccagugcgauggcuuucaaaauaaaaagugggaccuguucgucgagagaagcaaagcccauuccaacuguuauccuuacgaugugcccgacuaugcuucucuccggagccugguugccuccagcgggacgcuugaauuuaauaacgagucuuucaauuggaccggagugacacagaacggcaccuccagcgcuugcauccgcagaucuaauaacuccuuuuucagccggcugaauuggcucacacaccugaacuuuaaguacccugcccuuaacgucaccaugcccaauaacgagcaguucgauaagcuguauauuuggggcgugcaucacccugggacggacaaagaucagaucuuucucuacgcgcaagccgcuggacgcauuacaguuucuaccaagagaucccagcaggccgugaucccgaauauuggcagccggccccgcgucagaaacaucccuucccgggugucuaucuauuggacaauugugaaacccggggacauccugcugauuaauagcaccggaaaccucaucgcuccucgcggcuacuucaagauuagauccgggaaaagcucuaucaugcgguccgaugcccccaucggaaaguguaauagcgcgugcauuaccccgaacggcucuaucccuaaugacaagcccuuucagaacgucaaucgcauuacauacggcgccuguccuagauauguuaaacaaaacacgcugaaacuugcuaccgggaugcggaaugugcccgaaaaacagacacgcggaaucuucggcgccauugcuggguuuaucgagaacggaugggaaggcaugguggacgggugguacggauucagacaccagaauagcgagggccggggccaagccgccgaucugaaguccacccaggcugcgaucgaccagauuaacgggaaacucaacagacugaucggaaagacaaaugagaaauuccaucagauugaaaaggaguuuucugaagucgagggccgcauccaagaucuugaaaaguauguggaggacaccaaaauugaucuguggagcuacaacgccgagcuccugguugcucuggaaaaucagcacacgaucgaccucacagauuccgagaugaacaagcuguucgaaaagaccaagaaacagcuucgggagaaugccgaagacauggggaacggaugcuuuaagauuuaucauaagugugauaaugccugcaucggcagcaucagaaacgggaccuacgaccacuauguguaccgcgaugaggcucugaauaaccgguuccagauuaaaggcgucgagcucaagucuggauacaaagacuggauccuguggauuuccuuugccacaagcugcuuccuucuguguguggcgcuccugggcuuuaucaugugggcuugccaaaaggggaauauuagauguaacaucugcaucuga

SEQ ID NO: 202099 - RNA, 1701 nt, Artificial Sequence
  derived and/or modified CDS sequence (opt5) from hemagglutinin__InfluenzaA__AGL09773
augaagaccaucauugcccugagcuacauccucugccugguguucgcucagaaacuucccggcaacgacaauuccacagccacgcugugucucgggcaccaugcggucccuaacggaaccauuguuaagacaaucaccaaugaucaaauugaggugacaaacgcuaccgaacuggugcagucuagcuccacaggcgagaucugcaauucuccgcaccagauccuugacggggaaaacuguacccugauugaugcccuccugggagacccccagugcgauggcuuucaaaauaaaaagugggaccuguucgucgagagaagcaaagcccauuccaacuguuauccuuacgaugugcccgacuaugcuucucuccggagccugguugccuccagcgggacgcuugaauuuaauaacgagucuuucaauuggaccgaggugacacagaacggaaccuccagcgcuugcauccgcagaucuaauaacuccuuuuucagccggcugaauuggcucacacaccugaacuuuaaguacccugcccuuaacgucaccaugcccaauaacgaacaguucgauaagcuguauauuuggggcgugcaucacccuggcacggacaaagaucagaucuuucucuacgcgcaagccgcugggcgcauuacaguuucuaccaagagaucccagcaggccgugaucccgaauauuggaagccggccccgcgucagaaacaucccuucccgggugucuaucuauuggacaauugugaaacccggcgacauccugcugauuaauagcaccgggaaccucaucgcuccucgcggauacuucaagauuagauccggcaaaagcucuaucaugcgguccgaugcccccaucgggaaguguaauagcgcgugcauuaccccgaacggaucuaucccuaaugacaagcccuuucagaacgucaaucgcauuacauacggcgccuguccuagauauguuaaacaaaacacgcugaaacuugcuaccggcaugcggaaugugcccgagaagcagacacgcgggaucuucggagccauugcuggcuuuaucgaaaacgggugggagggaaugguggacggcugguacggguucagacaccagaauagcgagggacggggccaagccgccgaucugaaguccacccaggcugcgaucgaccagauuaacggcaaacucaacagacugaucgggaagacaaaugaaaaauuccaucagauugagaaggaauuuucugaggucgaaggacgcauccaagaucuugagaaguauguggaggacaccaaaauugaucuguggagcuacaacgccgaacuccugguugcucuggagaaucagcacacgaucgaccucacagauuccgaaaugaacaagcuguucgagaaaaccaagaaacagcuucgggaaaaugccgaggacaugggcaacgggugcuuuaagauuuaucauaagugugauaaugccugcaucggaagcaucagaaacggcaccuacgaccacuauguguaccgcgaugaggcucugaauaaccgguuccagauuaaaggggucgaacucaagucuggcuacaaagacuggauccuguggauuuccuuugccacaagcugcuuccuucuguguguggcgcuccugggauuuaucaugugggcuugccaaaagggcaauauuagauguaacaucugcaucuga

SEQ ID NO: 202100 - RNA, 1701 nt, Artificial Sequence; identical to SEQ ID NO: 202098
  derived and/or modified CDS sequence (opt5) from hemagglutinin__InfluenzaA__AGL09774

SEQ ID NO: 202101 - RNA, 1701 nt, Artificial Sequence; identical to SEQ ID NO: 201940
  derived and/or modified CDS sequence (opt5) from hemagglutinin__InfluenzaA__AGL09775

SEQ ID NO: 202102 - RNA, 1701 nt, Artificial Sequence; identical to SEQ ID NO: 202098
  derived and/or modified CDS sequence (opt5) from hemagglutinin__InfluenzaA__AGL09776

SEQ ID NO: 202103 - RNA, 1701 nt, Artificial Sequence; identical to SEQ ID NO: 202098
  derived and/or modified CDS sequence (opt5) from hemagglutinin__InfluenzaA__AGL09777

SEQ ID NO: 202104 - RNA, 1701 nt, Artificial Sequence
  derived and/or modified CDS sequence (opt5) from hemagglutinin__InfluenzaA__AGL09778
augaagaccaucauugcccugagcuacauccucugccugauuuucgcucagaaacuucccggcaacgacaauuccacagccacgcugugucucgggcaccaugcggugccuaacggaaccaucgucaagacaauuaccaaugauagaaucgagguuacaaacgcuaccgaacuggugcaaaauucuagcaucggcgagauuugcgacuccccgcaccagauccuugauggggaaaacuguacacugauugacgcccuccugggagauccccagugcgacggcuuucagaauaaaaagugggaucuguucguggagcggucuaaagccuauagcaacuguuacccuuaugacguccccgauuacgcuucccuccgcucucugguggccagcuccgggacccuugaauuuaauaacgagagcuucaauugggcuggaguuacgcaaaacggcaccucuuccgccugcaucagaggcagcaauucuuccuuuuucagccggcugaacuggcucacacaucugaauuuuaaguauccugcgcuuaacgugaccaugcccaacaaugagcaguucgacaagcuguacauuuggggaguccaccauccugggacagauaaagaccagaucuuucucuaugcccagucuuccggccgcauuaccgugagcacgaagagaucccaacaggcuguuaucccgaacaucgggucucggccccgcauuagaaauaucccuagccggauuuccaucuacuggacaauugugaaacccggagauauccugcugaucaacagcaccggcaaucucauugccccucgcggguacuucaagaucagaucuggaaaauccagcauuaugcggucugacgcucccaucggcaaguguaagagcgaaugcauuacaccgaacggcuccaucccuaaugacaaacccuuucagaacgucaaucgcaucaccuauggggccuguccuagauacgugaagcagucuacccugaaacuugcgacaggaaugcggaacgugcccgagaagcaaacgcgcggcauuuucggggccaucgcuggauuuauugaaaauggcugggaggggaugauggauggaugguauggcuucagacaccagaacagcgagggccgggggcaggccgcugaccugaaauccacccaagccgccaucgaucagauuaauggaaagcucaacagacugaucggcaaaacaaaugaaaaguuccaccagauugagaaggaauuuagcgaggucgaagggcgcauccaggaccuugagaaauacguugaggauaccaagaucgaccuguggucuuauaacgcugaacuccugguggcgcuggagaaccaacauacaauugaucucaccgacuccgaaaugaauaaacuguucgagaagacgaaaaagcagcuucgggaaaacgccgaggauaugggaaauggcugcuuuaagaucuaccacaaaugugacaacgcuugcauugggagcaucagaaauggcacauaugaucaugacguguaccgcgacgaggcccugaacaaucgguuccagauuaagggagucgaacucaaaucuggcuacaaggauuggauccuguggaucuccuuugccauuagcugcuuccuucuguguguggcucuccugggguuuaucaugugggccugccagaaaggaaacauuagauguaauaucugcauuuga

SEQ ID NO: 202105 - RNA, 1701 nt, Artificial Sequence
  derived and/or modified CDS sequence (opt5) from hemagglutinin__InfluenzaA__AGL09779
augaagaccaucauugcccugagcuacauccucugccugguguucgcucagaaacuucccggcaacaauaacuccacagccacgcugugucucgggcaccaugcggucccuaauggaaccauuguuaagacaaucaccaacgacagaauugaggugacaaaugcuaccgaacuggugcaaaacucuagcaucggcgagaucugcgauuccccgcaccagauucuugacggggaaaauuguacacugaucgaugcccuccugggagacccccagugcgauggcuuucagaacaaaaagugggaccuguucgucgagcggucuaaagccuauagcaauuguuacccuuaugaugugcccgacuacgcuucccuccgcucucugguugccagcuccgggacccuugaauuuaacaaugagagcuucaacugggcuggagugacgcaaaauggcaccucuuccgccugcauuagaggcagcaacucuuccuuuuucagccggcugaauuggcucacacaucugaacuuuaaguauccugcgcuuaacgucaccaugcccaauaacgagcaguucgauaagcuguacaucuggggagugcaccauccugggacagacaaagaucagauuuuucucuaugcccagucuuccggccgcaucaccguuagcacgaagagaucccaacaggcugugauuccgaauaucgggucucggccccgcaucagaaacauuccuagccggaucuccauuuacuggacaaucgucaaacccggagacauucugcugaucaauagcaccggcaaccucaucgccccucgcggguacuucaagauuagaucuggaaaauccagcaucaugcggucugaugcucccauuggcaaguguaagagcgaaugcaucacaccgaauggcuccauuccuaacgacaaacccuuucagaaugugaaccgcaucaccuauggggccuguccuagauacgugaagcagucuacccugaaacuugcgacaggaaugcggaauguccccgagaagcaaacgcgcggcaucuucggggccauugcuggauuuaucgaaaacggcugggaggggaugguugacggaugguauggcuucagacaccagaauagcgagggccgggggcaggccgcugaucugaaauccacccaagccgccauugaccagaucaacggaaagcucaauagacugauuggcaaaacaaacgaaaaguuccaccagaucgagaaggaauuuagcgagguggaagggcgcauucaggaucuugagaaauacguggaggacaccaagaucgaucuguggucuuauaacgcugaacuccuggucgcgcuggagaaucaacauacaaucgaccucaccgauuccgaaaugaacaaacuguucgagaagacgaaaaagcagcuucgggaaaaugccgaggacaugggaaacggcugcuuuaagauuuaccacaaaugugauaaugcuugcaucgggagcauuagaaacggcacauaugaccaugauguguaccgcgacgaggcccugaauaaccgguuccagaucaagggaguugaacucaaaucuggcuacaaggacuggauucuguggaucuccuuugccaucagcugcuuccuucuguguguggcucuccugggguuuauuaugugggccugccagaaaggaaauaucagauguaacauuugcaucuga

SEQ ID NO: 202106 - RNA, 1701 nt, Artificial Sequence
  derived and/or modified CDS sequence (opt5) from hemagglutinin__InfluenzaA__AGL09780
augaagaccaucauugcccugagcuacauccucugccugguguucgcucagaaacuucccggcaacgacaauuccacagccacgcugugucucgggcaccaugcggucccuaacggaaccauuguuaagacaaucaccaaugauagaauugaggugacaaacgcuaccgaacuggugcaaaauucuagcaucggcgagaucugcgacuccccgcaccagauucuugauggggaaaacuguacacugaucgacgcccuccugggagauccccagugcgacggcuuucagaauaaaaagugggaucuguucgucgagcggucuaaagccuauagcaacuguuacccuuaugacgugcccgauuacgcuucccuccgcucucugguugccagcuccgggacccuugaauuugacaaugagagcuucaacugggcuggagugacgcaaaauggcaccucuuccgccugcauuagaggcagcaacucuuccuuuuucagccggcugaauuggcucacacaucugaacuuuaaguauccugcgcuuaaugucaccaugcccaacaacgagcaguucgauaagcuguacaucuggggagugcaccauccugggacagacaaagaucagauuucucucuaugcccaguccagcggccgcaucaccguuuccacgaagagaucucaacaggcugugauuccgaauaucgggagccggccccgcaucagaaacauuccuucccggaucagcauuuacuggacaaucgucaaacccggagacauucugcugaucaauucuaccggcaaccucaucgccccucgcggguacuuuaagauuagauccggaaaaagcucuaucaugcggagcgacgcucccauuggcaaguguaaguccgaaugcaucacaccgaauggcucuauuccuaacgauaaacccuuccagaaugugaaccgcaucaccuauggggccuguccuagauacgugaagcagagcacccugaaacuugcgacaggaaugcggaauguccccgagaagcaaacgcgcggcaucuuuggggccauugcuggauucaucgaaaacggcugggaggggaugguugacggaugguauggcuuuagacaccaaaauuccgagggccgggggcaggccgcugaucugaaaagcacccaggccgccauugaccagaucaacggaaagcucaauagacugauuggcaaaacaaacgaaaaguuccaccagaucgagaaggaguucucugaaguggaagggcgcauucaggaucuugagaaauacguggaggacaccaagaucgaucugugguccuauaaugcugaacuccuggucgcgcuggagaaccaacauacaaucgaccucaccgauagcgaaaugaacaaacuguuugagaagacgaaaaagcagcuucgggaaaaugccgaggacaugggaaacggcugcuucaagauuuaccacaaaugugauaaugcuugcaucgggucuauuagaaacggcacauaugaccaugacguguaccgcgaugaggcccugaauaaccgguuucagaucaagggaguugaacucaaauccggcuacaaggacuggauucuguggaucagcuucgccaucuccugcuuucuucuguguguggcucuccugggguucauuaugugggccugccagaaaggaaauaucagauguaacauuugcaucuga

SEQ ID NO: 202107 - RNA, 1701 nt, Artificial Sequence; identical to SEQ ID NO: 202065
  derived and/or modified CDS sequence (opt5) from hemagglutinin__InfluenzaA__AGL09781

SEQ ID NO: 202108 - RNA, 1701 nt, Artificial Sequence; identical to SEQ ID NO: 201930
  derived and/or modified CDS sequence (opt5) from hemagglutinin__InfluenzaA__AGL09782

SEQ ID NO: 202109 - RNA, 1701 nt, Artificial Sequence
  derived and/or modified CDS sequence (opt5) from hemagglutinin__InfluenzaA__AGL09783
augaagaccaucauugcccugagcuacauccucugccugguguucgcucagaaacuucccggcaacgacaauuccacagccacgcugugucucgggcaccaugcggucccuaacggaaccguugugaagacaauuaccaaugauagaaucgaggugacaaacgcuaccgaacugguccaaaauucuagcauuggcgagaucugcgacuccccgcaccagauccuugauggggaaaacuguacacugauugacgcccuccugggagauccccagugcgacggcuuucagaauaaaaagugggaucuguucguggagcggucuaaagccuauagcaacuguuacccuuaugacguucccgauuacgcuucccuccgcucucugguggccagcuccgggacccuugaauuuaauaacgagagcuucaauuggacgggagucacccaaaacggcacaucuuccgcuugcaucagacggagcaauaacuccuuuuucucucgccugaauuggcucacccaucugaacuuuaaguauccugcccuuaacgugacaaugcccaauaacgagcaguucgacaagcuguacauuuggggcguucaccauccugggaccgauaaagaccagaucuuucucuaugcgcagagcucuggaagaauuacgguguccacaaagcggagccaacaggccgucaucccgaauauuggcucccgccccagaauccggaacaucccuucucgcauuagcaucuacuggaccauugugaaacccggggauauccugcugauuaauuccacaggaaaccucaucgcuccuagaggcuacuucaagauccggagcgggaaaucuuccauuaugcgcagcgacgcccccaucggaaaguguaagucugaaugcauuaccccgaauggcagcaucccuaacgacaaacccuuucagaaugugaacagaauuaccuauggcgcuuguccucgguacgucaagcaguccacacugaaacuugccacggggaugcgcaauguucccgagaagcaaaccagaggaaucuucggcgcgaucgccggguuuauugaaaacggaugggagggcaugguggaugggugguauggauuccggcaccaaaauucugagggcagaggccaggcugccgaccugaaaagcacacaggcugccaucgaucagauuaacgggaagcucaaucgccugaucggaaaaaccaacgaaaaguuccaccagauugagaaggaauuuuccgagguggaaggccggacacagaaccuugagaaauacgucgaggacaccaagaucgaucuguggagcuauaaugccgaacuccugguggcucuggagaaccaacauacgauugaccucacagauucugaaaugaauaaacuguucgagaagaccaaaaagcagcuuagagaaaacgcggaggacauggggaauggaugcuuuaagaucuaccacaaaugugauaacgccugcaucggcuccauucgcaaugggaccuaugaccaugauguuuaccgggacgaggcucugaacaauagauuccagaucaagggcguggaacucaaaagcggauacaaggacuggauucuguggaucucuuuugccauuuccugcuuccuucugugugucgugcuccugggcuuuaucaugugggccugccagaaagggaacauccgcuguaauauuugcaucuga

SEQ ID NO: 202110 - RNA, 1701 nt, Artificial Sequence; identical to SEQ ID NO: 201940
  derived and/or modified CDS sequence (opt5) from hemagglutinin__InfluenzaA__AGL09785

SEQ ID NO: 202111 - RNA, 1701 nt, Artificial Sequence
  derived and/or modified CDS sequence (opt5) from hemagglutinin__InfluenzaA__AGL09786
augaagaccaucauugcccugagcuacauccucugccugguguucgcucagaaacuucccggcaacgacaauuccacagccacgcugugucucgggcaccaugcggucccuaacggaaccauuguuaagacaaucaccaaugauagaauugaggugacaaacgcuaccgaacuggugcaaaauucuagcaucggcgagaucugcgacuccccgcaccagauucuugauggggaaaacuguacacugaucgacgcccuccugggagauccccagugcgacggcuuucagaauaaaaagugggaucuguucgucgagcggucuaaagccuauagcaacuguuacccuuaugacgugcccgauuacgcuucccuccgcucucugguugccagcuccgggacccuugaauuugacaaugagagcuucaacugggcuggagugacgcaaaauggcaccucuuccgccugcauuagaggcagcaagucuuccuuuuucagccggcugaacuggcucacacaucugaauuuuaaguauccugcgcuuaacgucaccaugcccaauaacgagcaguucgauaaacuguacaucuggggagugcaccauccugggacagacaaggaucagauuucucucuaugcccaguccagcggccgcaucaccguuuccacgaaaagaucucaacaggcugugauuccgaacaucgggagccggccccgcaucagaaauauuccuucccggaucagcauuuacuggacaaucgucaagcccggagacauucugcugaucaacucuaccggcaaucucaucgccccucgcggguacuuuaaaauuagauccggaaagagcucuaucaugcggagcgacgcucccauuggcaaguguaaauccgaaugcaucacaccgaacggcucuauuccuaaugauaagcccuuccagaacgugaaucgcaucaccuauggggccuguccuagauacgugaaacagagcacccugaagcuggcgacaggaaugcggaacguccccgagaaacaaacgcgcggcaucuuuggggccauugcuggauucaucgaaaauggcugggaggggaugguugacggaugguauggcuuuagacaccagaacuccgagggccgggggcaggccgcugaucuuaagagcacccaagccgccauugaccagaucaauggaaaacucaacagacugauuggcaagacaaaugaaaaguuccaccagaucgagaaagaguucucugaaguggaagggcgcauucaggaucuugagaaguacguggaggacaccaaaaucgaucugugguccuauaacgcugaacuccuggucgcgcuggagaaucaacauacaaucgaccucaccgauagcgaaaugaacaagcuguuugagaaaacgaagaagcagcuucgggaaaacgccgaggacaugggaaauggcugcuucaaaauuuaccacaagugugauaacgcuugcaucgggucuauuagaaauggcacauaugaccaugacguguaccgcgaugaggcccugaacaaucgguuucagaucaaaggaguugaacucaaguccggcuacaaagacuggauucuguggaucagcuucgccaucuccugcuuucuucuguguguggcucuccugggguucauuaugugggccugccagaagggaaacaucagauguaauauuugcaucuga

SEQ ID NO: 202112 - RNA, 1701 nt, Artificial Sequence
  derived and/or modified CDS sequence (opt5) from hemagglutinin__InfluenzaA__AGL09787
augaaggccauccuggugguccuccuguacaccuucgcuacagccaacgcggacacgcuuugcauuggcuaucacgcuaauaacagcaccgauacaguugacaccgugcuggagaagaaugugacagucacccauuccgugaaccuccuggaagauaagcacaaugggaaacuuuguaagcugagaggaguugcuccccuccaucugggcaaaugcaacaucgccggguggauucugggaaauccugagugugaaucucucagcacagccuccucuuggagcuacaucguggagaccuccucuagcgacaacggcacgugcuauccgggggauuuuauuaauuacgaagaacugcgggagcagcuuuccagcgucucuuccuucgaacgcuuugagaucuuccccaagaccagcucuuggccuaaccacgacuccaauaagggagugacagccgcuuguccccaugccggcgcgaaaucuuuuuauaagaaccugaucuggcucguuaaaaagggcaauagcuacccuaaacugucccaaagcuauauuaacgauaaggggaaggaagugcuuguccuguggggaauccaccaccccuccaccacagccgaccagcagucucucuaccagaaugcugaugccuacguguucgugggcaccagcagauauuccaaaaaguuuaaaccugagauugcuauccggccgaagguccgcgaccaagaggggagaaugaacuacuauuggacgcugguugaacccggagauaaaauuacauucgaggccaccggcaaccugguggugccucgguacgcguuuacaauggaacgcaaugccgggagcggaaucauuaucucugacacccccguccaugauugcaacaccacaugucagacgccugagggcgcuaucaauaccucccuccccuuccagaacauucacccgaucacaauuggcaagugcccuaaauauguuaagagcaccaagcugagacuugccacagggcugcggaaugugcccucuauccagagccgcggacucuuuggcgcuauugccggguucaucgaaggaggcuggaccgggaugguggacggaugguacggcuaucaucaccaaaacgagcagggcuccggguacgccgcugaccugaaaucuacgcagaaugcgaucgauaagauuacaaacaaagucaauagcgugaucgagaagaugaacacccaguuuaccgccguuggaaaagaguucaaucaccuugagaagagaauugaaaaccugaauaagaaaguggacgauggcuuccucgacaucuggacauacaacgcugagcugcugguccuccuggaaaaugagcggacccuugauuaucaugacuccaacgugaagaaccuguacgagaaaguccgcaaucaacucaagaacaaugccaaagaaauugggaacggauguuuugaguucuaucacaagugcgauaauacauguauggaaagcgugaagaacggcacguacgacuauccuaaauacucugaggaagccaagcugaauagagagaaaaucgaugggguuaaacuugaguccacccggaucuaucagauucuggcuaucuacagcacaguggccucuucccucguccuggugguuagccugggcgcgauuuccuuuuggaugugcucuaacggaagccuccagugccgcaucuguauuuga

SEQ ID NO: 202113 - RNA, 1701 nt, Artificial Sequence; identical to SEQ ID NO: 202112
  derived and/or modified CDS sequence (opt5) from hemagglutinin__InfluenzaA__AGL09788

SEQ ID NO: 202114 - RNA, 1701 nt, Artificial Sequence; identical to SEQ ID NO: 202112
  derived and/or modified CDS sequence (opt5) from hemagglutinin__InfluenzaA__AGL09789

SEQ ID NO: 202115 - RNA, 1701 nt, Artificial Sequence; identical to SEQ ID NO: 202066
  derived and/or modified CDS sequence (opt5) from hemagglutinin__InfluenzaA__AGL09790

SEQ ID NO: 202116 - RNA, 1701 nt, Artificial Sequence
  derived and/or modified CDS sequence (opt5) from hemagglutinin__InfluenzaA__AGL09791
augaagaccaucauugcccugagcuacauccucugccugguguucgcucagaaacuucccggcaacgacaauuccacagccacgcugugucucgggcaccaugcggucccuaacggaaccauuguuaagacaaucaccaaugauagaauugaggugacaaacgcuaccgaacuggugcaaaauucuagcaucggcgagaucugcgacuccccgcaccagauucuugauggggaaaacuguacacugaucgacgcccuccugggagauccccagugcgacggcuuucagaauaaaaagugggaucuguucgucgagcggucuaaagccuauagcaacuguuacccuuaugacgugcccgauuacgcuucccuccgcucucugguugccagcuccgggacccuugaauuuaauaacgagagcuucaauuggacgggagugacccaaaacggcacaucuuccgcuugcauuagacggagcaauucuuccuuuuucagccgccugaacuggcucacccaucugaauuuuaaguauccugcccuuaacaugacaaugcccaacaaugagcaguucgacaagcuguacaucuggggcguccaccauccugggaccgauaaagaccagauuucucucuaugcgcaguccagcggaagaaucacgguguccacaaagcggucucaacaggccguuauuccgaacaucggcagccgccccagaauccggaauauuccuucccgcaucagcauuuacuggaccaucgugaaacccggggauauucugcugaucaacucuacaggaaaucucaucgcuccuagaggcuacuuuaagauucgguccgggaaaagcucuaucaugcgcagcgacgcccccauuggaaaguguaaguccgaaugcaucaccccgaacggcucuauuccuaaugacaaacccuuccagaacgucaauagaaucaccuauggcgcuuguccucgguacgugaagcagagcacacugaaacuugccacggggaugcgcaacgugcccgagaagcaaaccagaggaaucuuuggcgcgauugccggguucaucgaaaauggaugggagggcauggucgaugggugguauggauuucggcaccagaacuccgagggcagaggccaggcugccgaccugaaaagcacacaagcugccauugaucagaucaaugggaagcucaaccgccugauuggaaaaaccaaugaaaaguuccaccagaucgagaaggaguucucugaaguugaaggccggauucaggaccuugagaaauacguggaggauacaaagaucgaccugugguccuauaacgccgaacuccugguggcucuggagaaccaacauaccaucgaucucacggacagcgaaaugaauaaacuguuugagaagaccaaaaagcagcuuagagaaaacgcggaggauauggggaauggaugcuucaagauuuaccacaaaugugacaacgccugcaucggcucuauucgcaaugggacauaugaucauaacgucuaccgggacgaggcucugaauaacagauuucagaucaagggcguggaacucaaauccggauacaaggacuggauucuguggaucagcuucgccaucuccugcuuucuucuguguguugcccuccugggcuucauuaugugggcuugccagaaagggaauauccgcuguaacauuugcaucuga

SEQ ID NO: 202117 - RNA, 1701 nt, Artificial Sequence; identical to SEQ ID NO: 202066
  derived and/or modified CDS sequence (opt5) from hemagglutinin__InfluenzaA__AGL09792

SEQ ID NO: 202118 - RNA, 1701 nt, Artificial Sequence
  derived and/or modified CDS sequence (opt5) from hemagglutinin__InfluenzaA__AGL09794
augaagaccaucauugcccugagcuacauccucugccugguguucgcucagaaacuucccggcaacgacaauuccacagccacgcugugucucgggcaccaugcggucccuaacggaaccauuguuaagacaaucaccaaugauagaauugaggugacaaacgcuaccgaacuggugcaaaauucuagcaucggcgagaucugcgacuccccgcaccagauucuugauggggaaaacuguacacugaucgacgcccuccugggagauccccagugcgacggcuuucagaauaaaaagugggaucuguucgucgagcggucuaaagccuauagcaacuguuacccuuaugacgugcccgauuacgcuucccuccgcucucugguugccagcuccgggacccuugaauuuaauaacgagagcuucaauugggcuggagugacgcaaaacggcaccucuuccgccugcauuagaggcagcaauucuuccuuuuucagccggcugaacuggcucacacaucugaauuuuaaguauccugcgcuuaacgucaccaugcccaacaaugagcaguucgacaagcuguacaucuggggagugcaccauccugggacagauaaagaccagauuuuucucuaugcccagucuuccggccgcaucaccguuagcacgaagagaucccaacaggcugugauuccgaacaucgggucucggccccgcaucagaaauauuccuagccggaucuccauuuacuggacaaucgucaaacccggagauauucugcugaucaacagcaccggcaaucucaucgccccucgcggguacuucaagauuagaucuggaaaauccagcaucaugcggucugacacacccauuggcaaguguaagagcgaaugcaucaccccgaacggcuccauuccuaaugacaaacccuuucagaacgugaaucgcaucaccuauggggcuuguccuagauacgugaagcagucuacacugaaacuugccacgggaaugcggaacguccccgagaagcaaacccgcggcaucuucggggcgauugccggauuuaucgaaaauggcugggaggggaugguugauggaugguauggcuucagacaccagaacagcgagggccgggggcaggcugccgaccugaaauccacacaagcugccauugaucagaucaauggaaagcucaacagacugauuggcaaaaccaaugaaaaguuccaccagaucgagaaggaauuuagcgagguggaagggcgcauucaggaccuugagaaauacguggaggauacaaagaucgaccuguggucuuauaacgccgaacuccuggucgcucuggagaaccaacauaccaucgaucucacggacuccgaaaugaauaaacuguucgagaagaccaaaaagcagcuucgggaaaacgcggaggauaugggaaauggcugcuuuaagauuuaccacaaaugugacaacgccugcaucgggagcauuagaaauggcacauaugaucaugacguguaccgcgacgaggcucugaacaaucgguuccagaucaagggaguugaacucaaaucuggcuacaaggauuggauucuguggaucuccuuugccaucagcugcuuccuucuguguguggcccuccugggguuuauuaugugggcuugccagaaaggaaacaucagauguaauauuugcaucuga

SEQ ID NO: 202119 - RNA, 1701 nt, Artificial Sequence; identical to SEQ ID NO: 202066
  derived and/or modified CDS sequence (opt5) from hemagglutinin__InfluenzaA__AGL09795

SEQ ID NO: 202120 - RNA, 1701 nt, Artificial Sequence
  derived and/or modified CDS sequence (opt5) from hemagglutinin__InfluenzaA__AGL09797
augaagaccaucauugcccugagcuacauccucugccugguguucucccagaaacuucccggcaacgacaauucuacagcuacgcugugucucgggcaccaugccgucccuaacggaaccauuguuaagacaaucaccaaugauagaauugaggugacaaacgcgaccgaacuggugcaaaauagcuccaucggcgagaucugcgacucuccgcaccagauucuugauggggaaaacuguacacugaucgacgcucuccugggagauccccagugcgacggcuuucagaauaaaaagugggaucuguucgucgagcggagcaaagccuauuccaacuguuacccuuaugacgugcccgauuacgccucucuccgcagccugguugcuuccagcgggacccuugaauuuaauaacgagucuuucaauugggccggagugacgcaaaacggcaccuccagcgcuugcauuagaggcucuaauuccagcuuuuucucucggcugaacuggcucacacaucugaauuuuaaguauccugcccuuaacgucaccaugcccaacaaugagcaguucgacaagcuguacaucuggggagugcaccauccugggacagauaaagaccagauuuuucucuaugcgcaguccagcggccgcaucaccguuuccacgaagagaucucaacaggccgugauuccgaacaucgggagccggccccgcaucagaaauauuccuucccggaucagcauuuacuggacaaucgucaaacccggagauauucugcugaucaacucuaccggcaaucucaucgcuccucgcggguacuucaagauuagauccggaaaaagcucuaucaugcggagcgacgcccccauuggcaaguguaaguccgaaugcaucacaccgaacggcucuauuccuaaugacaaacccuuucagaacgugaaucgcaucaccuauggggcuuguccuagauacgugaagcagagcacccugaaacuugccacaggaaugcggaacguccccgagaagcaaacgcgcggcaucuucggggcgauugccggauuuaucgaaaauggcugggaggggaugguugauggaugguauggcuucagacaccagaacuccgagggccgggggcaggcugccgaccugaaaagcacccaagcugccauugaucagaucaauggaaagcucaacagacugauuggcaaaacaaaugaaaaguuccaccagaucgagaaggaauuuucugagguggaagggcgcauucaggaccuugagaaauacguggaggauaccaagaucgaccugugguccuauaacgccgaacuccuggucgcucuggagaaccaacauacaaucgaucucaccgacagcgaaaugaauaaacuguucgagaagacgaaaaagcagcuucgggaaaacgcggaggauaugggaaauggcugcuuuaagauuuaccacaaaugugacaacgccugcaucgggucuauuagaaauggcacauaugaucaugacguguaccgcgacgaggcucugaacaaucgguuccagaucaagggaguugaacucaaauccggcuacaaggauuggauucuguggaucagcuuugccaucuccugcuuccuucuguguguggcccuccugggguuuauuaugugggcuugccagaaaggaaacaucagauguaauauuugcaucuga

SEQ ID NO: 202121 - RNA, 1701 nt, Artificial Sequence
  derived and/or modified CDS sequence (opt5) from hemagglutinin__InfluenzaA__AGL09798
augaagaccaucauugcccugagcuacauccucugccugguguucgcucagaaacuucccggcaacgacaauuccacagccacgcugugucucgggcaccaugcggucccuaacggaaccauuguuaagacaaucaccaaugauagaauugaggugacaaacgcuaccgaacuggugcaaaauucuagcaucggcgagaucugcgacuccccgcaccagauucuugauggggaaaacuguacacugaucgacgcccuccugggagauccccagugcgacggcuuucagaauaaaaagugggaucuguucgucgagcggucuaaagccuauagcaacuguuacccuuaugacgugcccgauuacgcuucccuccgcucucugguugccagcuccgggacccuugaauuuaauaacgagagcuucaauugggcuggagugacgcaaaacggcaccucuuccgccugcauuagaggcagcaauucuuccuuuuucagccggcugaacuggcucacacaucugaauuuuaaguauccugcgcuuaacgucaccaugcccaacaaugagcaguucgacaagcuguacaucuggggagugcaccauccugggacagauaaagaccagauuuuucucuaugcccagucuuccggccgcaucaccguuagcacgaagagaucccaacaggcugugauuccgaacaucgggucucggccccgcaucagaaauauuccuagccggaucuccauuuacuggacaaucgucaaacccggagauauucugcugaucaacagcaccggcaaucucaucgccccucgcggguacuucaagauuagaucuggaaaauccagcaucaugcggucugacgcucccauuggcaaguguaagagcgaaugcaucacaccgaacggcuccauuccuaaugacaaacccuuucagaacgugaaucgcaucaccuauggggccuguccuagauacgugaagcagucuacccugaaacuugcgacaggaaugcggaacguccccgagaagcaaacgcgcggcaucuucggggccauugcuggauuuaucgaaaauggcugggaggggaugguugauggaugguauggcuucagacaccagaacuucgagggccgggggcaggccgcugaccugaaaagcacccaagccgccauugaucagaucaauggaaagcucaacagacugauuggcaaaacaaaugaaaaguuucaccagaucgagaaggaguucuccgaaguggaagggcgcauucaggaccuugagaaauacguggaggauaccaagaucgaccuguggagcuauaacgcugaacuccuggucgcgcuggagaaccaacauacaaucgaucucaccgacucugaaaugaauaaacuguuugagaagacgaaaaagcagcuucgggaaaacgccgaggauaugggaaauggcugcuucaagauuuaccacaaaugugacaacgcuugcaucggguccauuagaaauggcacauaugaucauuacguguaccgcgacgaggcccugaacaaucgguuucagaucaagggaguugaacucaaaagcggcuauaaggacuggauucuguggaucucuuucgccaucuccugcuuucuucuguguguggcucuccugggguucauuaugugggccugccagaaaggaaacaucagauguaauauuugcaucuga

SEQ ID NO: 202122 - RNA, 1701 nt, Artificial Sequence; identical to SEQ ID NO: 202120
  derived and/or modified CDS sequence (opt5) from hemagglutinin__InfluenzaA__AGL09799

SEQ ID NO: 202123 - RNA, 1701 nt, Artificial Sequence; identical to SEQ ID NO: 202066
  derived and/or modified CDS sequence (opt5) from hemagglutinin__InfluenzaA__AGL09800

SEQ ID NO: 202124 - RNA, 1701 nt, Artificial Sequence; identical to SEQ ID NO: 201930
  derived and/or modified CDS sequence (opt5) from hemagglutinin__InfluenzaA__AGL09801

SEQ ID NO: 202125 - RNA, 1701 nt, Artificial Sequence; identical to SEQ ID NO: 201930
  derived and/or modified CDS sequence (opt5) from hemagglutinin__InfluenzaA__AGL09802

SEQ ID NO: 202126 - RNA, 1701 nt, Artificial Sequence
  derived and/or modified CDS sequence (opt5) from hemagglutinin__InfluenzaA__AGL09803
augaagaccaucauugcccugagcuacauccucugccugguguucgcucagaaacuucccggcaacgacaauuccacagccacgcugugucucgggcaccaugcggucccuaacggaaccauuguuaagacaaucaccaaugauagaauugaggugacaaacgcuaccgaacuggugcaaaauucuagcaucggcgagaucugcgacuccccgcaccagauucuugauggggaaaacuguacacugaucgacgcccuccugggagauccccagugcgacggcuuucagaauaaaaagugggaucuguucgucgagcggucuaaagccuauagcaacuguuacccuuaugacgugcccgauuacgcuucccuccgcucucugguugccagcuccgggacccuugaauuuaauaacgagagcuucaauuggacgggagugacccaaaacggcacaucuuccgcuugcauuagacggagcaauucuuccuuuuucagccgccugaacuggcucacccaucugaauuuuaaguauccugcccuuaacgucacaaugcccaacaaugagcaguucgacaagcuguacaucuggggcgugcaccauccugggaccgauaaagaccagauuuuucucuaugcgcagucuuccggaagaaucacgguuagcacaaagcggucccaacaggccgugauuccgaacaucggcucucgccccagaauccggaauauuccuagccgcaucuccauuuacuggaccaucgucaaacccggggauauucugcugaucaacagcacaggaaaucucaucgcuccuagaggcuacuucaagauucggucugggaaauccagcaucaugcgcucugacgcccccauuggaaaguguaagagcgaaugcaucaccccgaacggcuccauuccuaaugacaaacccuuucagaacgugaauagaaucaccuauggcgcuuguccucgguacgugaagcagcgcacacugaaacuugccacggggaugagaaacguccccgagaagcaaacccggggaaucuucggcgcgauugccggguuuaucgaaaauggaugggagggcaugguugaugggugguauggauucagacaccagaacucugagggccgcggccaggcugccgaccugaaaagcacacaagcugccauugaucagaucaaugggaagcucaaccggcugauuggaaaaaccaaugaaaaguuccaccagaucgagaaggaauuuuccgagguggaaggccgcauucaggaccuugagaaauacguggaggauacaaagaucgaccuguggagcuauaacgccgaacuccuggucgcucuggagaaccaacauaccaucgaucucacggacucugaaaugaauaaacuguucgagaagaccaaaaagcagcuuagagaaaacgcggaggauauggggaauggaugcuuuaagauuuaccacaaaugugacaacgccugcaucggcuccauucggaaugggacauaugaucaugacguguacagagacgaggcucugaacaaucgcuuccagaucaagggcguugaacucaaaagcggauacaaggauuggauucuguggaucucuuuugccaucuccugcuuccuucuguguguggcccuccugggcuuuauuaugugggcuugccagaaagggaacauccgguguaauauuugcaucuga

SEQ ID NO: 202127 - RNA, 1701 nt, Artificial Sequence; identical to SEQ ID NO: 201963
  derived and/or modified CDS sequence (opt5) from hemagglutinin__InfluenzaA__AGL09804

SEQ ID NO: 202128 - RNA, 1701 nt, Artificial Sequence; identical to SEQ ID NO: 202069
  derived and/or modified CDS sequence (opt5) from hemagglutinin__InfluenzaA__AGL09805

SEQ ID NO: 202129 - RNA, 1701 nt, Artificial Sequence; identical to SEQ ID NO: 202098
  derived and/or modified CDS sequence (opt5) from hemagglutinin__InfluenzaA__AGL09806

SEQ ID NO: 202130 - RNA, 1701 nt, Artificial Sequence; identical to SEQ ID NO: 202069
  derived and/or modified CDS sequence (opt5) from hemagglutinin__InfluenzaA__AGL09807

SEQ ID NO: 202131 - RNA, 1701 nt, Artificial Sequence
  derived and/or modified CDS sequence (opt5) from hemagglutinin__InfluenzaA__AGL09808
augaagaccaucauugcccugagcuacauccucugccugguguucgcucagaaacuucccggcaacgacaauuccacagccacgcugugucucgggcaccaugcggucccuaacggaaccauuguuaagacaaucaccaaugaucaaauugaggugacaaacgcuaccgaacuggugcaaaauucuagcaucggcgagaucugcgacuccccgcaccagauucuugauggggaaaacuguacacugaucgacgcccuccugggagauccccagugcgacggcuuucagaauaaaaagugggaucuguucgucgagagaucuaaagccuauagcaacuguuacccuuaugacgugcccgauuacgcuucccuccggucucugguugccagcuccgggacccuugaauuuaauaacgagagcuucaauugggcuggagugacgcagaacggcaccucuuccgccugcauucgcggcagcaauucuuccuuuuucagcagacugaacuggcucacacaucugaauuuuaaguauccugcgcuuaacgucaccaugcccaacaaugagcaguucgacaagcuguacaucuggggagugcaccauccugggacagauaaagaccagauuuuucucuaugcccaaucuuccggccggaucaccguuagcacgaagcgcucccagcaggcugugauuccgaacgucgggucuagaccccggauccgcaauaucccuagcagaauuuccaucuacuggacaauugugaaacccggagauauccugcugauuaacagcaccggcaaucucaucgccccucggggguacuucaagauccgcucuggaaaauccagcauuaugagaucugacgcucccaucggcaaguguaagagcgaaugcauuacaccgaacggcuccaucccuaaugacaaacccuuucagaacgugaaucggauuaccuauggggccuguccucgcuacgucaagcaaucuacccugaaacuugcgacaggaaugagaaacguucccgagaagcagacgcggggcaucuucggggccaucgcuggauuuauugaaaauggcugggaggggaugguggauggaugguauggcuuccgccaccagaacagcgagggcagagggcaagccgcugaccugaaauccacccaggccgccaucgaucagauuaauggaaagcucaaccggcugaucggcaaaacaaaugaaaaguuccaccagauugagaaggaauuuagcgagguggaagggagaauccaagaccuugagaaauacgucgaggauaccaagauugaccuguggucuuauaacgcugaacuccugguggcgcuggagaaccagcauacaaucgaucucaccgacuccgaaaugaauaaacuguucgagaagacgaaaaagcagcuucgcgaaaacgccgaggauaugggaaauggcugcuuuaagaucuaccacaaaugugacaacgcuugcauugggagcauccggaauggcacauaugaucaugacguuuacagagacgaggcccugaacaaucgcuuccagauuaagggaguggaacucaaaucuggcuacaaggauuggauccuguggauuuccuuugccaucagcugcuuccuucugugugucgcucuccugggguuuaucaugugggccugccaaaaaggaaacauucgguguaauaucugcauuuga

SEQ ID NO: 202132 - RNA, 1701 nt, Artificial Sequence
  derived and/or modified CDS sequence (opt5) from hemagglutinin__InfluenzaA__AGL09809
augaaggccauccugguggucaugcucuacaccuucgcuacagccaacgcggacacgcugugcauuggcuaucacgcuaauaacagcaccgauacaguugacaccgugcuugagaaaaaugugacagucacccauuccgugaaccugcucgaagauaagcacaaugggaaacuguguaaacuuagaggaguugcuccccugcaucucggcaagugcaacaucgccggguggauucugggaaauccugagugugaaucucugagcacagccuccucuuggagcuacaucguggagaccuccggcucugacaacgggacgugcuauccgggagauuuuauugacuacgaggagcuccgggagcagcugagcuccgucagcucuuucgaacgcuuugagaucuuccccaagaccuccagcuggccuaaucacgauucuaacaagggcgugacagccgcuuguccccaugccggcgcgaaaggguuuuauaagaaucuuaucuggcugguuaaaaagggaaacuccuacccuaaacucagcauuucuuauaucaaugacaagggcaaggaagugcugguccuuugggggauucaccaccccuccaccacagccgaucaacagagccuguaccagaacgcugacaccuacguguucgugggaacguccagauauucuaaaaaguuuaaaccugagaucgccauucggccgaagguccgcgaucaggagggcagaaugaauuacuauuggacacucguugaacccggggacaaaaucaccuucgaggcuacaggaaaccugguggugccucgguacgccuuugcgauggaacgcaacgccggcagcggcauuaucaucuccgauacccccguccaugacugcaauaccacaugucaaacgccuaagggggcuauuaacaccagccugcccuuccagaauauccacccgauuacaaucggaaaaugcccuaaguaugugaagucuaccaaacucagacuggccacaggccuucggaacguucccuccauucagagccgcgggcuguuuggagcuaucgccggcuucaucgaagggggauggaccggcaugguggacggcugguacggguaucaucaccagaaugaacaaggaucuggcuacgccgcugaucucaagagcacgcagaacgcgauugacaaaaucacaaauaaggucaacuccgugauugagaaaaugaauacccaguuuaccgccguugggaaggaguucaaccaccuggaaaagagaaucgagaaucuuaacaaaaagguggaugacggauuccuggauauuuggacauacaaugcugaacuccugguccugcucgagaacgaacggacccuggacuaucaugauucuaaugugaaaaaccuuuacgagaagguccgcaaccagcugaaaaauaacgccaaggagaucggcaauggguguuuugaguucuaucacaagugcgacaacacauguauggaaagcgugaaaaauggcacguacgauuauccuaaguacuccgaagaggccaaacucaacagagaagagaucgacggaguuaagcuggagagcacccggauuuaucaaauccuugcuauuuacucuacagccgcguccagccuggugcucgucgugucucugggcgcuaucuccuuuuggaugugcagcaaugggucccugcagugccgcauuuguaucuga

SEQ ID NO: 202133 - RNA, 1701 nt, Artificial Sequence
  derived and/or modified CDS sequence (opt5) from hemagglutinin__InfluenzaA__AGL09810
augaagaccaucauugcccugagcuacauccucugccugguguucgcucagaaacuucccggcaacgacaauuccacagccacgcugugucucgggcaccaugcggucccuaacggaaccauuguuaagacaaucaccaaugauagaauugaggugacaaacgcuaccgaacuggugcaaaauucuagcaucggcgagaucugcgacuccccgcaccagauucuugauggggaaaacuguacacugaucgacgcccuccugggagauccccagugcgacggcuuucagaauaaaaagugggaucuguucgucgagcggucuaaagccuauagcaacuguuacccuuaugacgugcccgauuacgcuucccuccgcucucugguugccagcuccgggacccuugaauuuagcaaugagucuuucaacuggacgggagugacccaaaauggcacauccagcgcuugcauuagacggucuaacuccagcuuuuucucucgccugaauuggcucacccaucugaacuuuaaguauccugcccuuaaugucacaaugcccaacaacgagcaguucgacaagcuguacaucuggggcgugcaccauccugggaccgauaaagaccagauuuuucucuaugcgcaguccagcggaagaaucacgguuuccacaaagcggucucaacaggccgugauuccgaauaucggcagccgccccagaauccggaacauuccuucccgcaucagcauuuacuggaccaucgucaaacccggggauauucugcugaucaauucuacaggaaaccucaucgcuccuagaggcuacuucaagauucgguccgggaaaagcucuaucaugcgcagcgacgcccccauuggaaaguguaaguccgaaugcaucaccccgaauggcucuauuccuaacgacaaacccuuucagaaugugaacagaaucaccuauggcacauguccucgguacgugaagcagagcacgcugaaacuugcuaccgggaugcgcaauguccccgagaagcaaacaagaggaaucuucggcgccauugcgggguuuaucgaaaacggaugggagggcaugguugaugggugguauggauuccggcaccaaaauuccgagggcagaggccaggccgcugaccugaaaagcacccaggccgcuauugaucagaucaacgggaagcucaaucgccugauuggaaaaacaaacgaaaaguuccaccagaucgagaaggaauuuucugagguggaaggccggauucaggaccuugagaaauacguggaggauaccaagaucgaccugugguccuauaaugccgaacuccuggucgcccuggagaaccaacauacgaucgaucucacagacagcgaaaugaacaaacuguucgagaagaccaaaaagcagcuuagagaaaaugcugaggauauggggaacggaugcuuuaagauuuaccacaaaugugacaaugcgugcaugggcucuauccgcaacgggaccuaugaucaugacguguaccgggacgaggcccugaauaacagauuccagauuaagggcguugaacucaaauccggauacaaggauuggauccuguggauuagcuuugcuaucuccugcuuccuucuguguguggcccuccugggcuuuaucaugugggccugccagaaagggaauauucgcuguaacaucugcauuuga

SEQ ID NO: 202134 - RNA, 1701 nt, Artificial Sequence; identical to SEQ ID NO: 201930
  derived and/or modified CDS sequence (opt5) from hemagglutinin__InfluenzaA__AGL09811

SEQ ID NO: 202135 - RNA, 1701 nt, Artificial Sequence
  derived and/or modified CDS sequence (opt5) from hemagglutinin__InfluenzaA__AGL09812
augaagaccaucauugcccugagcuacauccucugccugguguucgcucagaaacuucccggcaacgacaauuccacagccacgcugugucucgggcaccaugcggucccuaacggaaccauuguuaagacaaucaccaaugauagaauugaggugacaaacgcuaccgaacuggugcaaaauucuagcaucggcgagaucugcgacuccccgcaccagauucuugauggggaaaacuguacacugaucgacgcccuccugggagauccccagugcgacggcuuucaggauaaaaagugggaccuguucgucgagcggucuaaagccuauagcaauuguuacccuuaugaugugcccgacuacgcuucccuccgcucucugguugccagcuccgggacccuugaauuuaacaaugagagcuucaacugggcuggagugacgcaaaauggcaccucuuccgccugcauuagaggcagcaacucuuccuuuuucagccggcugaauuggcucacacaucugaacuuuaaguauccugcgcuuaaugucaccaugcccaacaacgagcaguucgauaagcuguacaucuggggagugcaccauccugggacagacaaagaucagauuuuucucuaugcccagucuuccggccgcaucaccguuagcacgaagagaucccaacaggcugugauuccgaauaucgggucucggccccgcaucagaaacauuccuagccggaucuccauuuacuggacaaucgucaaacccggagacauucugcugaucaauagcaccggcaaccucaucgccccucgcggguacuucaagauuagaucuggaaaauccagcaucaugcggucugacgcucccauuggcaaguguaagagcgaaugcaucacaccgaauggcuccauuccuaacgauaaacccuuucagaaugugaaccgcaucaccuauggggccuguccuagauacgugaagcagucuacccugaaacuugcgacaggaaugcggaauguccccgagaagcaaacgcgcggcaucuucggggccauugcuggauuuaucgaaaacggcugggaggggaugguugacggaugguauggcuucagacaccagaauagcgagggccgggggcaggccgcugaucugaaauccacccaagccgccauugaccagaucaacggaaagcucaauagacugauuggcaaaacaaacgaaaaguuccaccagaucgagaaggaauuuagcgagguggaagggcgcauucaggaucuugagaaauacguggaggacaccaagaucgaucuguggucuuauaaugcugaacuccuggucgcgcuggagaaccaacauacaaucgaccucaccgauuccgaaaugaacaaacuguucgagaagacgaaaaagcagcuucgggaaaaugccgaggacaugggaaacggcugcuuuaagauuuaccacaaaugugauaaugcuugcaucgggagcauuagaaacggcacauaugaccaugacguguaccgcgaugaggcccugaauaaccgguuccagaucaagggaguugaacucaaaucuggcuacaaggacuggauucuguggaucuccuuugccaucagcugcuuccuucuguguguggcucuccugggguuuauuaugugggccugccagaaaggaaauaucagauguaacauuugcaucuga

SEQ ID NO: 202136 - RNA, 1701 nt, Artificial Sequence; identical to SEQ ID NO: 201907
  derived and/or modified CDS sequence (opt5) from hemagglutinin__InfluenzaA__AGL09813

SEQ ID NO: 202137 - RNA, 1701 nt, Artificial Sequence; identical to SEQ ID NO: 201955
  derived and/or modified CDS sequence (opt5) from hemagglutinin__InfluenzaA__AGL09814

SEQ ID NO: 202138 - RNA, 1701 nt, Artificial Sequence
  derived and/or modified CDS sequence (opt5) from hemagglutinin__InfluenzaA__AGL09815
augaagaccaucauugcccugagcuacauccucugccugguguucgcucagaaacuucccggcaacgacaauuccacagccacgcugugucucgggcaccaugcggucccuaacggaaccauuguuaagacaaucaccaaugauagaauugaggugacaaacgcuaccgaacuggugcaaaauucuagcaucggcgagaucugcgacuccccgcaccagauucuugauggggaaaacuguacacugaucgacgcccuccugggagauccccagugcgacggcuuucagaauaaaaagugggaucuguucgucgagcggucuaaagccuauagcaacuguuacccuuaugacgugcccgauuacgcuucccuccgcucucugguugccagcuccgggacccuugaauuuaauaacgagagcuucaauuggacgggagugacccaaaacggcacaucuuccgcuugcauuagacggagcaauucuuccuuuuucagccgccugaacuggcucacccaucugaauuuuaaguauccugcccuuaacgucacaaugcccaacaaugagcaguucgacaagcuguacaucuggggcgugcaccauccugggaccgauaaagaccagauuuuucucuaugcgcagucuuccggaagaaucacgguuagcacaaagcggucccaacaggccgugauuccgaacaucggcucucgccccagaauccggagcauuccuucccgcaucagcauuuacuggaccaucgucaaacccggggauauucugcugaucaauucuacaggaaaccucaucgcuccuagaggcuacuucaagauucgguccgggaaaagcucuaucaugcgcagcgacgcccccauuggaaaguguaaguccgaaugcaucaccccgaauggcucuauuccuaacgacaaacccuuucagaaugugaacagaaucaccuauggcgcuuguccucgguacgugaagcagagcacacugaaacuugccacggggaugcgcaauguccccgagaagcaaaccagaggaaucuucggcgcgauugccggguuuaucgaaaacggaugggagggcaugguugaugggugguauggauuccggcaccaaaauuccgagggcagaggccaggcugccgaccugaaaagcacacaggcugccauugaucagaucaacgggaagcucaaucgccugauuggaaaaaccaacgaaaaguuccaccagaucgagaaggaauuuucugagguggaaggccggauucaggaccuugagaaauacguggaggauacaaagaucgaccugugguccuauaaugccgaacuccuggucgcucuggagaaccaacauaccaucgaucucacggacagcgaaaugaacaaacuguucgagaagaccaaaaagcagcuuagagaaaaugcggaggauauggggaacggaugcuuuaagauuuaccacaaaugugacaaugccugcaucggcucuauucgcaacgggacauaugaucaugacguguaccgggacgaggcucugaauaacagauuccagaucaagggcguugaacucaaauccggauacaaggauuggauucuguggaucagcuuugccaucuccugcuuccuucuguguguggcccuccugggcuuuauuaugugggcuugccagaaagggaauauccgcuguaacauuugcaucuga

SEQ ID NO: 202139 - RNA, 1701 nt, Artificial Sequence; identical to SEQ ID NO: 201955
  derived and/or modified CDS sequence (opt5) from hemagglutinin__InfluenzaA__AGL09816

SEQ ID NO: 202140 - RNA, 1701 nt, Artificial Sequence
  derived and/or modified CDS sequence (opt5) from hemagglutinin__InfluenzaA__AGL09817
augaagaccaucauugcccugagcuacauccucugccugguguucgcucaggagcuucccggcaacgacgauuccacagccacgcugugucucgggcaccaugcggucccuaauggaaccauuguuaaaacaaucaccaacgaccaaauugaagugacaaaugcuaccgagcuggugcagucuagcuccacaggcgaaaucugcaacucuccgcaccagauccuugauggggagaauuguacccugauugacgcccuccugggagauccccagugcgacggcuuucaaaacaagaaaugggaucuguucgucgaaagaagcaaggcccauuccaauuguuauccuuacgacgugcccgauuaugcuucucuccggagccugguugccuccagcgggacgcuugaguuuaacucugaguccuucaauuggaccggagugacacagaacggcaccagcucugcuugcauccgcagauccaauaacagcuuuuucucucggcugaauuggcucacacaccugaacuuuaaauacccugcccuuaaugucaccaugcccaacaacgaacaguucgacaagcuguauauuuggggcgugcaucacccugggacggauaaggaccagaucuuucucuacgcgcaagccuccggacgcauuacaguuagcaccaaaagaucccagcaggcugugaucccgaauauuggcucucggccccgcgucagaaacaucccuagccggguguccaucuauuggacaauugugaagcccggggauauccugcugauuaauagcaccggaaaccucaucgccccucgcggcuacuucaaaauuagaucugggaaguccagcaucaugcggucugacgcucccaucggaaaauguaauagcgccugcauuaccccgaacggcuccaucccuaaugacaagcccuuucagaacgucaaucgcauuacauacggcgcguguccuagauauguuaagcaaaacacgcugaaacuugccaccgggaugcggaaugugcccgagaagcagacacgcggaaucuucggcgcuauugccggguuuaucgaaaacggaugggagggcaugguggaugggugguacggauucagacaccaaaauucugagggccggggccaggcugccgaccugaaaagcacccaggccgcuaucgaucagauuaacgggaagcucaauagacugaucggaaaaacaaacgaaaaguuccaucagauugagaaagaauuuuccgaggucgaaggccgcauccaagaccuugagaaguauguggaggauaccaagauugaccuguggagcuacaacgcggaacuccugguugcccuggagaaucagcacacgaucgaucucacagacucugaaaugaacaaacuguucgagaagaccaaaaagcagcuucgggaaaaugcugaggauauggggaacggaugcuuuaaaauuuaucauaagugugacaaugccugcaucggcuccaucagaaacgggaccuacgaucacgacguguaucgcgacgaggcccugaauaaccgguuccagauuaagggcgucgaacucaaaagcggauacaaggauuggauccuguggauuucuuuugcuaucuccugcuuccuucuguguguggcccuccugggcuuuauuaugugggcgugccaaaaagggaauaucagauguaacaucugcauuuga

SEQ ID NO: 202141 - RNA, 1701 nt, Artificial Sequence; identical to SEQ ID NO: 201955
  derived and/or modified CDS sequence (opt5) from hemagglutinin__InfluenzaA__AGL09818

SEQ ID NO: 202142 - RNA, 1701 nt, Artificial Sequence; identical to SEQ ID NO: 202066
  derived and/or modified CDS sequence (opt5) from hemagglutinin__InfluenzaA__AGL09819

SEQ ID NO: 202143 - RNA, 1701 nt, Artificial Sequence
  derived and/or modified CDS sequence (opt5) from hemagglutinin__InfluenzaA__AGL09820
augaagaccaucauugcccugagcuacauccucugccugguguucgcucagaaacuucccggcaacgacaauuccacagccacgcugugucucgggcaccaugcggucccuaacggaaccauuguuaagacaaucaccaaugaucaaauugaggugacaaacgcuaccgaacuggugcaaaauucuagcaucggcgagaucugcgacuccccgcaccagauucuugauggggaaaacuguacacugaucgacgcccuccugggagauccccagugcgacggcuuucagaauaaaaagugggaucuguucgucgagagaucuaaagccuauagcaacuguuacccuuaugacgugcccgauuacgcuucccuccggucucugguugccagcuccgggacccuugaauuuaauaacgagagcuucaauuggacgggagugacccagaacggcacaucuuccgcuugcauucgcggcagcaauucuuccuuuuucagcagacugaacuggcucacccaucugaauuuuaaguauccugcccuuaacgucacaaugcccaacaaugagcaguucgacaagcuguacaucuggggagugcaccauccugggaccgauaaagaccagauuuuucucuaugcgcaaucuuccggccggaucacgguuagcacaaagcgcucccagcaggccgugauuccgaacaucgggucuagaccccggauccgcaauauuccuagcagaaucuccauuuacuggaccaucgucaaacccggagauauucugcugaucaacagcacaggcaaucucaucgcuccucggggguacuucaagauucgcucuggaaaauccagcaucaugagaucugacgcccccauuggcaaguguaagagcgaaugcaucaccccgaacggcuccauuccuaaugacaaacccuuucagaacgugaaucggaucaccuauggggcuuguccucgcuacgugaagcaaucuacacugaaacuugccacgggaaugagaaacguccccgagaagcagacccggggcaucuucggggcgauugccggauuuaucgaaaauggcugggaggggaugguugauggaugguauggcuuccgccaccagaacagcgagggcagagggcaagcugccgaccugaaauccacacaggcugccauugaucagaucaauggaaagcucaaccggcugauuggcaaaaccaaugaaaaguuccaccagaucgagaaggaauuuagcgagauugaagggagaauccaagaccuugagaaauacguggaggauacaaagaucgaccuguggucuuauaacgccgaacuccugguggcucuggagaaccagcauaccauugaucucacggacuccgaaaugaauaaacuguucgagaagaccaaaaagcagcuucgcgaaaacgcggaggauaugggaaauggcugcuuuaagaucuaccacaaaugugacaacgccugcauugggagcauccggaauggcacauaugaucaugacgucuacagagacgaggcucugaacaaucgcuuccagauuaagggaguggaacucaaaucuggcuacaaggauuggauccuguggaucuccuuugccauuagcugcuuccuucuguguguugcccuccugggguuuaucaugugggcuugccaaaaaggaaacauucgguguaauaucugcauuuga

SEQ ID NO: 202144 - RNA, 1701 nt, Artificial Sequence
  derived and/or modified CDS sequence (opt5) from hemagglutinin__InfluenzaA__AGL09821
augaagaccaucauugcccugagcuacauccucugccugguguucgcucagaaacuucccggcaacgacaauuccacagccacgcugugucucgggcaccaugcggucccuaacggaaccauuguuaagacaaucaccaaugauagaauugaggugacaaacgcuaccgaacuggugcaaaauucuagcaucggcgagaucugcgacuccccgcaccagauucuugauggggaaaacuguacacugaucgacgcccuccugggagauccccagugcgacggcuuucagaauaaaaagugggaucuguucgucgagcggucuaaagccuauagcaacuguuacccuuaugacgugcccgauuacgcuucccuccgcucucugguugccagcuccgggacccuugaauuuaauaacgagagcuucaauuggacgggagugacccaaaacggcacaucuuccgcuugcauuagacggagcaauucuuccuuuuucagccgccugaacuggcucacccaucugaauuuuaaguauccugcccuuaacgucacaaugcccaacaaugagcaguucgacaagcuguacaucuggggcgugcaccauccugggaccgauaaagaccagauuuuucucuaugcgcagucuuccggaagaaucacgguuagcacaaagcggucccaacaggccgugauuccgaacaucggcucucgccccagaauccggaauauuccuagccgcaucuccauuuacuggaccaucgucaaacccggggauauucugcugaucaacagcacaggaaaucucaucgcuccuagaggcuacuucaagauucggucugggaaauccagcaucaugcgcucugacgcccccauuggaaaguguaagagcgaaugcaucaccccgaacggcuccauuccuaaugacaaacccuuucagaacgugaauagaaucaccuauggcgcuuguccucgguacgugaagcagucuacacugaaacuugccacggggaugcgcaacguccccgagaagcaaaccagaggaaucuucggcgcgauugccggguuuaucgaaaauggaugggagggcaugguugaugggugguauggauuccggcaccagaacagcgagggcagaggccaggcugccgaccugaaauccacacaagcugccauugaucagaucaaugggaagcucaaccgccugauuggaaaaaccaaugaaaaguuccaccagaucgagaaggaauuuagcgagguggaaggccggauucaggaccuugagaaauacguggaggauacaaagaucgaccuguggucuuauaacgccgaacuccuggucgcucuggagaaccaacauaccaucgaucucacggacuccgaaaugaauaaacuguucgagaagaccaaaaagcagcuuagagaaaacgcggaggauauggggaauggaugcuuuaagauuuaccacaaaugugacaacgccugcaucggcagcauucgcaaugggacauaugaucauaacguguaccgggacgaggcucugaauaacagauuccagaucaagggcauugaacucaaaucuggauacaaggacuggauccuguggaucuccuuugccauuagcugcuuccuucuguguguugcccuccugggcuuuaucaugugggcuugccagaaagggaauauucgcuguaacaucugcauuuga

SEQ ID NO: 202145 - RNA, 1701 nt, Artificial Sequence; identical to SEQ ID NO: 202069
  derived and/or modified CDS sequence (opt5) from hemagglutinin__InfluenzaA__AGL09822

SEQ ID NO: 202146 - RNA, 1701 nt, Artificial Sequence; identical to SEQ ID NO: 202112
  derived and/or modified CDS sequence (opt5) from hemagglutinin__InfluenzaA__AGL09823

SEQ ID NO: 202147 - RNA, 1701 nt, Artificial Sequence
  derived and/or modified CDS sequence (opt5) from hemagglutinin__InfluenzaA__AGL09824
augaaggccauccuggugguccuccuguacaccuucgcuacagccaacgcggacacgcuuugcauuggcuaucacgcuaauaacagcaccgauacaguugacaccgugcuggagaaaaaugugacagucacccauuccgugaaccuccuggaagauaagcacaaugggaaacuuuguaagcugagaggaguugcuccccuccaucugggcaaaugcaacaucgccggguggauucugggaaauccugagugugaaucucucagcacagccuccucuuggagcuacaucguggagaccuccucuagcgacaacggcacgugcuauccgggggauuuuauuaauuacgaagaacugcgggagcagcuuuccagcgucucuuccuucgaacgcuuugagaucuuccccaagaccagcucuuggccuaaccacgacuccaauaagggagugacagccgcuuguccccaugccggcaccaagagcuuuuauaaaaaccugaucuggcucguuaaaaagggcaauucuuacccuaaacuguccaagagcuauauuaacgauaaggggaaagaagugcuuguccuguggggaauccaccaccccuccacaaccgcggaccaacagucucucuaccagaaugccgaugcuuacguguucgugggcacgagcagauauuccaagaaauuuaagccugagauugccauccggccgaaaguccgcgaccaggaggggagaaugaacuacuauuggacacugauugaacccggagauaagaucaccuucgaggcuacaggcaaccugguugugccucgguacgccuuugcgauggaacgcaaugccgggagcggaauuaucaucucugacacccccgugcaugauugcaacaccacaugucaaacgccugagggcgcuauuaauaccucccuccccuuccagaacauccacccgauuacaaucggcaaaugcccuaaguaugucaagagcaccaaacugagacuugccacagggcugcggaaugugcccucuauucagagccgcggacucuuuggcgcuaucgccggguucaucgaaggaggcuggaccgggaugguugacggaugguacggcuaucaucaccagaacgagcaaggcuccggguacgccgcugaccugaagucuacgcagaaugcgauugauaaaaucacaaacaaggugaauagcgucauugagaaaaugaacacccaguuuaccgccgugggaaaggaguucaaucaccuugagaagagaaucgaaaaccugaauaaaaagguugacgauggcuuccucgacauuuggacauacaacgcugagcugcuggugcuccuggaaaaugagcggacccuugauuaucaugacuccaacgucaaaaaccuguacgagaaggugcgcaaucagcucaaaaacaaugccaaggaaaucgggaacggauguuuugaguucuaucacaagugcgauaauacauguauggaaagcgucaaaaacggcacguacgacuauccuaaguacucugaggaagccaaacugaauagagagaagaucgauggggugaaacuugaguccacccggauuuaucaaauccuggcuauuuacagcacaguugccucuucccucgugcuggucgugagccugggcgcgaucuccuuuuggaugugcucuaacggaagccuccagugccgcauuuguaucuga

SEQ ID NO: 202148 - RNA, 1701 nt, Artificial Sequence; identical to SEQ ID NO: 202066
  derived and/or modified CDS sequence (opt5) from hemagglutinin__InfluenzaA__AGL09825

SEQ ID NO: 202149 - RNA, 1701 nt, Artificial Sequence; identical to SEQ ID NO: 202147
  derived and/or modified CDS sequence (opt5) from hemagglutinin__InfluenzaA__AGL09826

SEQ ID NO: 202150 - RNA, 1701 nt, Artificial Sequence; identical to SEQ ID NO: 201940
  derived and/or modified CDS sequence (opt5) from hemagglutinin__InfluenzaA__AGL09827

SEQ ID NO: 202151 - RNA, 1701 nt, Artificial Sequence
  derived and/or modified CDS sequence (opt5) from hemagglutinin__InfluenzaA__AGL09828
augaagaccaucauugcccugagcuacauccucugccugguguucgcucagaaacuucccggcaacgacaauuccacagccacgcugugucucgggcaccaugcggucccuaacggaaccauuguuaagacaaucaccaaugaucaaauugaggugacaaacgcuaccgaacuggugcaaaauucuagcaucggcgagaucugcgacuccccgcaccagauucuugauggggaaaacuguacacugaucgacgcccuccugggagauccccagugcgacggcuuucagaauaaaaagugggaucuguucgucgagagaucuaaagccuauagcaacuguuacccuuaugacgugcccgauuacgcuucccuccggucucugguugccagcuccgggacccuugaauuuaauaacgagagcuucaauugggcuggagugacgcagaacggcaccucuuccgccugcauucgcggcagcaauucuuccuuuuucagcagacugaacuggcucacacaucugaauuuuaaguauccugcgcuuaacgucaccaugcccaacaaugagcaguucgacaagcuguacaucuggggagugcaccauccugggacagauaaagaccagauuuuucucuaugcccaaucuuccggccggaucaccguuagcacgaagcgcucccagcaggcugugauuccgaacaucgggucuagaccccggauccgcaauauuccuagcagaaucuccauuuacuggacaaucgucaaacccggagauauucugcugaucaacagcaccggcaaucucaucgccccucggggguacuucaagauucgcucuggaaaauccagcaucaugagaucugacgcucccauuggcaaguguaagagcgaaugcaucacaccgaacggcuccauuccuaaugacaaacccuuucagaacgugaaucggaucaccuauggggccuguccucgcuacgugaagcaaucuacccugaaacuugcgacaggaaugagaaacguccccgagaagcagacgcggggcaucuucggggccauugcuggauuuaucgaaaauggcugggaggggaugguugauggaugguauggcuaccgccaccagaacagcgagggcagagggcaagccgcugaccugaaauccacccaggccgccauugaucagaucaauggaaagcucaaccggcugauuggcaaaacaaaugaaaaguuccaccagaucgagaaggaguucagcgaaguggaagggcgcauucaagaccuugagaaauauguggaggauaccaagaucgaccuguggucuuacaacgcugaacuccuggucgcgcuggagaaccagcauacaaucgaucucaccgacuccgaaaugaauaaacuguuugagaagacgaaaaagcagcuuagagaaaacgccgaggauaugggaaauggcugcuucaagauuuaucacaaaugugacaacgcuugcaucgggagcauucggaauggcacauacgaucaugacguguacagagacgaggcccugaacaaucgcuuucagaucaagggaguugaacucaaaucuggcuauaaggauuggauucuguggaucuccuucgccaucagcugcuuucuucuguguguggcucuccugggguucauuaugugggccugccaaaaaggaaacauccgguguaauauuugcaucuga

SEQ ID NO: 202152 - RNA, 1701 nt, Artificial Sequence
  derived and/or modified CDS sequence (opt5) from hemagglutinin__InfluenzaA__AGL09829
augaagaccaucauugcccugagcuacauccucugccugguguucgcucagaaacuucccggcaacgacaauuccacagccacgcugugucucgggcaccaugcggucccuaacggaaccauuguuaagacaaucaccaaugauagaauugaggugacaaacgcuaccgaacuggugcaaaauucuagcaucggcgagaucugcgacuccccgcaccagauucuugauggggaaaacuguacacugaucgacgcccuccugggagauccccagugcgacggcuuucagaauaaaaagugggaucuguucgucgagcggucuaaagccuauagcaacuguuacccuuaugacgugcccgauuacgcuucccuccgcucucugguugccagcuccgggacccuugaauuuaauaacgagagcuucaauugggcuggagugacgcaaaacggcaccucuuccgccugcauuagaggcagcaauucuuccuuuuucagccggcugaacuggcucacacaucugaauuuuaaguauccugcgcuuaacgucaccaugcccaacaaugagcaguucgacaagcuguacaucuggggagugcaccauccugggacagauaaagaccagauuuuucucuaugcccagucuuccggccgcaucaccguuagcacgaagagaucccaacaggcugugauuccgaacaucgggucucggccccgcaucagaaauauuccuagccggaucuccauuuacuggacaaucgucaaacccggagauauucugcugaucaacagcaccggcaaucucaucgccccucgcggguacuucaagauuagaucuggaaaauccagcaucaugcggucugacgcucccauuggcaaguguaagagcgaaugcaucacaccgaacggcuccauuccuaaugacaaacccuuucagaacgugaaucgcaucaccuauggggccuguccuagauacgugaagcagucuacccugaaacuugcgacaggaaugcggaacguccccgagaagcaaacgcgcggcaucuucggggccauugcuggauuuaucgaaaauggcugggaggggaugguugauggaugguauggcuucagacaccagaacagcgagggccgggggcaggccgcugaccuggaauccacccaagccgccauugaucagaucaauggaaaacucaacagacugauuggcaagacaaaugagaaauuccaccagaucgaaaaggaguuuagcgaaguggaggggcgcauucaggaccuugagaaguacguggaagauaccaaaaucgaccuguggucuuauaacgcugagcuccuggucgcgcuggaaaaccaacauacaaucgaucucaccgacuccgagaugaauaagcuguucgagaaaacgaagaaacagcuucgggaaaacgccgaggauaugggaaauggcugcuuuaagauuuaccacaagugugacaacgcuugcaucgggagcauuagaaauggcacauaugaucaugacguguaccgcgacgaagcccugaacaaucgguuccagaucaaaggaguugagcucaagucuggcuacaaagauuggauucuguggaucuccuuugccaucagcugcuuccuucuguguguggcucuccugggguuuauuaugugggccugccagaagggaaacaucagauguaauauuugcaucuga

SEQ ID NO: 202153 - RNA, 1701 nt, Artificial Sequence; identical to SEQ ID NO: 201955
  derived and/or modified CDS sequence (opt5) from hemagglutinin__InfluenzaA__AGL09830

SEQ ID NO: 202154 - RNA, 1701 nt, Artificial Sequence; identical to SEQ ID NO: 202065
  derived and/or modified CDS sequence (opt5) from hemagglutinin__InfluenzaA__AGL09831

SEQ ID NO: 202155 - RNA, 1701 nt, Artificial Sequence
  derived and/or modified CDS sequence (opt5) from hemagglutinin__InfluenzaA__AGL09832
augaagaccaucauugcccugagcuacauccucugccugguguucgcucagaaacuucccggcaacgacaauuccacagccacgcugugucucgggcaccaugcggucccuaacggaaccauuguuaagacaaucaccaaugauagaauugaggugacaaacgcuaccgaacuggugcaaaauucuagcaucggcgagaucugcgacuccccgcaccagauucuugauggggaaaacuguacacugaucgacgcccuccugggagauccccagugcgacggcuuucagaauaaaaagugggaucuguucgucgagcggucuaaagccuauagcaacuguuacccuuaugacgugcccgauuacgcuucccuccgcucucugguugccagcuccgggacccuugaauuuaauaacgagagcuucaauuggacgggagugacccaaaacggcacaucuuccgcuugcauuagacggagcaauucuuccuuuuucagccgccugaacuggcucacccauucuaauuuuaaguauccugcccugaacgucacaaugcccaacaaugagcaguucgacaaacuuuacaucuggggcgugcaccauccugggaccgauaaagaccagauuuuucuguaugcgcaguccagcggaagaaucacgguuuccacaaagcggucucaacaggccgugauuccgaacaucggcagccgccccagaauccggaauauuccuucccgcaucagcauuuacuggaccaucgucaaacccggggauauucuccugaucaacucuacaggaaaucugaucgcuccuagaggcuacuucaagauucgguccgggaaaagcucuaucaugcgcagcgacgcccccauuggaaaguguaaguccgaaugcaucaccccgaacggcucuauuccuaaugacaaacccuuucagaacgugaauagaaucaccuauggcgcuuguccucgguacgugaagcagagcacacucaaacuggccacggggaugcgcaacguccccgagaagcaaaccagaggaaucuucggcgcgauugccggguuuaucgaaaauggaugggagggcaugguugaugggugguauggauuccggcaccagaacuccgagggcagaggccaggcugccgaccuuaaaagcacacaagcugccauugaucagaucaaugggaagcugaaccgccucauuggaaaaaccaaugaaaaguuccaccagaucgagaaggaauuuucugagguggaaggccggauucaggaccuggagaaauacguggaggauacaaagaucgaccuuugguccuauaacgccgaacugcucgucgcucuggagaaccaacauaccaucgaucugacggacagcgaaaugaauaaacucuucgagaagacaaagaagcagcugagagaaaacgcggaggauauggggaauggaugcuuuaagauuuaccacaaaugugacaacgccugcaucggcaccauucgcaaugggaccuaugaucauaacguguaccgggacgaggcucuuaauaacagauuccagaucaagggcguugaacugaaaucuggauacaaggacuggauucucuggaucuccuuugccaucagcugcuuccugcuuuguguggcccugcucggcuuuauuaugugggcuugccagaaagggaauauccgcuguaacauuugcaucuga

SEQ ID NO: 202156 - RNA, 1701 nt, Artificial Sequence; identical to SEQ ID NO: 202066
  derived and/or modified CDS sequence (opt5) from hemagglutinin__InfluenzaA__AGL09833

SEQ ID NO: 202157 - RNA, 1701 nt, Artificial Sequence
  derived and/or modified CDS sequence (opt5) from hemagglutinin__InfluenzaA__AGL09881
augaagaccaucauugcccugagcuacauccucugccugguguucgcucagaaacuucccggcaacgacaauuccacagccacgcugugucucgggcaccaugcggucccuaacggaaccauuguuaagacaaucaccaaugauagaauugaggugacaaacgcuaccgaacuggugcaaaauucuagcaucggcgagaucugcgacuccccgcaccagauucuugauggggaaaacuguacacugaucgacgcccuccugggagauccccagugcgacggcuuucagaauaaaaagugggaucuguucgucgagcggucuaaagccuauagcaacuguuacccuuaugacgugcccgauuacgcuucccuccgcucucugguugccagcuccgggacccuugaauuuaauaacgagagcuucaauugggcuggagugacgcaaaacggcgccucuuccgcgugcauuagaggcagcaauucuuccuuuuucagccggcugaacuggcucacccaucugaauuuuaaguauccugcccuuaacgucacaaugcccaacaaugagcaguucgacaagcuguacaucuggggagugcaccauccugggaccgauaaagaccagauuuuucucuaugcucagucuuccggccgcaucacaguuagcaccaagagaucccaacaggccgugauuccgaacaucgggucucggccccgcaucagaaauauuccuagccggaucuccauuuacuggacgaucgucaaacccggagauauucugcugaucaacagcacaggcaaucucaucgcuccucgcggguacuucaagauuagaucuggaaaauccagcaucaugcggucugacgcccccauuggcaaguguaagagcgaaugcaucaccccgaacggcuccauuccuaaugacaaacccuuucagaacgugaaucgcaucacauauggggcguguccuagauacgugaagcagucuacccugaaacuugccaccggaaugcggaacguccccgagaagcaaacacgcggcaucuucggggcuauugccggauuuaucgaaaauggcugggaggggaugguugauggaugguauggcuucagacaccagaacagcgagggccgggggcaggcugccgaccugaaauccacgcaagccgcuauugaucagaucaauggaaagcucaacagacugauuggcaaaaccaaugaaaaguuccaccagaucgagaaggaauuuagcgagguggaagggcgcauucaggaccuugagaaauacguggaggauacaaagaucgaccuguggucuuauaacgcggaacuccuggucgcccuggagaaccaacauaccaucgaucucacagacuccgaaaugaauaaacuguucgagaagaccaaaaagcagcuucgggaaaacgcugaggauaugggaaauggcugcuuuaagauuuaccacaaaugugacaacgccugcaucgggagcauuagaaauggcacguaugaucaugacguguaccgcgacgaggcccugaacaaucgguuccagaucaagggaguugaacucaaaucuggcuacaaggauuggauucuguggaucuccuuugcuaucagcugcuuccuucuguguguggcccuccugggguuuauuaugugggcgugccagaaaggaaacaucagauguaauauuugcaucuga

SEQ ID NO: 202158 - RNA, 1701 nt, Artificial Sequence; identical to SEQ ID NO: 201930
  derived and/or modified CDS sequence (opt5) from hemagglutinin__InfluenzaA__AGL09882

SEQ ID NO: 202159 - RNA, 1701 nt, Artificial Sequence; identical to SEQ ID NO: 201907
  derived and/or modified CDS sequence (opt5) from hemagglutinin__InfluenzaA__AGL09883

SEQ ID NO: 202160 - RNA, 1701 nt, Artificial Sequence; identical to SEQ ID NO: 201907
  derived and/or modified CDS sequence (opt5) from hemagglutinin__InfluenzaA__AGL09884

SEQ ID NO: 202161 - RNA, 1683 nt, Artificial Sequence; identical to SEQ ID NO: 202060
  derived and/or modified CDS sequence (opt5) from hemagglutinin__InfluenzaA__AGL44438

SEQ ID NO: 202162 - RNA, 1701 nt, Artificial Sequence
  derived and/or modified CDS sequence (opt5) from hemagglutinin__InfluenzaA__AGN69267
augaaggccauccuggugguccuccuguacaccuucacaacgggcaacgcugacacccuuugcauuggguaucacgccaauaacagcacagauaccguugacacagugcuggagaagaaugugaccgucacacauuccgugaaccuccuggaagauagacacaauggaaaacuuuguaagcugcggggcguugcgccccuccaucuggggaagugcaacaucgcuggauggcugcucggcaauccugagugugaacugcuuuuuaccgccucuagcugguccuacauuguggagacgucuaacagcgacaaugggaccugcuauccgggagauuucaucaacuacgaagaacugcgcgagcagcucuccucugucagcuccuuugaaagauucgagauuuuucccaaagccagcucuuggccuaaucacgaaacaaaccggggcgugaccgcugccugucccuaugcuggcgccaauuccuucuaccgcaaccugaucuggcuuguuaagaaggggaauagcuauccuaaacugucuaaguccuacaucaacaacaaagagaaggaggugcucguccuguggggcauucaucaucccccuacaagcaccgaccaacagucucuguaccagaaugcggaugccuauguguuugugggauccagcaaauacuccaagaaguucaaaccggaaaucgcuacgagacccaagguccgggggcaggccggacgcaugaacuauuacuggacacucguugagccuggcgacaccauuacauuugaagcuaccgggaaucugguggugcccagauaugccuucgcgaugaaacggggaucuggcagcggcaucauuaucuccgauaccccuguccacgacugcaacacaacgugucaaacccccaagggggccauuaauacaagccuuccguuucagaacauccacccugugaccaucggagagugccccaaauacguuaagucuacaaaacugcgcauggcuaccggccucagaaauauuccuuccauccagagccgggggcuguucggagccauugcuggcuuuaucgaagggggauggacgggcaugauugauggcugguauggguaccaccaucagaacgagcaaggaucuggcuacgccgccgaccgcaagagcacacagaaugcuaucgaugggaucaccaacaaggucaauuccgugauugagaaaaugaacacccaguucacagcggugggaaaggaguucaaucaccuugagaaaagaaucgaaaaccugaauaagaaaguugacgacggccuccuggauguguggaccuauaacgccgagcugcucguccugcuugaaaacgagcggacacuggacuaccacgauucuaaugugaagaaccucuaugagaagguccgcagccagcugaaaaauaacgcuaaggaaauugggaauggcuguuuugaguucuaccauaaaugcgacgauacguguauggaauccgugaagaacggaaccuaugacuaccccaaauauagcgaggaagccaaacuuaauagagaggagaucgauggcguuaagcuggaaucuacacggauuuaccaaauccucgccaucuacuccaccguggcuagcucucugguccugcucgugucccugggggccauuagcuuuuggaugugcuccaacggaucucuucagugcagaaucuguauuuga

SEQ ID NO: 202163 - RNA, 1701 nt, Artificial Sequence
  derived and/or modified CDS sequence (opt5) from hemagglutinin__InfluenzaA__AGN69278
augaaggccauccuggugguccuccuguacaccuucacaacggcuaacgccgacacccuuugcauuggcuaucacgcgaauaacagcacagauaccguugacacagugcuggagaagaaugugaccgucacacauuccgugaaccuccuggaagauagacacaaugggaaacuuuguaagcugcggggaguugcuccccuccaucugggcaagugcaacaucgccggguggcugcucggaaauccugagugugaacugcuuuuuaccgccucuagcugguccuacauuguggagacgucuaacagcgacaaugggaccugcuauccgggcgauuucaucaacuacgaagaacugcgcgagcagcucuccucugucagcuccuuugaaagauucgagauuuuucccaaagcuagcucuuggccuaaucacgaacccaaccggggagugacagccgcuuguccuuaugccggcgccaauuccuucuaccgcaaccugaucuggcuuguuaagaagggcaauagcuaucccaaacugucuaaguccuacaucaacaacaaagagaaggaggugcucguccugugggggauucaucacccuccgaccagcacagaccaacagucucuguaccagaaugcggaugcuuauguguuugugggauccagcaaauacaacaagaaguucaaacccgaaaucgccaccagaccuaagguccggggccaggcugggcgcaugaauuauuacuggacgcucguugagcccggagacacaauuaccuuugaagccacaggcaaccugguggugccuagauaugcguucgccaugaaacggggguccggaucuggcaucauuaucagcgauacccccguccacgacugcaauaccacaugucaaacgccgaagggcgcuauuaacaccucccuuccuuuucagaauauccaucccgugacaaucggggagugcccuaaauacguuaagagcaccaaacugcgcauggccacaggacucagaaacauucccucuauccagucccggggccuguucggggcuauugccggauuuaucgaaggcggguggaccggaaugauugauggcugguauggcuaccaccaucagaaugagcaagggagcggauacgccgcugaccgcaagucuacgcagaacgcgaucgauggcaucacaaauaaggugaacagcgucauugagaaaaugaauacccaguucaccgccguggggaaggaguucaaccaccuugagaaaagaaucgaaaaucugaacaagaaaguugacgacggacuccuggauguguggacauauaacgcugagcugcucguccugcuugaaaaugagcggacccuggacuaccacgauuccaacgugaagaaucucuaugagaagguccgcucucagcugaaaaacaaugccaaggaaauuggcaacggguguuuugaguucuaccauaaaugcgacgauacauguauggaaagcgugaagaauggcacguaugacuaccccaaauauuccgaggaagccaaacuuaacagagaggagaucgauggaguuaagcuggaaagcacccggauuuaccaaauccucgcuaucuacucuacaguggccuccagccugguccugcucgugucucugggcgcgauuuccuuuuggaugugcagcaaugggucccuucagugcagaaucuguauuuga

SEQ ID NO: 202164 - RNA, 1701 nt, Artificial Sequence
  derived and/or modified CDS sequence (opt5) from hemagglutinin__InfluenzaA__AGN69302
auggaggccaagcuguucgugcucuuuugcgcuuucaccgcccugaaagcggacacaaucugugucggcuaccacgcuaacaauagcacggauaccguugacacaauucuugaaaagaacgugaccgugacacauuccgucaaucugcucgagaacucucacaaugggaaacugugcagccuuaacggaaagaucccccugcagcucggcaauuguaacguggccggguggauucugggaaauccuaaaugcgaucugcuccugaccgccaacuccuggucuuauaucauugaaacaagcaauuccaaggacggcgcuuguuacccgggggaguuugccgauuaugaggaacuuaaggagcaacugucuaccguuagcuccuucgaaagauuugagaucuuccccaaagcuacgagcuggccuaaccaugacaccacacggggaaccacaguggccugcucucacuccggcgcgaauagcuuuuaccgcaaccuccuguggaucgucaagaaaggcaauucuuaucccaaacuuuccaaaagcuacaccaacaacaaggggaaggaagugcugguuauuuggggagugcaucacccucccacggauucugaccagcagacacucuaucagaauaaccacaccuacgucuccgugggcagcuccaaauacuauaagagauucacaccugagaucguggcccggccgaaaguccgcgagcaagcugggagaaugaauuacuauuggacccugcuggaucagggagacaccauuacauuugaagccacgggcaaccucaucgcucccuggcaugccuucgcgcugaagaaagggucuagcuccggaauuaugaugagcgaugcccagguucacaauuguaccacaaagugccagaccccucauggcgcucuuaaaggcaaccugcccuuucaaaaugugcacccugugacaaucggggagugucccaaguacgucaagucuacccagcuccggauggccacgggacugcgcaacauuccguccauccagagcagaggccuuuucggggcuaucgccggauuuauugaaggcggguggacaggaaugguggacggcugguauggcuaccaccaucagaaugagcaagggucuggauaugccgcugaucagaaaagcacccagaucgcgauugacggcaucuccaacaagguuaauucugugauugaaaagaugaacauccaauucaccagcgucgggaaggaguucaauucccuggagaaacggauggaaaaccucaauaagaagguggacgauggauuucuggacguuuggacauacaacgccgagcugcucauccugcuugaaaacgagcgcacccuggauuuccacgaccucaaugugaaaaaccuguacgaaaaggucaaaagccagcuuagaaauaacgcuaaggagauuggcaaugggugcuuugaguucuaucauaaaugugauaacgaaugcauggagucugugaagaauggcacauacaacuauccuaaguacuccgaagagagcaaacugaaucgggaagagaucgacggagucaagcucgagucuaugggcauucaccagauccuggccauuuauuccacgguggccagcucccugguucuccuggugucucuuggggcuaucagcuuuuggaugugcuccaacggaucucugcagugucgcgucugcaucuga

SEQ ID NO: 202165 - RNA, 1701 nt, Artificial Sequence; identical to SEQ ID NO: 202164
  derived and/or modified CDS sequence (opt5) from hemagglutinin__InfluenzaA__AGN69314

SEQ ID NO: 202166 - RNA, 1701 nt, Artificial Sequence; identical to SEQ ID NO: 202164
  derived and/or modified CDS sequence (opt5) from hemagglutinin__InfluenzaA__AGN69326

SEQ ID NO: 202167 - RNA, 1701 nt, Artificial Sequence
  derived and/or modified CDS sequence (opt5) from hemagglutinin__InfluenzaA__AGN69338
auggaggccaagcuguucgugcucuuuugcgcuuucaccgcccugaaagcggacacaaucugugucggcuaccacgcuaacaauagcacggauaccguugacacaauucuugaaaagaacgugaccgugacacauuccgucaaucugcucgagaacucucacaaugggaaacugugcagccuuaacggaaagaucccccugcagcucggcaauuguaacguggccggguggauucugggaaauccuaaaugcgaucugcuccugaccgccaacuccuggucuuauaucauugaaacaagcaauuccaagaacggcgcuuguuacccgggggaguuugccgacuaugaggaacuuaaggagcaacugucuaccguuagcuccuucgaaagauuugagaucuuccccaaagcuacgagcuggccuaaucaugauaccacacggggaaccacaguggccugcucucacuccggcgcgaacagcuuuuaccgcaaucuccuguggaucgucaagaaaggcaacucuuaucccaaacuuuccaaaagcuacaccaacaauaaggggaaggaagugcugguuauuuggggagugcaucacccucccacggacucugaucagcagacacucuaucagaacaaucacaccuacgucuccgugggcagcuccaaauacuauaagagauucacaccugagaucguggcccggccgaaaguccgcgagcaagcugggagaaugaacuacuauuggacccugcugcaucagggagacaccauuacauuugaagccacgggcaaucucaucgcucccuggcacgccuucgcgcugaacgaggggucuagcuccggaauuaugcggagcgaugcccagguucauaauuguaccacaaagugccagaccccucacggcgcucuuaaaggcaaccugcccuuucaaaaugugcacccugugacaaucggggaaugucccaaguacgucaaaucuacccagcuccgcauggccacgggacugagaaacauuccguccauccagagccggggccuuuucggggcuaucgccggauuuauugagggcggguggacaggaaugguggacggcugguauggcuaccaucaccgcaaugaacaggggucuggauaugccgcugaucaaaagagcacccagaucgcgauugacggcaucuccaacaagguuaauucugugauugagaaaaugaacauccaguucaccagcgucgggaaggagugcaauucccuggaaaagagaauggagaaccucaacaagaaaguggaugacggauuccuggacguuuggacauacaaugccgaacugcucauccugcuugagaacgaacggacccuggauuuucaugaccucaaugugaagaaccuguacgagaaggucaaaagccaacuucgcaauaacgcuaaggagauuggcaauggguguuucgaauuuuaucacaaaugcgauaacgagugcauggaaucugugaagaauggcacauacaacuauccuaaauacuccgaggaaagcaagcugaauagagaggagaucgacggagucaagcucgaaucuaugggcauucaucagauccuggccauuuauuccacgguggccagcucccugguucuccuggugucucuuggggcuaucagcuucuggauguguuccaacggaucucugcagugccgggucuguaucuga

SEQ ID NO: 202168 - RNA, 1701 nt, Artificial Sequence
  derived and/or modified CDS sequence (opt5) from hemagglutinin__InfluenzaA__AGO00265
augaaggccagacugcucgugcugcuuugcgcuaucgccgcgaccgacgcugauacaauuuguaucggcuaccacgccaacaauagcacggacaccgucgauacaauucuggagaaaaacguuaccgugacacauuccgugaaucuccuggaagacucucacaacgggaaacuuugccggcugaaaggaaucgccccgcuccagcugggcaaguguaauauugcuggguggauccugggaaacccugagugcgaaagccuccuguccgagcgcucuuggagcuauaucgucgaaacccccaauuccgagaacggcacauguuaccccggggauuucauugacuaugaggaacuuagagagcaacugucuagcgugaccuccuuugaacgguucgagaucuuuccuaaagagacgagcuggcccaagcauaauaccacaaagggaguuaccgccgcuugcucucacgccggcaaauguuccuucuaccgcaaccuccuguggcuuacagaaaaggauggcagcuauccuaaucugaacaauucuuacgugaacaaaaaggggaaagagguccucgugcuguggggaguucaucaccccuccaauauuaaggaccagcagacccuguaucagaaggaaaacgcguacgugagcgucgugucuuccaacuacaauagacgguuuacgccugagaucgccgaacgcccgaaagugagaggccaagcugggcggaugaacuauuacuggacacuccuggagcccggagauaccauuaucuucgaggccaauggcaaccuuauugcuccuugguaugccuuugcgcugagccgcggguucggauccggcaucaucacaucuaaugccagcaugcacgaaugcaacaccaagugucagacaccccagggcgcuauuaauuccagccucccuuuucagaacauccaucccgucaccauuggggagugcccgaaauacguuagaucuacgaagcugcggauggugaccggacuucgcaauaucccuuccauucaaagcagaggccuguucggggccaucgcuggauuuaucgaaggcggguggacaggaaugauugacggcugguauggcuaccaccaucagaacgagcaggggucuggauaugccgccgaucagaaaagcacccaaaaugcuaucaacggcauuacaaauaaggugaacuccgucaucgaaaagaugaauacccaguucacggcgguggggaaggaguuuaacaaccucgagaagcggauggaaaaucugaacaaaaagguugacgauggauuccuggacauuuggacauacaaugccgagcuccuggugcuucuggaaaacgagcgcacccucgacuuccacgauucuaaugucaaaaaccuguacgaaaaggugaaaagccagcuuagaaauaacgcuaaggagaucggcaauggguguuuugaguucuaucacaagugcaacaaugaaugcauggaguccguuaaaaacggcaccuacgacuaucccaaguacagcgaagagucuaaacugaaucgggagaagaucgauggagugaaacucgaauccaugggcgucuaucaaauucuggccaucuacagcacaguggccucuucccugguccuccuggugagccuuggggcuauuuccuuuuggauguguucuaacggaagccugcagugcagaaucuguauuuga

SEQ ID NO: 202169 - RNA, 1701 nt, Artificial Sequence
  derived and/or modified CDS sequence (opt5) from hemagglutinin__InfluenzaA__AGO00277
augaaggccaaacugcucauccugcuuugcgcucugagcgccaccgacgcggauacaauuuguaucggcuaccacgcuaacaauuccacggacaccguggauacaguccucgagaagaacguuaccgugacacauucugugaaucugcuugaagacagccacaacgggaaacugugcagacucaagggaauugccccgcugcagcugggcaaauguaauaucgccggguggauucucggaaacccugagugcgaaucccugcuuucuaagcggagcugguccuauaucgcugagacccccaauucugaaaacggcacauguuaccccggggauuucgccgacuaugaggagcugcgcgaacaacucagcuccgucagcucuuuugagagauucgaaaucuuuccuaaggagcgguccuggcccaaucauaacauuaauaucggagugaccgcugccugcagccacgcgggcaaaucuuccuucuacaagaaccugcuuuggcugacggagaaagauggcagcuauccuaaucucaacaagucuuacguuaauaaaaaggaaaaggaggugcugguccuguggggagugcaucaccccuccaacauugaaaaccagaaaacccucuaucgcaaggagaaugccuacguuagcguggucuccucuaacuacaauagacgguuuacaccugaaaucgcugagcgcccgaaagugagagggcaggccggccggaugaacuauuacuggacccugcuugagcccggggacacaauuaucuucgaagcuaauggaaaccugauugccccuugguaugcguuugcccucagccgcggccugggguccggaaucaucaccagcaaugcuucuauggaugagugugacacgaagugccagacaccccaaggcgccauuaacuccagccuuccuuuccagaauauccaccccuuuaccauuggcgaauguccgaaauacgugagaucuacaaagcugcggauggucaccgggcuccgcaacaucccuagcauucaguccagaggacuguucggcgcuaucgccggguuuaucgagggaggcugggccgggaugauugauggaugguauggcuaccaucaccagaaugaacaaggcucuggguaugcugcggaccagaaaagcacccagaacgccaucaauggaauuacaaacaagguuaauuccgugaucgagaagaugaacacgcaguucaccgcugugggcaaagaguuuaacaagcuggaaaaacggauggagaaucucaacaagaaagucgaugacggguuccuggacauuuggacauacaaugccgaacuucuggugcuccuggagaacgaacgcacccuugauuuccaugacagcaauguuaagaaccuguacgagaaggugaaaaaucaacucagaaacaaugccaaggagaucggaaacggcugcuuugaguucuaucacaaauguaauaacgaaugcauggaaucugucaagaaugggacauacgauuaucccaaauacuccgaggagagcaagcugaaccgggaaaagaucgacggcgugaaacuggagucuaugggaguuuaucagauucucgcuaucuacuccaccguggccagcucccugguccuucuggugucucucggcgcgauuagcuuuuggaugugcuccaaugggucucugcaguguagaaucugcauuuga

SEQ ID NO: 202170 - RNA, 1701 nt, Artificial Sequence; identical to SEQ ID NO: 193706
  derived and/or modified CDS sequence (opt5) from hemagglutinin__InfluenzaA__AGO00289

SEQ ID NO: 202171 - RNA, 1698 nt, Artificial Sequence
  derived and/or modified CDS sequence (opt5) from hemagglutinin__InfluenzaA__AGO00301
augaaggccaaacugcucauccugcuuugcgcucugagcgccaccgacgcggauacaauuuguaucggcuaccacgcuaacaauuccacggacaccguggauacaguccucgagaagaacguuaccgugacacauucugugaaucugcuugaagacagccacaacgggaaacugugcagacucaagggaaaagccccgcugcagcugggcaauuguaacauugccggguggguccucggaaauccugagugcgaaucccugcuuucuaaccggagcugguccuauaucgcugagacccccaauucugaaaacggcacauguuaccccggggauuucgccgacuaugaggagcugcgcgaacaacucagcuccgugagcucuuuugagagauucgaaauuuuuccuaaggagcgguccuggcccaaucauaccacgcgcggaguuaccgcugccugcccucacgcgagaaagagcucuuucuacaaaaaccugguguggcuuacagaggccaauggcuccuaucccaaccugagccggucuuacgucaauaaccaggaaaaggaggugcucguucuguggggcgugcaucacccuuccaacaucgaggaacagcgcgcucuguauagaaaagauaaugccuacgucagcgugguguccucuaacuacaaucggcgcuuuaccccggaaaucgcuaagagacccaaaguccgggaccagagcgggcgcaugaacuauuacuggacacuccuggagccuggagauaccauuaucuucgaggccacgggcaaucuuauugcgcccugguaugccuuugcucuguccagagggccuggaagcggcaucauuacaucuaacgcuccccucgacgaaugugauaccaagugccaaacaccgcagggggccaucaauuccagccugccuuuccagaacauucaccccguuaccaucggagaguguccuaaguacgugcggucuaccaaacuucgcauggugacaggccugagaaauauccccagcguccagucccggggccucuuuggggccauugccggauucaucgaaggcggguggacgggaaugauggacggcugguauggguaccaucaccaaaacgagcagggaucuggcuaugcugcggaucaaaagagcacccagaaugccauuaacggcaucacaaauaaagugaacuccguuauugaaaagaugaauacccaguuuacagcuguggggaaagaguucaacaagcuggagaaaagaauggaaaaccugaauaagaaggucgacgacggauuuauggauaucuggaccuacaacgccgagcuccuggugcuucuggaaaaugagcgcacgcucgacuuccaugauagcaacguuaaaaaucuguacgaaaaggugaaaaaccagcuucggaauaacgccaaggagcugggcaaugggugcuucgaguuuuaucacaaaugugacaacgaaugcauggagucugucaagaauggaacauacgauuaucccaaguacuccgaagagagcaaacucaacagagagaagaucgacggcgugaaacuggaaucuaugggggucuaucgcauucuggcuaucuacuccaccguggccagcucccucguucugcuugugucucugggcgcgauuagcuucuggaugugcuccaauggaucucuccagugucggaucugcauuuga

SEQ ID NO: 202172 - RNA, 1701 nt, Artificial Sequence
  derived and/or modified CDS sequence (opt5) from hemagglutinin__InfluenzaA__AGO00313
augaagaccaucauugcccugagcuacaucuucugccaggugcucgcucaaaaccugcccggcaaugacaacuccacagccacgcuuugucuggggcaccaugcggucccuaauggaacccucguuaaaacaauuaccaacgaucagaucgaggugacaaaugcuaccgaacuggugcagucuagcuccacaggcagaauuugcgacucuccgcaccggauccuugaugggaagaacuguacccugaucgacgcccuccugggagauccccauugcgacggcuuucagaaugagaaaugggaucuguucgucgaacgcagcaaggccuuuuccaacuguuauccuuacgacgugcccgauuaugcuucucucagaagccugguugccuccagcgggacgcuugaguucauuaaugaaggauuuaacuggaccggcgugacacaaaauggcgggucuuacgcuugcaaacggggaccugacaacuccuucuuuagccgccugaauuggcucuauaagucugaguccaccuaccccguccugaacgugacaaugccuaauaacgauaacuucgacaaacuuuauaucuggggcguucaccauccgagcaccgauaaagagcagacgaaucuguacgugcaggccucugggagagucacaguguccaccaagcggagccagcaaacaauuauccccaacgugggaucccgcccuugggucagaggccucucuagcgggauuuccaucuacuggaccauuguuaaacccggagacauccugcugaucaauagcaacggcaaucucauugcgccucggggcuauuuuaagauccgcaccgggaaaucuuccauuaugagaagcgacgcccccaucggaacauguucuagcgaaugcauuacgccgaacggcuccaucccuaaugauaagcccuuccagaacgugaauaagaucaccuacggggcuuguccuaaauaugugaagcagaacacacugaaacuugccaccggaaugcggaauguccccgagaagcagacacgcggcauuuuuggggcuaucgccggauucauugaaaacggcugggagggcaugaucgacgggugguacggauuuagacaccaaaauucugagggcaccgggcaggcggccgaucugaaaagcacgcaggcugccauugaccaaaucaacggaaagcucaaucgggugaucgaaaagacaaacgagaaguuccaccagauugaaaaggaguucuccgaaguugagggccgcauccaggaucuggagaaauauguggaagacaccaagauugaucuuuggagcuacaacgcugagcugcucgucgcccuggaaaaucagcauaccaucgaccugacagauucugagaugaacaaacucuuugaaaagaccagacggcaacugagagagaaugccgaggacauggggaacggcugcuucaaaauuuaucacaagugugauaaugcuugcaucggauccauucgcaacggcacauacgaccaugacguguaccgggaugaagcgcuuaauaacagauuucagaucaaggggguugagcugaaaagcggauauaaggacuggauccucuggauuucuuucgccaucuccugcuuucugcuuugugugguccugcucggcuucauuaugugggcuugccagaaagggaauauccgcuguaacauuugcaucuga

SEQ ID NO: 202173 - RNA, 1704 nt, Artificial Sequence; identical to SEQ ID NO: 201169
  derived and/or modified CDS sequence (opt5) from hemagglutinin__InfluenzaA__AGO00325

SEQ ID NO: 202174 - RNA, 1698 nt, Artificial Sequence
  derived and/or modified CDS sequence (opt5) from hemagglutinin__InfluenzaA__AGO00337
augaaggccaaccugcucgugcugcuuagcgcucuggccgcggcugacgccgauaccaucugcauuggcuaccacgccaauaacuccacagacacggucgauaccguucucgagaaaaaugugacagugacccauucugucaaccugcuugaagacagccacaaugggaagcuguguagacucaaaggaaucgcuccccugcagcugggcaagugcaacauugccggguggcuccugggaaauccugagugugauccgcuucugcccgugcgguccuggucuuauaucguugaaacaccuaacagcgagaauggcauuugcuaccccggggacuucaucgauuaugaagaacuccgcgagcaacuguccucugugagcuccuuugaaagauucgagaucuuuccuaaagaaagcucuuggcccaaccauaauaccaacggagucacagcugccuguucccacgagggcaagagcucuuucuaccggaaucuucuguggcucaccgagaaggaaggcuccuauccuaaacugaagaacagcuacgugaauaaaaaggggaaagagguucuggugcucuggggcauucaucacccgcccaacucuaaggaacagcagaaccuguaucagaaugagaacgcguacgucuccguggugacgagcaauuacaaccgcagauuuaccccugaaaucgccgagcggcccaagguccgcgaccaagcuggaagaaugaauuauuacuggacacuucugaaaccuggggauaccauuaucuucgaggccaacggaaaucucauugcucccauguaugccuuugcgcugucccggggcuucgggucuggaaucauuacaagcaacgccuccaugcacgaaugcaauaccaagugucagacgccgcuuggcgcuaucaacagcucucugccuuaccagaauguucaucccgugacaaucggcgagugcccuaaauaugugcgcuccgccaagcucagaauggucaccgggcugcggaacacacccagcauucagucucgcggacuguuuggcgcuaucgccggguucauugaaggaggcuggaccgggaugaucgacggaugguacggcuaucaccaucaaaaugagcagggcagcggguacgccgcugaucagaaauccacccagaacgcgauuaauggaaucacaaacaaggugaacacgguuaucgagaaaaugaauauucaauuuaccgccgugggcaaggaguucaacaagcucgagaaaagaauggaaaaucugaacaagaaagucgacgauggguuucuugacaucuggacauacaaugcugagcugcucgugcugcuugaaaacgagcggacccuggacuuccacgauucuaauguuaagaaccucuaugaaaaagucaagagccagcugaagaauaacgccaaagagauuggaaauggcuguuucgaguuuuaccacaagugcgacaacgaauguauggaguccgugcgcaaugggacauaugauuaccccaaauauagcgaagagucuaagcugaacagagagaaaguggacggcgucaagcucgaauccaugggaaucuaccagauucuggccaucuauagcaccguggcuucuucccuuguucugcucgugagccugggcgccaucuccuucuggaugugcucuaaugggagccugcaaugccggauuuguaucuga

SEQ ID NO: 202175 - RNA, 1698 nt, Artificial Sequence; identical to SEQ ID NO: 195350
  derived and/or modified CDS sequence (opt5) from hemagglutinin__InfluenzaA__AGO00349

SEQ ID NO: 202176 - RNA, 1698 nt, Artificial Sequence
  derived and/or modified CDS sequence (opt5) from hemagglutinin__InfluenzaA__AGO00373
augaaggccaaccugcucgugcugcuuugcgcucuggccgcggcugacgccgauaccaucuguauuggcuaccacgccaauaacagcacagacacggucgauaccguucucgagaaaaaugugacagugacccauuccgucaaccugcuugaagacucucacaaugggaagcugugcagacucaaaggaaucgcuccccugcagcugggcaaguguaacauugccggguggcuccugggaaauccugagugcgauccgcuucugcccgugcggagcugguccuauaucguugaaacaccuaacucugagaauggcauuuguuaccccggggacuucaucgauuaugaagaacuccgcgagcaacugagcuccgugucuagcuuugaaagauucgagaucuuuccuaaagaauccagcuggcccgaccauaacaccaauggagucacagcugccugcucucacgagggcaaguccagcuucuaccggaaccuucuguggcucaccgagaaggaaucuuccuauccuaaacugaagaauagcuacgugaacaaaaagggcaaagagguucuggugcucugggggauucaucacccgcccaauucuaaggaacagcagaaccuguaucagaacgagaaugcguacgucuccguggugacgagcaacuacaaucgcagauuuaccccugaaaucgccgagcggcccaagguccgcgaucaagcuggaagaaugaacuauuacuggacacuucugaaaccuggcgacaccauuaucuucgaggccaaugggaaccucauugcucccauguaugccuuugcgcugucccggggauucggcucugggaucauuacaagcaaugccuccaugcacgaauguaacaccaagugccagacgccgcuuggagcuaucaauagcucucugccuuaccagaacauccaucccguuacaauuggcgaguguccuaaauaugugcgcuccgccaagcucagaauggugaccggccugcggaauauccccagcauucagucucgcgggcuguuuggagcuaucgccggcuucauugaagggggauggacaggcaugaucgaugggugguacggauaucaccaucaaaacgagcagggcagcggcuacgccgcugaccagaaauccacccagaaugcgaucaacgggauuaccaauaaggucaacacagugaucgagaaaaugaacauucaauuuacggccguuggaaaggaguucaauaagcucgagaaaagaauggaaaaccugaauaagaaaguggaugacggcuuucuugacaucuggaccuacaacgcugagcugcucguccugcuugaaaaugagcggacacuggauuuccacgacucuaacaugaagaaucucuaugaaaaaguuaagagccagcugaagaacaaugccaaagagauugggaacggaugcuucgaguuuuaccacaagugugauaaugaaugcauggaguccgugcgcaacggcaccuaugacuaccccaaauauagcgaagagucuaagcugaauagagagaaaguggauggggucaagcucgaauccaugggcaucuaccagauccuggccauuuauagcacaguggcuucuucccuuguccugcucgugagccugggagccaucuccuucuggaugugcucuaacggcagccugcaaugucggauuugcaucuga

SEQ ID NO: 202177 - RNA, 1698 nt, Artificial Sequence
  derived and/or modified CDS sequence (opt5) from hemagglutinin__InfluenzaA__AGO00385
augaaggccaaccugcucgugcugcuuugcgcucuggccgcggcugacgccgauaccaucuguauuggcuaccacgccaauaacagcacagacacggucgauaccguucucgagaaaaaugugacagugacccauuccgucaaccugcuugaagacucucacaaugggaagcugugcagacucaaaggaaucgcuccccugcagcugggcaaguguaacauugccggguggcuccugggaaauccugagugcgauccgcuucugcccgugggcagcugguccuauaucguugaaacaccuaacucugagaaugggauuuguuaccccggagacuucaucgauuaugaagaacuccgggagcaacugagcuccgugucuagcuuugaacgcuucgagaucuuuccuaaagaauccagcuggcccgaccauaacaccaauggcgucacagcugccugcucucacgagggcaaguccagcuucuacagaaaccuucuguggcucaccgagaaggaaucuuccuauccuaaacugaagaauagcuacgugaacaaaaaggggaaagagguucuggugcucuggggcauucaucacccgcccaauucuaaggaacagcagaaccuguaucagaacgagaaugcguacgucuccguggugacgagcaacuacaaucggcgcuuuaccccugaaaucgccgagagacccaagguccgggaucaagcuggacgcaugaacuauuacuggacacuucugaaaccuggggacaccauuaucuucgaggccaauggaaaccucauugcucccauguaugccuuugcgcuguccagaggcuucgggucuggaaucauuacaagcaaugccuccaugcacgaauguaacaccaagugccagacgccgcuuggcgcuaucaauagcucucugccuuaccagaacauccaucccguuacaauuggcgaguguccuaaauaugugcgguccgccaagcuccgcauggugaccgggcugagaaauauccccagcauucagucucggggacuguuuggcgcuaucgccggguucauugaaggaggcuggacagggaugaucgauggaugguacggcuaucaccaucaaaacgagcagggcagcggguacgccgcugaccagaaauccacccagaaugcgaucaacggaauuaccaauaaggucaacacagugaucgagaaaaugaacauucaauuuacggccguuggcaaggaguucaauaagcucgagaaacgcauggaaaaccugaauaagaaaguggaugacggguuucuugacaucuggaccuacaacgcugagcugcucguccugcuugaaaaugagagaacacuggauuuccacgacucuaacgugaagaaucucuaugaaaaaguuaagagccagcugaagaacaaugccaaagagauuggaaacggcugcuucgaguuuuaccacaagugugauaaugaaugcauggaguccgugcggaacgggaccuaugacuaccccaaauauagcgaagagucuaagcugaaucgcgagaaagucgauggcgugaagcucgaauccaugggaaucuaccagauccuggccauuuauagcacagucgcuucuucccuugugcugcucguuagccugggcgccaucuccuucuggaugugcucuaacgggagccugcaauguagaauuugcaucuga

SEQ ID NO: 202178 - RNA, 1698 nt, Artificial Sequence
  derived and/or modified CDS sequence (opt5) from hemagglutinin__InfluenzaA__AGO00397
augaaggccaaccugcucgugcugcuuugcgcucuggccgcggcugacgccgauaccaucuguauuggcuaccacgccaauaacagcacagacacggucgauaccguucucgagaaaaaugugacagugacccauuccgucaaccugcuugaagacucucacaaugggaagcugugcagacucaaaggaaucgcuccccugcagcugggcaaguguaacauugccggguggcuccugggaaauccugagugcgauccgcuucugcccgugggcagcugguccuauaucguugaaacaccuaacucugagaaugggauuuguuaccccggagacuucaucgauuaugaggaacuccgggagcaacugagcuccgugucuagcuuugaacgcuucgagaucuuuccuaaagaauccagcuggcccgaccauaacaccaauggcgucacagcugccugcucucacgagggcaaguccagcuucuacagaaaccuucuguggcucaccgagaaggaaucuuccuauccuaaacugaagaauagcuacgugaacaaaaaggggaaagagguucuggugcucuggggcauucaucacccgcccaauucuaaggaacagcagaaccuguaucagaacgagaaugcguacgucuccguggugacgagcaacuacaaucggcgcuuuaccccugaaaucgccgagagacccaaggucaaagaucaagcuggacggaugaacuauuacuggacacuucugaagccuggggacaccauuaucuucgaggccaauggaaaccucauugcucccauguaugccuuugcgcugucccgcggcuucgggucuggaaucauuacaagcaaugccuccaugcacgaauguaacaccaaaugccagacgccgcuuggcgcuaucaauagcucucugccuuaccagaacauccaucccguuacaauuggcgaguguccuaaguaugugagauccgccaaacuccggauggugaccgggcugcgcaauauccccagcauucagucuagaggacuguuuggcgcuaucgccggguucauugaaggaggcuggacagggaugaucgauggaugguacggcuaucaccaucaaaacgagcagggcagcggguacgccgcugaccagaaguccacccagaaugcgaucaacggaauuaccaauaaagucaacacagugaucgaaaagaugaacauucaauuuacggccguuggcaaggaguucaauaaacucgagaagcggauggaaaaccugaauaaaaagguggaugacggguuucuugacaucuggaccuacaacgcugagcugcucguccugcuugaaaaugagcgcacacuggauuuccacgacucuaacgugaaaaaucucuaugaaaagguuaagagccagcugaaaaacaaugccaaggagauuggaaacggcugcuucgaguuuuaccacaaaugugauaaugaaugcauggaguccgugagaaacgggaccuaugacuaccccaaguauagcgaagagucuaaacugaaucgggagaaggucgauggcgugaagcucgaauccaugggaaucuaccagauccuggccauuuauagcacagucgcuucuucccuugugcugcucguuagccugggcgccaucuccuucuggaugugcucuaacgggagccugcaaugucgcauuugcaucuga

SEQ ID NO: 202179 - RNA, 1698 nt, Artificial Sequence
  derived and/or modified CDS sequence (opt5) from hemagglutinin__InfluenzaA__AGO00409
augaaggccaaccugcucgugcugcuuugcgcucuggccgcggcugacgccgauaccaucuguauuggcuaccacgccaauaacagcacagacacggucgauaccguucucgagaaaaaugugacagugacccauuccgucaaccugcuugaagacucucacaaugggaagcugugcagacucaaaggaaucgcuccccugcagcugggcaaguguaacauugccggguggcuccugggaaauccugagugcgauccgcuucugcccgugggcagcugguccuauaucguugaaacaccuaacucugagaaugggauuuguuaccccggagacuucaucgauuaugaggaacuccgggagcaacugagcuccgugucuagcuuugaacgcuucgagaucuuuccuaaagaauccagcuggcccgaccauaacaccaauggcgucacagcugccugcucucacgagggcaagaacuccuucuacagaaaucuucuguggcucaccgagaagaaaagcucuuauccugaacugaagaacuccuacgugaauaaaaaggggaaagagguucuggugcucuggggcauucaucacccgcccaacagcaaggaacagcagaaccuguaucagaaugagaacgcguacgucucuguggugacguccaauuacaaccggcgcuuuaccccugaaaucgccgagagacccaaggucaaagaucaagcuggacggaugaauuauuacuggacacuucugaagccuggggacaccauuaucuucgaggccaacggaaaucucauugcucccauguaugccuuugcgcugagccgcggcuucggguccggaaucauuacaucuaacgccagcaugcacgaauguaauaccaaaugccagacgccgcuuggcgcuaucaacuccagccugccuuaccagaauauccaucccguuacaauuggcgaguguccuaaguaugugagaucugccaaacuccggauggugaccgggcugcgcaacauccccuccauucagagcagaggacuguuuggcgcuaucgccggguucauugaaggaggcuggacagggaugaucgauggaugguacggcuaucaccaucaaaaugagcagggcucuggguacgccgcugaccaaaagagcacccagaacgcgaucaauggaauuaccaacaaagucaacacagugaucgaaaagaugaauauucaguuuacggccguuggcaaggaguucaacaaacucgagaagcggauggaaaaucugaacaaaaagguggaugacggguuucuugacaucuggaccuacaaugcugagcugcucguccugcuugaaaacgagcgcacacuggauuuccacgacuccaaugugaaaaaccucuaugaaaagguuaagucucagcugaaaaauaacgccaaggagauuggaaauggcugcuucgaguuuuaccacaaaugugauaacgaaugcauggagagcgugagaaaugggaccuaugacuaccccaaguauuccgaagagagcaaacugaaccgggagaaggucgauggcgugaagcucgaaucuaugggaaucuaccagauccuggccauuuauuccacagucgcuagcucucuugugcugcucguuucccugggcgccaucagcuucuggaugugcuccaaugggucucugcaaugucgcauuugcaucuga

SEQ ID NO: 202180 - RNA, 1698 nt, Artificial Sequence
  derived and/or modified CDS sequence (opt5) from hemagglutinin__InfluenzaA__AGO00421
augaaggccaaccugcucgugcugcuuugcgcucuggccgcggcugacgccgauaccaucuguauuggcuaccacgccaauaacagcacagacacggucgauaccguucucgagaaaaaugugacagugacccauuccgucaaccugcuugaagacucucacaaugggaagcugugcaaacucaagggaaucgcuccccugcagcugggcaaauguaacauugccggguggcuccugggaaauccuggcugcgauccgcuucugcccguggggagcugguccuauaucguugagacaccuaacucugaaaauggaauuuguuaccccggcgacuucaucgauuaugaggaacucagagagcaacugagcuccgugucuagcuuugagcgguucaagaucuuuccuaaggaauccagcuggcccgaccauaacaccacaggcgucaccgcugccugcucucacgaggggaaaaauuccuucuaccgcaaccuucuguggcucacgaagaaagaaagcucuuauccugagcugaaaaauuccuacgugaacaaaaagagaaaggagguucuggugcucuggggcauucaucacccgcccaauagcaaagaacagcagaaccuguaucagaacgagaaugcguacgucucuguggugaccuccaacuacaaucggcgcuuuacaccugaaaucgccgagagacccaaggucaaaggacaagcugggcggaugaacuauuacuggacccuucugaagccuggagauacaauuaucuucgaagccaauggcaaccucauugcucccauguaugccuuugcgcugagccgcggguucggauccggcaucauuaccucuaaugccagcaugcacgaguguaacacgaaaugccagacaccgcuuggcgcuaucaauuccagccugccuuaccagaacauccaucccguuaccauuggggaguguccuaaguaugugagaucugccaaacuccggauggugacaggacugcgcaauauccccuccauucagagcagaggccuguuuggggcuaucgccggauucauugaaggcggguggaccggaaugaucgacggcugguacggcuaucaccaucaaaacgagcaggggucuggauacgccgcugaucaaaagagcacccagaaugcgaucaacggcauuacaaauaaggucaacacggugaucgaaaagaugaacauucaguuuaccgccguugggaaggaguucaauaaacucgaaaagcggauggagaaccugaauaaaaagguggacgauggauuucuugacaucuggacauacaacgcugagcugcucguccugcuugaaaaugagcgcacccuggacuuccacgauuccaacgugaagaaucucuaugaaaaaguuaagucucagcugaaaaacaaugccaaggagauuggcaacgggugcuucgaauuuuaccacaaaugugacaaugagugcauggagagcgugagaaacggcacauaugauuaccccaaguauuccgaagagagcaagcugaaucgggaaaaagucgacggagugaagcucgagucuaugggcaucuaccagauccuggccauuuauuccaccgucgcuagcucucuugugcugcucguuucccugggggccaucagcuucuggaugugcuccaacggaucucugcaaugucgcauuugcaucuga

SEQ ID NO: 202181 - RNA, 1698 nt, Artificial Sequence
  derived and/or modified CDS sequence (opt5) from hemagglutinin__InfluenzaA__AGO00433
augaaggccaaccugcucgugcugcuuugcgcucuggccgcggcugacgccgauaccaucuguauuggcuaccacgccaauaacagcacagacacggucgauaccguucucgagaaaaaugugacagugacccauuccgucaaccugcuugaagacucucacaaugggaagcugugcagacucaaaggaaucgcuccccugcagcugggcaaguguaacauugccggguggcuccugggaaauccugagugcgauccgcuucugcccgugcggagcugguccuauaucguugaaacaccuaacucugagaauggcauuuguuaccccggggacuucaucgauuaugaggaacuccgcgagcaacugagcuccgugucuagcuuugaaagauucgagaucuuuccuaaagaauccagcuggcccaaccauaauaccaacggagucacagcugccugcucucacgagggcaaguccagcuucuaccggaaucuucuguggcucaccgagaaggaaggcucuuauccuaaacuggagaacuccuacgugaauaagaaagggaaggaaguucuggugcucuggggcauucaucacccgcccaacagcaaagagcagcagaaccuguaucagaaugaaaacgcguacgucucuguggugacguccaauuacaaccgcagauuuaccccugagaucgccgagcggcccaagguccgcgaccaagcuggaagaaugaauuauuacuggacacuucugaagccuggggauaccauuaucuucgaagccaacggaaaucucauugcucccauguaugccuuugcgcugagccggggcuucggguccggaaucauuacaucuaacgccagcaugcacgaguguaauaccaaaugccagacgccgcuuggcgcuaucaacuccagccugccuuaccagaauauccaucccguuacaauuggcgaauguccuaaguaugugcgcucugccaaacucagaauggugaccgggcugcggaacauccccuccauucagagccgcggacuguuuggcgcuaucgccggguucauugagggaggcuggacagggaugaucgacggaugguacggcuaucaccaucaaaaugaacagggcucuggguacgccgcugaucaaaagagcacccagaacgcgaucaauggaauuaccaacaaagucaacacagugaucgagaagaugaauauucaguuuacggccguuggcaaagaguucaacaagcucgaaaagagaauggagaaucugaacaaaaagguggacgauggguuucuugacaucuggaccuacaaugcugaacugcucguccugcuugagaacgaacggacacuggacuuccacgauuccaaugugaaaaaccucuaugagaagguuaaaucucagcugaagaauaacgccaaggagauuggaaauggcugcuucgaauuuuaccacaaaugugacaacgagugcauggaaagcgugcgcaaugggaccuaugauuaccccaaguauuccgaggagagcaaacugaacagagaaaaggucgacggcgugaaacucgagucuaugggaaucuaccagauccuggccauuuauuccacagucgcuagcucucuugugcugcucguuucccugggcgccaucagcuucuggaugugcuccaaugggucucugcaaugucggauuugcaucuga

SEQ ID NO: 202182 - RNA, 1698 nt, Artificial Sequence
  derived and/or modified CDS sequence (opt5) from hemagglutinin__InfluenzaA__AGO00445
augaaggccaaccugcucgugcugcuuugcgcucuggccgcggcugacgccgauaccaucuguauuggcuaccacgccaauaacagcacagacacggucgauaccguucucgagaaaaaugugacagugacccauuccgucaaccugcuugaagacucucacaaugggaagcugugcagacucaaaggaaucgcuccccugcagcugggcaaguguaacauugccggguggcuccugggaaauccugagugcgauccgcuucugcccgugcggagcugguccuauaucguugaaacaccuaacucugagaauggcauuuguuaccccggggacuucaucgauuaugaggaacuccgcgagcaacugagcuccgugucuagcuuugaaagauucgagaucuuuccuaaagaauccagcuggcccaaccauaauaccaacggagucacagcugccugcucucacgagggcaaguccagcuucuaccggaaucuucuguggcucaccgagaaggaaggcucuuauccuacgcugaaaaacuccuacgugaauaagaaagggaaggagguucuggugcucuggggcauucaucacccgcccaacagcaaagaacagcagaaccuguaucagaaugagaacgcguacgucucuguggugaccuccaauuacaaccgcagauuuacaccugaaaucgccgagcggcccaagguccgcgaccaagcuggaagaaugaauuauuacuggacccuucugaagccuggggauacaauuaucuucgaggccaacggaaaucucauugcucccauguaugccuuugcgcugagccggggcuucggguccggaaucauuaccucuaacgccagcaugcacgaauguaauacgaaaugccagacaccgcuuggcgcuaucaacuccagccugccuuaccagaauauccaucccguuaccauuggcgaguguccuaaguaugugcgcucugccaaacucagaauggugacagggcugcggaacauccccuccauucagagccgcggacuguuuggcgcuaucgccggguucauugaaggaggcuggaccgggaugaucgacggaugguacggcuaucaccaucaaaaugagcagggcucuggguacgccgcugaucaaaagagcacccagaacgcgaucaauggaauuacaaacaaagucaacacggugaucgaaaagaugaauauucaguuuaccgccguuggcaaagaguucaacaagcucgagaagagaauggaaaaucugaacaaaaagguggacgauggguuucuugacaucuggacauacaaugcugagcugcucguccugcuugaaaacgagcggacccuggacuuccacgauuccaaugugaaaaaccucuaugaaaagguuaaaucucagcugaagaauaacgccaaggagauuggaaauggcugcuucgaguuuuaccacaaaugugacaacgaaugcauggagagcgugcgcaaugggacauaugauuaccccaaguauuccgaagagagcaaacugaacagagagaaggucgacggcgugaaacucgaaucuaugggaaucuaccagauccuggccauuuauuccaccgucgcuagcucucuugugcugcucguuucccugggcgccaucagcuucuggaugugcuccaaugggucucugcaaugucggauuugcaucuga

SEQ ID NO: 202183 - RNA, 1701 nt, Artificial Sequence
  derived and/or modified CDS sequence (opt5) from hemagglutinin__InfluenzaA__AGO02696
augaaggccauccugguggucaugcucuacaccuucgcuacagccaacgcggacacgcugugcauuggcuaucacgcuaauaacagcaccgauacaguugacaccgugcuugagaaaaaugugacagucacccauuccgugaaccugcucgaagauaagcacaaugggaaacuguguaaacuuagaggaguugcuccccugcaucucggcaagugcaacaucgccggguggauucugggaaauccugagugugaaucucugagcacagccuccucuuggagcuacaucguggagaccuccucuagcgacaacggcacgugcuauccgggggauuuuauugacuacgaagaacuccgggagcagcuguccagcgucucuuccuucgaacgcuuugagaucuuccccaagaccagcucuuggccuaaucacgauuccaacaagggagugacagccgcuuguccccaugccggcgcgaaaggcuuuuauaagaaucuuaucuggcugguuaaaaaggggaacagcuacccuaaacucucuauuuccuauaucaaugacaagggaaaggaagugcugguccuuuggggcauucaccaccccagcaccacagccgaucaacagucccuguaccagaacgcugacaccuacguguucguggggacgucuagauauagcaaaaaguuuaaaccugagaucgccauucggccgaagguccgcgaucaggagggaagaaugaauuacuauuggacacucguugaacccggcgacaaaaucaccuucgaggcuacagggaaccugguggugccucgguacgccuuugcgauggaacgcaacgccggauccggcauuaucaucagcgauacccccguccaugacugcaauaccacaugucaaacgccuaagggcgcuauuaacaccucucugcccuuccagaauauccacccgauuacaaucgggaaaugcccuaaguaugugaaguccaccaaacucagacuggccacaggacuucggaacguucccagcauucagucucgcggccuguuuggggcuaucgccggauucaucgagggcggguggaccggaaugguggacggcugguacggcuaucaucaccagaaugaacaagggagcggauacgccgcugaucucaaguccacgcagaacgcgauugacaaaaucacaaauaaggucaacucugugauugagaaaaugaauacccaguuuaccgccguuggcaaggaguucaaccaccuggaaaagagaaucgagaaucuuaacaaaaagguggaugacggguuccuggauauuuggacauacaaugcugaacuccugguccugcucgagaacgaacggacccuggacuaucaugauagcaaugugaaaaaccuuuacgagaagguccgcaaccagcugaaaaauaacgccaaggagaucggaaauggcuguuuugaguucuaucacaagugcgacaacacauguauggaguccgugaaaaaugggacguacgauuauccuaaguacagcgaagaggccaaacucaacagagaagagaucgacggcguuaagcuggagucuacccggauuuaucaaauccuugcuauuuacuccacagccgcgagcucucuggugcucgucgugucccugggagcuaucagcuuuuggaugugcuccaauggcucucugcagugccgcauuuguaucuga

SEQ ID NO: 202184 - RNA, 1701 nt, Artificial Sequence; identical to SEQ ID NO: 202112
  derived and/or modified CDS sequence (opt5) from hemagglutinin__InfluenzaA__AGO02697

SEQ ID NO: 202185 - RNA, 1701 nt, Artificial Sequence; identical to SEQ ID NO: 201930
  derived and/or modified CDS sequence (opt5) from hemagglutinin__InfluenzaA__AGO02698

SEQ ID NO: 202186 - RNA, 1701 nt, Artificial Sequence; identical to SEQ ID NO: 201930
  derived and/or modified CDS sequence (opt5) from hemagglutinin__InfluenzaA__AGO02699

SEQ ID NO: 202187 - RNA, 1701 nt, Artificial Sequence
  derived and/or modified CDS sequence (opt5) from hemagglutinin__InfluenzaA__AGO02700
augaaggccauccuggugguccuccuguacaccuucgcuacagccaacgcggacacgcuuugcauuggcuaucacgcuaauaacagcaccgauacaguugacaccgugcuggagaaaaaugugacagucacccauuccgugaaccuccuggaagauaagcacaaugggaaacuuuguaagcugagaggaguugcuccccuccaucugggcaaaugcaacaucgccggguggauucugggaaauccugagugugaaucucucagcacagccuccucuuggagcuacaucguggagaccuccucuagcgacaacggcacgugcuauccgggggauuuuauuaauuacgaggaacugcgggagcagcuuuccagcgucucuuccuucgaacgcuuugagaucuuccccaagaccagcucuuggccuaaccacgacuccaauaagggagugacagccgcuuguccccaagccggcgcgaaaucuuuuuauaagaaccugaucuggcucguuaaaaagggcaauagcuacccuaaacuguccaagagcuauauuaacgauaaggggaaagaagugcuuguccuguggggaauccaucaccccuccaccucugccgaccagcagagccucuaccagaaugcugaugccuacguguucgugggcacauccaaguauagcaaaaaguuuaaaccugagauugcugucagaccgaagguucgggaccaagaggggcgcaugaacuacuauuggacccugguggaacccggagauaaaaucacguucgaggccacaggcaaccugcucgugccuagauacgcguuugccauggaacggaaugcugggucuggaauuaucauuuccgacacccccguccacgauugcaacacaaccugucagaccccuaagggcgccaucaauacaagccugcccuuccagaacauccauccgauuacgaucggcaagugcccuaaauaugugaagucuaccaaacuucgccuggcuacagggcucagaaauguucccagcauucagucccggggacuguuuggcgccaucgccggguucauugagggaggcuggaccgggaugguggacggaugguacggcuaucaccaucaaaacgcucagggcucuggguacgcggccgaccuuaagagcacacagaaugcuaucgauaaaaucaccaacaaggucaauuccgugauugaaaagaugaacacgcaguuuacagccguuggaaaagaguucaaucaccuggagaagcgcaucgaaaaccucaauaaaaagguggacgauggcuuccuggacauuuggaccuacaacgccgagcugcucguccugcuugaaaaugagagaacccuggauuaucacgacagcaacgugaaaaaccucuacgaaaagguccggucucaacugaagaauaacgcuaaagagaucgggaauggauguuuugaguucuaucauaagugcgauaacacauguauggaauccgugaaaaauggcaccuacgacuauccucgcuacagcgaggaagccaaacuuaacagagaggaaauugaugggaucaagcuggagucuacacggaucuaucagauucucgcgaucuacuccacgguugcuagcucccuggugcugauugucucucucggcgccaucagcuuuuggaugugcuccaauggaucucugcagugccgcauuuguaucuga

SEQ ID NO: 202188 - RNA, 1701 nt, Artificial Sequence
  derived and/or modified CDS sequence (opt5) from hemagglutinin__InfluenzaA__AGO02701
augaaggccauccuggugguccuccuguacaccuucgcuacagccaacgcggacacgcuuugcauuggcuaucacgcuaauaacagcaccgauacaguugacaccgugcuggagaaaaaugugacagucacccauuccgugaaccuccuggaagauaagcacaaugggaaacuuuguaagcugagaggaguugcuccccuccaucugggcaaaugcaacaucgccggguggauucugggaaauccugagugugaaucucucagcacagccuccucuuggagcuacaucguggagaccuccucuagcgacaacggcacgugcuauccgggggauuuuauuaauuacgaggaacugcgggagcagcuuuccagcgucucucacuucgaacgcuuugagaucuuccccaagaccuccagcuggccuaaccaugacucuaauaagggagugacagccgcuuguccccacgccggcgcgaaauccuuuuauaagaaccugaucuggcucguuaaaaagggcaauagcuacccuaaacugucuaaguccuauauuaacgauaaggggaaagaagugcuuguccuguggggaauccaccaucccagcaccuccgccgaccaacagucucucuaccagaaugcugaugccuacguguucgugggcacaagcaaguauuccaaaaaguuuaaaccugagauugcugucagaccgaagguucgggaccaggaggggcgcaugaacuacuauuggacccugguggaacccggagauaaaaucacguucgaggccacaggcaaccugcucgugccuagauacgcguuugccauggaacggaaugcugggagcggaauuaucauuucugacacccccguccacgauugcaacacaaccugucaaaccccuaagggcgccaucaauacaucccugcccuuccagaacauccauccgauuacgaucggcaagugcccuaaauauguuaagagcaccaaacuucgccuggcuacagggcucagaaaugugcccucuauucagagccggggacuguuuggcgccaucgccggguucauugagggaggcuggaccgggaugguggacggaugguacggcuaucaccaccagaacggccaaggguccggauacgcugcggaccuuaagucuacacagaaugccaucgauaaaaucaccaacaaggucaauagcgugauugaaaagaugaacacgcaguuuacagcuguuggcaaagaguucaaucaucuggagaagcgcaucgaaaaccucaauaaaaagguggacgauggguuccuggacauuuggaccuacaacgccgagcugcucguccugcuugaaaaugagagaacccuggauuaucacgacuccaacgugaaaaaccucuacgaaaagguccggagccagcugaagaauaacgccaaagagaucggaaauggcuguuuugaguucuaucauaagugcgauaacacauguauggaaucugugaaaaaugggaccuacgacuauccuaaguacuccgaggaagcuaaacuuaaccgcgaggaaauugauggcguuaagcuggagagcacaagaaucuaucaaauccucgccauuuacucuacgguggcguccagccugguccuggugguuucccucggagcuaucucuuuuuggaugugcagcaauggcucccugcagugccggauuuguaucuga

SEQ ID NO: 202189 - RNA, 1683 nt, Artificial Sequence; identical to SEQ ID NO: 202060
  derived and/or modified CDS sequence (opt5) from hemagglutinin__InfluenzaA__AGO51374

SEQ ID NO: 202190 - RNA, 1701 nt, Artificial Sequence
  derived and/or modified CDS sequence (opt5) from hemagglutinin__InfluenzaA__AGO86686
augaagaccaucauugcccugagcuacauccucugccuggcuuucgcccagaaacuucccggcaacgacaauuccacagcgacgcugugucucgggcaccaugcugugccuaacggaacccuggucaagacaauuaccaaugaucaaaucgagguuacaaacgccaccgaacuugugcagucuagcuccacaggcagaauuugcgacucuccgcaccagauccuggauggggagaauuguacccucaucgacgcccugcugggagauccccauugcgacggcuuucagaacaaagaaugggaucucuucguggagcggagcaaggcuuauuccaauuguuacccuuaugacguccccgauuacgccucucugcgcagccuuguggcuuccagcgggacgcuggaauuuaacaaugagucuuucaacuggaccggaguugcccaaaauggcacauccagcgcgugcaaaagacggucuauuaaguccuuuuucagccgccucaacuggcugcaccagcuugagaauagauauccugcccugaacgugaccaugcccaauaacgacaaguuugauaaacucuacaucuggggcguccaucacccuucuacagacuccgaucagauuagcguguaugcucaggccuccgggcggguuaccgugucuacgaagcgcagccaacagacagucaucccgaacauuggauccagacccugggugcggggcaucagcucucgcauuuccaucuacuggaccaucgugaaaccuggggacauucugcugaucaauagcacaggaaaccucauugcucccagaggcuacuucaagauccggucugggaaaagcuccauuaugcgcucugacgccccuaucggaaaguguaauagcgaaugcaucacccccaacggcuccauuccgaaugauaagccuuuucagaacgucaauagaaucaccuauggcgcguguccccgguacguuaaacagaacacacugaaacuugccacggggaugcgcaaugugccugagaaacaaaccagaggaauuuucggcgcuaucgccggguuuauugaaaacggaugggagggcaugauggacgggugguauggauuccggcaccagaauagcgagggcacaggccaggcugccgaucugaagucuacccaagccgcuaucaaccagaucaaugggaaacucaacaagcugauugaaaagacaaaugagaaguuucaucagaucgaaaaggaguucuccgaaguggagggacgcauucaggaccuugagaaauacgucgaagauaccaagaucgaccuguggagcuauaacgcggagcuccugguggcccuggaaaaccaacacacgauugaucucacagacucugagaugaauaaacuguucgaaagaacccggaagcagcuuagagagaacgcugaggauaugggcaaugggugcuuuaaaaccuaccauaagugugacaacgccugcaucggauccauucgcaauggcacauaugaucacgacguuuaccgggacgaagcccugaacaauagauuccagaucaaggggguggagcucaaaagcggcuacaaggauuggauccuguggauuuccuuugcuaucucuugcuuccuucugugugucgugcuccugggauuuauuaugugggccugccagaaaggcaacauccgcuguaauauuugcaucuga

SEQ ID NO: 202191 - RNA, 1701 nt, Artificial Sequence; identical to SEQ ID NO: 202112
  derived and/or modified CDS sequence (opt5) from hemagglutinin__InfluenzaA__AGQ16240

SEQ ID NO: 202192 - RNA, 1701 nt, Artificial Sequence; identical to SEQ ID NO: 202112
  derived and/or modified CDS sequence (opt5) from hemagglutinin__InfluenzaA__AGQ16241

SEQ ID NO: 202193 - RNA, 1701 nt, Artificial Sequence
  derived and/or modified CDS sequence (opt5) from hemagglutinin__InfluenzaA__AGQ16242
augaaggccauccuggugguccuccuguacaccuucgcuacagccaacgcggacacgcuuugcauuggcuaucacgcuaauaacagcaccgauacaguugacaccgugcuggagaagaaugugacagucacccauuccgugaaccuccuggaagauaagcacaaugggaaacuuuguaagcugagaggaguugcuccccuccaucugggcaaaugcaacaucgccggguggauucugggaaauccugagugugaaucucucagcacagccuccucuuggagcuacaucguggagaccuccucuagcgacaacggcacgugcuauccgggggauuuuauuaauuacgaagaacugcgggagcagcuuuccagcgucucuuccuucgaacgcuuugagaucuuccccaagaccagcucuuggccuaaccacgacuccaauaagggagugacagccgcuuguccccaugccggcgcgaaaucuuuuuauaagaaccugaucuggcucguuaaaaagggcaauagcuacccuaaacuguccaccagcuauauuaacgauaaggggaaggaaauccuugugcuguggggcauucaccaccccuccacaaccgccgaccaacagucucucuaccagaaugcugaugccuacgucuucgugggaacgagcagauauuccaaaaaguuuaaaccugagaucgcuauucggccgaaggugcgcgaccaggaggggagaaugaacuacuauuggacacuggucgaacccggagauaaaaucaccuucgaggccacaggcaaccugguugugccucgguacgcguuugccauggaacgcaaugcugggagcggaauuaucaucucugacacccccgugcaugauugcaacaccacaugucaaacgccugagggcgccauuaauaccucccuccccuuccagaacauccacccgauuacaaucggcaagugcccuaaauaugucaagagcaccaagcugagacuugcuacagggcugcggaaugugcccucuauucagagccgcggacucuuuggcgccaucgccggguucaucgaaggaggcuggaccgggaugguugacggaugguacggcuaucaucaccagaacgagcaaggcuccggguacgcugcggaccugaaaucuacgcagaaugccauugauaagaucacaaacaaagugaauagcgucauugagaagaugaacacccaguuuaccgcugugggaaaagaguucaaucaccuugagaagagaaucgaaaaccugaauaagaaaguugacgauggcuuccucgacauuuggacauacaacgccgagcugcuggugcuccuggaaaaugagcggacccuugauuaucaugacuccaacgucaagaaccuguacgagaaagugcgcaaucagcucaagaacaaugccaaagaaaucgggaacggauguuuugaguucuaucacaagugcgauaauacauguauggaaagcgucaagaacggcacguacgacuauccuaaauacucugaggaagcuaagcugaauagagagaaaaucgauggggugaaacuugaguccacccggauuuaucaaauccuggccauuuacagcacaguugcgucuucccucgugcuggucgugagccugggcgcuaucuccuuuuggaugugcucuaacggaagccuccagugccgcauuuguaucuga

SEQ ID NO: 202194 - RNA, 1701 nt, Artificial Sequence; identical to SEQ ID NO: 202132
  derived and/or modified CDS sequence (opt5) from hemagglutinin__InfluenzaA__AGQ16243

SEQ ID NO: 202195 - RNA, 1701 nt, Artificial Sequence
  derived and/or modified CDS sequence (opt5) from hemagglutinin__InfluenzaA__AGQ16245
augaaggccauccuggugguccuccuguacaccuucgcuacagccaacgcggacacgcuuugcauuggcuaucacgcuaauaacagcaccgauacaguugacaccgugcuggagaaaaaugugacagucacccauuccgugaaccuccuggaagauaagcacaaugggaaacuuuguaagcugagaggaguugcuccccuccaucugggcaaaugcaacaucgccggguggauucugggaaauccugagugugaaucucucagcacagccuccucuuggagcuacaucguggagaccuccucuagcgacaacggcacgugcuauccgggggauuuuauuaauuacgaagaacugcgggagcagcuuuccagcgucucuuccuucgaacgcuuugagaucuuccccaagaccagcucuuggccuaaccacgacuccaauaagggagugacagccgcuuguccccaugccggcgcgaaaucuuuuuauaagaaccugaucuggcucguuaaaaagggcaauagcuacccuaaacuguccaagagcuauauuaacgauaaggggaaagaagugcuuguccuguggggaauccaccaccccuccaccacagccgaccaacagucucucuaccagaaugcugaugccuacguguucgugggcaccagcagauauuccaagaaauuuaagccugagauugcuauccggccgaaaguccgcgaccaggaggggagaaugaacuacuauuggacgcugauugaacccggagauaagaucacauucgaggccaccggcaaccugguugugccucgguacgcguuugccauggaacgcaaugcugggagcggaauuaucaucucugacacacccgugcaugauugcaacaccaccugucaaacaccugagggcgccauuaauacgucccuccccuuccagaacauccacccgauuaccaucggcaaaugcccuaaguaugucaagagcacaaaacugagacuugcuaccgggcugcggaaugugcccucuauucagagccgcggacucuuuggcgccaucgccggguucaucgaaggaggcuggacagggaugguugacggaugguacggcuaucaucaccagaacgagcaaggcuccggguacgcugcggaccugaagucuacccagaaugccauugauaaaaucacgaacaaggugaauagcgucauugagaaaaugaacacacaguuuaccgcugugggaaaggaguucaaucaccuugagaagagaaucgaaaaccugaauaaaaagguugacgauggcuuccucgacauuuggaccuacaacgccgagcugcuggugcuccuggaaaaugagcggacacuugauuaucaugacuccaacgucaaaaaccuguacgagaaggugcgcaaucagcucaaaaacaaugccaaggaaaucgggaacggauguuuugaguucuaucacaagugcgauaauaccuguauggaaagcgucaaaaacggcacauacgacuauccuaaguacucugaggaagcuaaacugaauagagagaagaucgauggggugaaacuugaguccacgcggauuuaucaaauccuggccauuuacagcaccguugcgucuucccucgugcuggucgugagccugggcgcuaucuccuuuuggaugugcucuaacggaagccuccagugccgcauuuguaucuga

SEQ ID NO: 202196 - RNA, 1701 nt, Artificial Sequence; identical to SEQ ID NO: 202132
  derived and/or modified CDS sequence (opt5) from hemagglutinin__InfluenzaA__AGQ16247

SEQ ID NO: 202197 - RNA, 1701 nt, Artificial Sequence
  derived and/or modified CDS sequence (opt5) from hemagglutinin__InfluenzaA__AGQ16248
augcaggccauccuggugguccuccuguacaccuucgcuacagccacggcggacacccuuugcauuggcuaucacgcuaacaauagcacagauaccguugacacagugcuggagaagaacgugaccgucacacauuccgugaaucuccuggaagauaaacacaacgggaaacuuuguaagcugagaggaguugcgccccuccaucugggcaagugcaauaucgccggguggauucugggaaacccugagugugaaucucucagcaccgcuuccucuuggagcuacaucguggagacguccucuagcgacaaugggaccugcuauccgggcgauuuuauuaacuacgaagaacugcgggagcaacuuuccagcgucucuuccuucgaacgcuuugagaucuuccccaaaacaagcucuuggccuaaucacgacuccaacaagggagugaccgccgcuuguccccaugccggcgccaagagcuuuuauaaaaaucugaucuggcucguuaagaaaggcaacucuuacccuaagcugucccagagcuauauuaaugauaaagggaaggaagugcuuguccuguggggaauccaccaccccuccacaaccgccgaccagcagucucucuaccaaaacgcugaugccuacguguucgugggcacgagcagauauuccaagaaauuuaagccugagauugcuauccggccgaaaguccgcgaccaggaggggagaaugaauuacuauuggacacugguugaacccggagauaagauuaccuucgaggccacaggcaaccugguggugccucgguacgcguuuaccauggaacgcaacgccgggagcggaaucauuaucucugacacccccauccaugauugcaauacaacgugucagaccccugagggcgcuauuaacacaucccuccccuuccagaauauccacccgauuaccaucggcaaaugcccuaaguaugucaaaagcacaaagcugagacuugccaccgggcugcggaacgugcccucuauucaaagccgcggacucuuuggcgcuaucgccggguucaucgaaggaggcuggacggggaugguugacggaugguacggcuaucaucaccagaaugagcagggcuccggguacgccgcugaccugaagucuacacagaacgcgauugauaaaaucaccaauaaggugaacagcgucauugagaaaaugaauacccaauuuacagccgugggaaaggaguucaaccaccuugagaaaagaaucgaaaaucugaacaagaagguugacgauggcuuccucgacauuuggaccuacaaugcugagcugcuggugcuccuggaaaacgagcggacacuugauuaucaugacuccaaugucaaaaaccuguacgagaaggugcgcaaccagcucaaaaauaacgccaaggaaaucgggaauggauguuuugaguucuaucacaaaugcgauaacacguguauggaaagcgucaagaauggcaccuacgacuauccuaaguacucugaggaagccaaacugaacagagagaagaucgauggggugaaacuugaguccacacggauuuaucagauccuggcuauuuacagcaccguugccucuucccucgugcuggucgugagccugggcgcgaucuccuuuuggaugugcucuaauggaagccuccaaugccgcauuuguaucuga

SEQ ID NO: 202198 - RNA, 1701 nt, Artificial Sequence; identical to SEQ ID NO: 201930
  derived and/or modified CDS sequence (opt5) from hemagglutinin__InfluenzaA__AGQ16329

SEQ ID NO: 202199 - RNA, 1701 nt, Artificial Sequence; identical to SEQ ID NO: 201955
  derived and/or modified CDS sequence (opt5) from hemagglutinin__InfluenzaA__AGQ16331

SEQ ID NO: 202200 - RNA, 1701 nt, Artificial Sequence; identical to SEQ ID NO: 201930
  derived and/or modified CDS sequence (opt5) from hemagglutinin__InfluenzaA__AGQ16332

SEQ ID NO: 202201 - RNA, 1701 nt, Artificial Sequence; identical to SEQ ID NO: 201930
  derived and/or modified CDS sequence (opt5) from hemagglutinin__InfluenzaA__AGQ16333

SEQ ID NO: 202202 - RNA, 1701 nt, Artificial Sequence
  derived and/or modified CDS sequence (opt5) from hemagglutinin__InfluenzaA__AGQ16335
augaagaccaucauugcccugagcuacauccucugccugguguucgcucagaaacuucccggcaacgacaauuccacagccacgcugugucucgggcaccaugcggucccuaacggaaccauuguuaagacaaucaccaaugauagaauugaggugacaaacgcuaccgaacuggugcaaaauucuagcaucggcgagaucugcgacuccccgcaccagguccuugauggggaaaacuguacacugauugacgcccuccugggagauccccagugcgacggcuuucagaauaaaaagugggaucuguucguggagcggucuaaagccuauagcaacuguuacccuuaugacguucccgauuacgcuucccuccgcucucugguggccagcuccgggacccuugaauuuaauaacgagagcuucaauuggacgggagucacccaaaacggcacaucuuccgcuugcaucagacggagcaauucuuccuuuuucagccgccugaacuggcucacccaucugaauuuuaaguauccugcccuuaacgugacaaugcccaacaaugagcaguucgacaagcuguacauuuggggcguucaccauccugggaccgauaaagaccagaucuuucucuaugcgcagucuuccggaagaauuacggugagcacaaagcggucccaacaggccgucaucccgaacauuggcucucgccccagaauccggaauaucccuagccgcauuuccaucuacuggaccauugugaaacccggggauauccugcugauuaacagcacaggaaaucucaucgcuccuagaggcuacuucaagauccggucugggaaauccagcauuaugcgcucugacgcccccaucggaaaguguaagagcgaaugcauuaccccgaacggcuccaucccuaaugacaaacccuuucagaacgugaauagaauuaccuauggcgcuuguccucgguacgucaagcagaacacacugaaacuugccacggggaugcgcaauguucccgagaagcaaaccagaggaaucuucggcgcgaucgccggguuuauugaaaacggaugggagggcaugguggaugggugguauggauuccggcaccaaaauucugagggcagaggccaggcugccgaccugaaaagcacacaggcugccaucgaucagauuaacgggaagcucaaucgccugaucggaaaaaccaacgaaaaguuccaccagauugagaaggaauuuuccgagguggaaggccggauccaggaccuugagaaauacgucgaggauacaaagauugaccuguggagcuauaacgccgaacuccugguggcucuggagaaucaacauaccaucgaucucacggacucugaaaugaacaaacuguucgagaagaccaaaaagcagcuuagagaaaaugcggaggauauggggaacggaugcuuuaagaucuaccacaaaugugacaaugccugcauuggcuccauccgcaacgggacauaugaucaugacguuuaccgggacgaggcucugaauaacagauuccagauuaagggcguggaacucaaaagcggauacaaggauuggauccuguggauuucuuuugccaucuccugcuuccuucugugugucgcccuccugggcuuuaucaugugggcuugccagaaagggaauauucgcuguaacaucugcauuuga

SEQ ID NO: 202203 - RNA, 1701 nt, Artificial Sequence
  derived and/or modified CDS sequence (opt5) from hemagglutinin__InfluenzaA__AGQ16336
augaagaccaucauugcccugagcuacauccucugccugguguucgcucagaaacuucccggcaacgacaauuccacagccacgcugugucucgggcaccaugcggucccuaacggaaccauuguuaagacaaucaccaaugauagaauugaggugacaaacgcuaccgaacuggugcaaaauucuagcaucggcgagaucugcgacuccccgcaccagauucuugauggggaaaacuguacacugaucgacgcccuccugggagauccccagugcgacggcuuucagaauaaaaagugggaucuguucgucgagcggucuaaagccuauagcaacuguuacccuuaugacgugcccgauuacgcuucccuccgcucucugguugccagcuccgggacccuugaauuuaauaacgagagcuucaauuggacgggagugacccaaaacggcacaucuuccgcuugcauuagacggagcaaucgcuccuuuuucucuagacugaacuggcucacccaucugaauuuuaaguauccugcccuuaacgucacaaugcccaacaaugagcaguucgacaagcuguacaucuggggcgugcaccauccugggaccgauaaagaccagauuuuucucuaugcgcagagcucuggacggaucacgguuuccacaaagcgcagccaacaggccgugauuccgaacaucggcuccagaccccggauccgcaauauuccuucuagaaucagcauuuacuggaccaucgucaaacccggggauauucugcugaucaacuccacaggaaaucucaucgcuccucggggcuacuucaagauucgcagcgggaaaucuuccaucaugagaagcgacgcccccauuggaaaguguaagucugaaugcaucaccccgaacggcagcauuccuaaugacaaacccuuucagaacgugaaucggaucaccuauggcgcuuguccucgcuacgugaagcaguccacacugaaacuugccacggggaugagaaacguccccgagaagcaaacccggggaaucuucggcgcgauugccggguuuaucgaaaauggaugggagggcaugguugaugggugguauggauucagacaccagaacucugagggccgcggccaggcugccgaccugaaaagcacacaagcugccauugaucagaucaaugggaagcucaaccggcugauuggaaaaaccaaugaaaaguuccaccagaucgagaaggaauuuuccgagguggaaggccgcauucaggaccuugagaaauacguggaggauacaaagaucgaccuguggagcuauaacgccgaacuccuggucgcucuggagaaccaacauaccaucgaucucacggacucugaaaugaauaaacuguucgagaagaccaaaaagcagcuuagagaaaacgcggaggauauggggaauggaugcuuuaagauuuaccacaaaugugacaacgccugcaucggcuccauucggaaugggacauaugaucaugacguguacagagacgaggcucugaacaaucgcuuccagaucaagggcguugaacucaaaagcggauacaaggauuggauucuguggaucucuuuugccaucuccugcuuccuucuguguguggcccuccugggcuuuauuaugugggcuugccagaaagggaacauccgguguaauauuugcaucuga

SEQ ID NO: 202204 - RNA, 1701 nt, Artificial Sequence; identical to SEQ ID NO: 202202
  derived and/or modified CDS sequence (opt5) from hemagglutinin__InfluenzaA__AGQ16337

SEQ ID NO: 202205 - RNA, 1701 nt, Artificial Sequence; identical to SEQ ID NO: 201940
  derived and/or modified CDS sequence (opt5) from hemagglutinin__InfluenzaA__AGQ16338

SEQ ID NO: 202206 - RNA, 1701 nt, Artificial Sequence
  derived and/or modified CDS sequence (opt5) from hemagglutinin__InfluenzaA__AGQ16339
augaagaccaucauugcccugagcuacauccucugccugguguucgcucagaaacuucccggcaacgacaauuccacagccacgcugugucucgggcaccaugcggucccuaacggaaccauuguuaagacaaucaccaaugauagaauugaggugacaaacgcuaccgaacuggugcaaaauucuagcaucggcgagaucugcgacuccccgcaccagauucuugauggggaaaacuguacacugaucgacgcccuccugggagauccccagugcgacggcuuucagaauaaaaagugggaucuguucgucgagcggucuaaagccuauagcaacuguuacccuuaugacgugcccgauuacgcuucccuccgcucucugguugccagcuccgggacccuugaauuuaauaacgagagcuucaauugggcuggagugacgcaaaacggcaccucuuccgccugcauuagaggcagcaauucuuccuuuuucagccggcugaacuggcucacacaucugaauuuuaaguauccugcgcuuaacgucaccaugcccaacaaugagcaguucgacaagcuguacaucuggggagugcaccauccugggacagauaaagaccagauuuuucucuaugcccagucuuccggccgcaucaccguuagcacgaagagaucccaacaggcugugauuccgaacaucgggucucggccccgcaucagaaauauuccuagccggaucuccauuuacuggacaaucgucaaacccggagauauucugcugaucaacagcaccggcaaucucaucgccccucgcggguacuucaagauuagaucuggaaaauccagcaucaugcggucugacgcucccauuggcaaguguaagagcgaaugcaucacaccgaacggcuccauuccuaaugacaaacccuuucagaacgugaaucgcaucaccuauggggccuguccuagauacgugaagcagucuacccugaaacuugcgacaggaaugcggaacguccccgagaagcaaacgcgcggcaucuucggggccauugcuggauuuaucgaaaauggcugggaggggaugauggauggaugguauggcuucagacaccagaacagcgagggccgggggcaggccgcugaccugaaauccacccaagccgccauugaucagaucaauggaaagcucaacagacugauuggcaaaacaaaugaaaaguuccaccagaucgagaaggaauuuagcgagguugaagggcgcauucaggaccuugagaaauacguggaggauaccaagaucgaccuguggucuuauaacgcugaacuccugguggcgcuggagaaccaacauacaaucgaucucaccgacuccgaaaugaauaaacuguucgagaagacgaaaaagcagcuucgggaaaacgccgaggauaugggaaauggcugcuuuaagauuuaccacaaaugugacaacgcuugcaucgggagcauuagaaauggcacauaugaucaugacgucuaccgcgacgaggcccugaacaaucgguuccagaucaagggaguggaacucaaaucuggcuacaagaacuggauucuguggaucuccuuugccaucagcugcuuccuucuguguguugcucuccugggguuuauuaugugggccugccagaaaggaaauaucagauguaacauuugcaucuga

SEQ ID NO: 202207 - RNA, 1701 nt, Artificial Sequence; identical to SEQ ID NO: 202066
  derived and/or modified CDS sequence (opt5) from hemagglutinin__InfluenzaA__AGQ16340

SEQ ID NO: 202208 - RNA, 1701 nt, Artificial Sequence; identical to SEQ ID NO: 201930
  derived and/or modified CDS sequence (opt5) from hemagglutinin__InfluenzaA__AGQ16341

SEQ ID NO: 202209 - RNA, 1701 nt, Artificial Sequence; identical to SEQ ID NO: 201940
  derived and/or modified CDS sequence (opt5) from hemagglutinin__InfluenzaA__AGQ16342

SEQ ID NO: 202210 - RNA, 1701 nt, Artificial Sequence
  derived and/or modified CDS sequence (opt5) from hemagglutinin__InfluenzaA__AGQ16343
augaagaccaucauugcccugagcuacauccucugccugguguucgcucagaaacuucccggcaacgacaauuccacagccacgcugugucucgggcaccaugcggucccuaacggaaccauuguuaagacaaucaccaaugauagaauugaggugacaaacgcuaccgaacuggugcaaaauucuagcaucggcgagaucugcgacuccccgcaccagauucuugauggggaaaacuguacacugaucgacgcccuccugggagauccccagugcgacggcuuucagaauaaaaagugggaucuguucgucgagcggucuaaagccuauagcaacuguuacccuuaugacgugcccgauuacgcuucccuccgcucucugguugccagcuccgggacccuugaauuuaauaacgagagcuucaauugggcuggagugacgcaaaacggcaccucuuccgccugcauuagaggcagcaauucuuccuuuuucagccggcugaacuggcucacacaucugaauuuuaaguauccugcgcuuaacgucaccaugcccaacaaugagcaguucgacaagcuguacaucuggggagugcaccauccugggacagauaaagaccagauuuuucucuaugcccagucuuccggccgcaucaccguuagcacgaagagaucccaacaggcugugauuccgaacaucgggucucggccccgcaucagagauauuccuagccggaucuccauuuacuggacaaucgucaaacccggagacauucugcugaucaauagcaccggcaaccucaucgccccucgcggguacuucaagauuagaucuggaaaauccagcaucaugcggucugacgcucccauuggcaaguguaagagcgaaugcaucacaccgaauggcuccauuccuaacgauaaacccuuucagaaugugaaccgcaucaccuauggggccuguccuagauacgugaagcagucuacccugaaacuugcgacaggaaugcggaauguccccgagaagcaaacgcgcggcaucuucggggccauugcuggauuuaucgaaaacggcugggaggggaugguugacggaugguauggcuucagacaccagaauagcgagggccgggggcaggccgcugaucugaaauccacccaagccgccauugaccagaucaacggaaagcucaauagacugauuggcaaaacaaacgaaaaguuccaccagaucgagaaggaauuuagcgagguggaagggcgcauucaggaucuugagaaauacguggaggacaccaagaucgaucuguggucuuauaaugcugaacuccuggucgcgcuggagaaccaacauacaaucgaccucaccgauuccgaaaugaacaaacuguucgagaagacgaaaaagcagcuucgggaaaaugccgaggacaugggaaacggcugcuuuaagauuuaccacaaaugugauaaugcuugcaucgggagcauuagaaacggcacauaugaccaugacguguaccgcgaugaggcccugaauaaccgguuccagaucaagggaguugaacucaaaucuggcuacaaggacuggauucuguggaucuccuuugccaucagcugcuuccuucuguguguggcucuccugggguuuauuaugugggccugccagaaaggaaauaucagauguaacauuugcaucuga

SEQ ID NO: 202211 - RNA, 1701 nt, Artificial Sequence; identical to SEQ ID NO: 201940
  derived and/or modified CDS sequence (opt5) from hemagglutinin__InfluenzaA__AGQ16344

SEQ ID NO: 202212 - RNA, 1701 nt, Artificial Sequence; identical to SEQ ID NO: 201930
  derived and/or modified CDS sequence (opt5) from hemagglutinin__InfluenzaA__AGQ16345

SEQ ID NO: 202213 - RNA, 1701 nt, Artificial Sequence
  derived and/or modified CDS sequence (opt5) from hemagglutinin__InfluenzaA__AGQ16346
augaagaccaucauugcccugagcuacauccucugccugguguucgcucagaaacuucccggcaacgacaauuccacagccacgcugugucucgggcaccaugcggucccuaacggaaccauuguuaagacaaucaccaaugauagaauugaggugacaaacgcuaccgaacuggugcaaaauucuagcaucggcgagaucugcgacuccccgcaccagauucuugauggggaaaacuguacacugaucgacgcccuccugggagauccccagugcgacggcuuucagaauaaaaagugggaucuguucgucgagcggucuaaagccuauagcaacuguuacccuuaugacgugcccgauuacgcuucccuccgcucucugguugccagcuccgggacccuugaauuuaauaacgagagcuucaauuggacgggagugacccaaaacggcacaucuuccgcuugcauuagacggagcaauucuuccuuuuucagccgccugaacuggcucacccaucugaauuuuaaguauccugcccuuaacgucacaaugcccaacaaugagcaguucgacaagcuguacaucuggggcgugcaccauccugggaccgauaaagaccagauuuuucucuaugcgcagucuuccggaagaaucacgguuagcacaaagcggucccaacaggccgugauuccgaacaucggcucucgccccagaauccggaauauuccuagccgcaucuccauuuacuggaccaucgucaaacccggggauauucugcugaucaacagcacaggaaaucucaucgcuccuagaggcuacuucaagauucggucugggaaauccagcaucaugcgcucugacgcccccauuggaaaguguagaagcgaaugcaucaccccgaacggcuccauuccuaaugacaagcccuuucagaacgugaaucggaucaccuauggcgcuuguccucgcuacgugaaacagucuacacugaaacuugccacggggaugagaaacguccccgagaagcaaacccggggaaucuucggcgcgauugccggguuuaucgaaaauggaugggagggcaugguugaugggugguauggauucagacaccagaacagcgagggccgcggccaggcugccgaccugaaguccacacaagcugccauugaucagaucaaugggaaacucaaccggcugauuggaaagaccaaugaaaaauuccaccagaucgagaaggaauuuagcgagguggaaggccgcauucaggaccuugagaaguacguggaggauacaaaaaucgaccuguggucuuauaacgccgaacuccuggucgcucuggagaaccaacauaccaucgaucucacggacuccgaaaugaauaagcuguucgagaaaacaaagaaacagcuuagagaaaacgcggaggauauggggaauggaugcuuuaagauuuaccacaagugugacaacgccugcaucggcagcauucggaaugggaccuaugaucauaacguguacagagacgaggcucugaauaaccgcuuccagaucaaaggcguugaacucaagucuggauacaaagacuggauucuguggaucuccuuugccaucagcugcuuccuucuguguguggcccuccugggcuuuauuaugugggcuugccagaaggggaauauccgguguaacauuugcaucuga

SEQ ID NO: 202214 - RNA, 1701 nt, Artificial Sequence; identical to SEQ ID NO: 201930
  derived and/or modified CDS sequence (opt5) from hemagglutinin__InfluenzaA__AGQ16347

SEQ ID NO: 202215 - RNA, 1701 nt, Artificial Sequence; identical to SEQ ID NO: 202066
  derived and/or modified CDS sequence (opt5) from hemagglutinin__InfluenzaA__AGQ16348

SEQ ID NO: 202216 - RNA, 1701 nt, Artificial Sequence; identical to SEQ ID NO: 201930
  derived and/or modified CDS sequence (opt5) from hemagglutinin__InfluenzaA__AGQ16349

SEQ ID NO: 202217 - RNA, 1701 nt, Artificial Sequence
  derived and/or modified CDS sequence (opt5) from hemagglutinin__InfluenzaA__AGQ16350
augaagaccaucauugcccugagcuacauccucugccugguguucgcucagaaacuucccggcaacgacaauuccacagccacgcugugucucgggcaccaugcggucccuaacggaaccauuguuaagacaaucaccaaugauagaauugaggugacaaacgcuaccgaacuggugcaaaauucuagcaucggcgagaucugcgacuccccgcaccagauucuugauggggaaaacuguacacugaucgacgcccuccugggagauccccagugcgacggcuuucagaauaaaaagugggaucuguucgucgagcggucuaaagccuauagcaacuguuacccuuaugacgugcccgauuacgcuucccuccgcucucugguugccagcuccgggacccuugaauuuaauaacgagagcuucaauuggacgggagugacccaaaacggcacaucuuccgcuugcauuagacggagcaauucuuccuuuuucagccgccugaacuggcucacccaucugaauuuuaaguauccugcccuuaacgucacaaugcccaacaaugagcaguucgacaagcuguacaucuggggcgugcaccauccugggaccgauaaagaccagauuuuucucuaugcgcagucuuccggaagaaucacgguuagcacaaagcggucccaacaggccgugauuccgaacaucggcucucgccccagaauccggaauauuccuagccgcaucuccauuuacuggaccaucgucaaacccggggauauucugcugaucaacagcacaggaaaucucaucgcuccuagaggcuacuucaagauucggucugggaaauccagcaucaugcgcucugacgcccccauuggaaaguguaagagcgaaugcaucaccccgaacggcuccauuccuaaugacaaacccuuucagaacgugaauagaaucaccuauggcgcuuguccucgguacgugaagcagucuacacugaaacuugccacggggaugcgcaacguccccgagaagcaaaccagaggaaucuucggcgcgauugccggguuuaucgaaaauggaugggagggcaugguugaugggugguauggauuccggcaccagaacagcgagggcagaggccaggcugccgaccugaaauccacacaagcugccauugaucagaucaaugggaagcucaaccgccugauuggaaaaaccaaugaaaaguuccaccagaucgagaaggaauuuagcgagguggaaggccggauucaggaccuugagaaauacguggaggauacaaagaucgaccuguggucuuauaacgccgaacuccuggucgcucuggagaaccaacauaccaucgaucucacggacuccgaaaugaauaaacuguucgagaagaccaaaaagcagcuuagagaaaacgcggaggauauggggaauggaugcuuuaagauuuaccacaaaugugacaacgccugcaucggcagcauucgcaaugggacauaugaucauaacguguaccgggacgaggcucugaauaacagauuccagaucaagggcguugaacucaaaucuggauacaaggacuggauucuguggaucuccuuugccaucagcugcuuccuucuguguguggcccuccugggcuuuauuauguggaccugccagaaagggaauauccgcuguaacauuugcaucuga

SEQ ID NO: 202218 - RNA, 1701 nt, Artificial Sequence
  derived and/or modified CDS sequence (opt5) from hemagglutinin__InfluenzaA__AGQ47719
augaaggccauccugcucgugcugcuuugcaccuucacagcuacgaacgccgacacccuguguauuggcuaccacgcgaauaacagcacagauaccgucgacacaguucucgagaaaaaugugaccgugacacauuccgucaaccugcuugaagauagacacaaugggaagcugugcaaacucggaggcaucgcuccccugcaucuggggaaguguaacauugccggauggcuccugggcaauccugagugcgaacuucuguuuaccgugucuagcugguccuauaucguugagacgucuaacagcgacaaugggaccuguuacccgggagauuucauuaacuaugaggaacuccgggagcagcuguccucugugagcuccuuugaacgcuucgagaucuuucccaaaacaagcucuuggccugaccacgaaaccaauagaggcgucacagccgcuugccccuacgccggcgcuaacuccuucuaucggaaucuuaucuggcuggugaagaaggggaacagcuacccuaaacucucuaaguccuauguuaauaacaaaggaaaggaggugcugguccuguggggcauucaucaucccccuaccagcacggaucaacagucucucuaccagaacgccgacgcguacguguuugugggguccagcaaauauaaucgcaaguucaagccggagaucgccgcuagacccaaaguccggggacaggccggccgcaugaacuacuauuggacacugauugaaccuggggauaccaucacauuugaggcuaccggaaaucuuguugugcccagauacgccuucgcgaugaaccggggcuccggcucugggauuaucauuagcgacgccccuauccacgauuguaauaccaagugccaaacacccaaaggagcuaucaacacgucccugccguuucagaauauucacccugugaccaucggcgaaugucccaaguaugucaaaagcacaaagcuccgcauggccaccgggcugagaaacauuccuucuauccagucccggggacuuuucggcgcuauugccggguuuaucgagggaggcuggacaggcaugaucgacgggugguacggauaucaccaucagaauggccaagggagcggauacgccgcugaucagaaaucuacccagaacgcgauugacggcaucacgaauaaggugaacagcguuauugaaaagaugaauacacaguucaccgccguggggaaagaguucaaccaccuggagaagcgcaucgaaaaucucaacaaaaaggucgacgauggcuuucuggacguguggaccuacaacgcugagcugcucguucugcuugaaaaugagagaacacuggauuuccacgacuccaacgugaaaaaucucuaugaaaagguccggucucaacugcgcaacaaugccaaggagauuggaaacggcugcuuugaguucuaccauaaaugugaugauaccugcauggaaagcgugaagaaugggacauaugacuaccccaaauauuccgaggaaagcaaacuuaacagagaggaaaucgacggagucaagcuggagucuacgcggaucuaccagauucucgccaucuauuccaccgcugccagcucucuggugcugcucguuucccugggcgcgauuagcuuuuggaugugcuccaaugggucucuucaguguagaaucugcauuuga

SEQ ID NO: 202219 - RNA, 1698 nt, Artificial Sequence; identical to SEQ ID NO: 194187
  derived and/or modified CDS sequence (opt5) from hemagglutinin__InfluenzaA__AGQ47728

SEQ ID NO: 202220 - RNA, 1701 nt, Artificial Sequence
  derived and/or modified CDS sequence (opt5) from hemagglutinin__InfluenzaA__AGQ47740
augaaggccagacugcucgugcugcuuugcgcucuggccgcgaccgacgcugauacaaucuguauuggcuaccacgccaacaauagcacggacaccgucgauacacuccuggagaaaaacguuaccgugacacauuccgugaaucuucuggaagacucucacaacgggaagcucugcaaacugaagggaaucgcuccccugcagcucggcaaauguaauauugccggguggcugcuuggaaacccugagugcgauagccugcucccggcccgguccuggucuuauaucgucgaaacccccaauagcgagaacggcgcuuguuacccuggggacuucauugauuaugaagaacugcgcgagcaacuuuccucugugagcucccuggaaagauuugagaucuuccccaaggaaagcucuuggccuaaucauaacacaaucaagggaguuaccgccuccugcagccaccggggccagucuuccuuuuaccgcaaucuccuguggcugacgaaaaagggcgacagcuaucccaaacucaacaauucuuacgugaacaauaaggggaaagagguccuggugcuuuggggaguucaucacccuuccagcuccaacgagcagcagucucuguauagaaacgaaaaugcguacgugagcgucguguccagcaacuacaaucggcgcuucaccccggagauugccgcuagacccaaggugcgggaucaaacaggccgcaugaacuauuacuggacccuccuggaaccuggggacacaaucauguuugaggccaccggaaaucuuauugcucccugguaugccuucgcgcugucuagaggcuuuggguccggaaucauuacgagcaacgccucuaugcacgaauguaauacaaagugccagaccccucagggcgcuaucaacagcucccuccccuuccagaauauucauccggucacaaucggcgaguguccuaaauacguucggucuaccaagcugcgcauggugaccgggcugagaaacauccccagcauucaaucccggggacucuuuggcgccaucgcuggguucauugagggaggcuggacagggaugaucgauggaugguauggcuaccaccaucagaaugaacagggcagcggguaugccgccgaccagaaaucuacgcaaaacgcuauuaauggaaucaccaacaaggucaauuccgugaucgagaaaaugaacacacaguuuaccgcggugggcaaggaguucaacaaucuggagaaacgcauggaaaaccuuaauaagaagguugaugacggguuucuggacauuuggacauacaacgccgagcuccuggugcuucuggagaaugaaagaacccucgauuuccacgaccugaacgucaaaaaucuguacgagaaggugaaaagccagcucaagaacaaugcuaaagaaaucggaaacggcugcuucgaguuuuaucacaagugugauaaugaaugcauggagucuguucggaacgggacguacgacuauccuaaguacuccgaggaaagcaaacugaauagagagaagauugauggcgugaaacuugaauccaugggagucuaucaaauccuggccauuuacucuacaguggccagcucccucguccugcuggugucucuuggcgcuaucagcuucuggaugugcuccaacgggagccuccagugucgcaucugcauuuga

SEQ ID NO: 202221 - RNA, 1701 nt, Artificial Sequence
  derived and/or modified CDS sequence (opt5) from hemagglutinin__InfluenzaA__AGQ47752
augaaggccaaacugcucauccugcuuugcgcucugagcgccaccgacgcggauacaauuuguaucggcuaccacgcuaacaauuccacggacaccguggauacaguccucgagaagaacguuaccgugacacauucugugaaucugcuugaagacagccacaacgggaaacugugcagacucaagggaaaagcuccccugcagcugggcaaguguaauauugccggguggguccucggaaacccugagugcgaaucccugcuuucuaaucggagcugguccuauaucgccgagaccccgaacucugaaaauggcauuuguuaccccggggauuucgccgacuaugaggagcugcgcgaacaacucagcuccgugagcucuuuugagagauucgaaaucuuuccuaaggagcgguccuggcccaaacauaacacaauccgcggaguuaccgcugccugcagccacgcgggcaagucuuccuucuacaaaaaucugguguggcuuacggaggccaacggcagcuauccugcucugucuaccuccuacgucaauaaccaggaaaaggaggugcucguucuguggggagugcaucaccccagcaauauugaggaacagagaacacuguaucggaaagauaacgccuacgucuccguggugucuagcaacuacaaucgcagauuuaccccugaaaucgcuaagcggccgaagguccgcgaccagcccgggagaaugaacuauuacuggacacuccuggagccuggcgauaccauuaucuucgaggccacggggaaucuuauugcgcccugguaugccuuugcucugucccggggaccuggcagcgggaucauuacaucuaacgcccccauggacgaaugugauaccaaaugccaaacaccgcagggagcuaucaauuccagccucccuuuccagaacauccaccccguuaccauuggcgaguguccuaaguacgugcgcucuaccaaacugagaauggugacaggccuucggaauauccccagcauucagucccgcgggcuguuuggagccaucgccggcuucauugaagggggauggacgggcaugauggacgggugguauggauaccaucaccaaaacgagcagggcucuggcuaugcugcggaucaaaagagcacccagaaugccaucaacgggaucacaaauaaagucaacuccgugauugaaaagaugaauacccaguuuacagcuguuggaaaagaguucaacaagcucgagaagagaauggaaaaucugaacaaaaagguggacgacggcuuucuggauaucuggaccuacaacgccgagcuccugguccuucuggaaaaugagcggacgcucgacuuccaugauagcaacgugaaaaaucuguacgaaaagguuaaaaaccagcuuagaaauaacgccaaggagcuggggaauggaugcuucgaguuuuaucacaagugugacaacgaaugcauggagucugugaaaaauggcacauacgauuaucccaaguacuccgaagagagcaaacucaaccgcgagaagauugacggggucaaacuggaaucuaugggcguguaucggauccuggcuauuuacuccaccgucgccagcucccucgugcugcuuguuucucugggagcgaucagcuucuggaugugcuccaauggcucucuccaguguagaaucugcauuuga

SEQ ID NO: 202222 - RNA, 1701 nt, Artificial Sequence
  derived and/or modified CDS sequence (opt5) from hemagglutinin__InfluenzaA__AGQ47764
augaaggccaaacugcucauccugcuuugcgcucugaccgccacagacgcggauacgauuuguaucggcuaccacgcuaacaauagcaccgacacaguggauaccguccucgagaagaacguuacagugacccauuccgugaaucugcuugaagacucucacaacgggaaacugugcagacucaagggaauugccccgcugcagcugggcaaauguaauaucgccggguggauucucggaaacccugagugcgaaagccugcuuuccaagcggucuuggagcuauaucgcugagacacccaauuccgaaaacggcgccuguuaccccggggauuucgcugacuaugaggagcugcgcgaacaacucucuagcgucuccagcuuugagagauucgaaaucuuuccuaaggagcggucuuggcccaaacauaauauuacccgcggagugacggccgcgugcucccacgccggcaagagcucuuucuacaaaaaccugcuuuggcugaccgagacagauggcuccuauccuaagcucagcaaaucuuacguuaauaacaaggaaaaggaggugcugguccuguggggagugcaucaccccuccaauaucgaagaccagaaaacccucuauagaaaggagaacgcuuacguuagcguggucuccucuaauuacaaccggcgcuuuacaccugaaauugccgagagaccgaaagugcgggggcaggcuggccgcaucaacuauuacuggacccugcuugagcccggggauacgauuaucuucgaagccaauggaaaccugauugcgccuugguaugccuuugcucucagcagagacuucggcuccgggaucaucacaagcaaugccucuauggaugagugugacaccaagugccagacaccccaaggagcuauuaacuccagccugccuuuucagaauauccaccccgugaccauuggcgaauguccgaaauacgucaagucuaccaaacuucggaugguuacaggccugcgcaacaucccuagcauucaguccagaggacucuucggggccaucgccggcuuuaucgaagggggauggacgggcaugauugaugggugguauggauaccaucaccagaaugaacaaggcucuggcuaugcugcggaccaaaagagcacccagaacgccaucaaugggauuacaaacaaggucaauuccgugaucgagaaaaugaacacccaguucacagcugugggaaaggaguuuaauaaacuggaaaagcggauggagaaccugaauaaaaagguggacgauggcuuccucgacauuuggaccuacaacgccgaacugcuuguucugcucgagaacgaacgcacgcuggauuuccaugacagcaaugugaagaaccuuuacgagaaagucaagaaucagcugagaaacaaugccaaagagaucgggaacggaugcuuugaguucuaucacaaguguaauaacgagugcauggaaucugugaaaaauggcacauacgauuaucccaaguacuccgaggagagcaagcucaaccgggagaaaaucgacgggguuaagcuggaaucuaugggcguguaucagauucuggcuaucuacuccaccgucgccagcucccucgugcugcuugucucucugggagcgauuagcuuuuggaugugcuccaauggcucucuccaguguagaaucugcauuuga

SEQ ID NO: 202223 - RNA, 1701 nt, Artificial Sequence
  derived and/or modified CDS sequence (opt5) from hemagglutinin__InfluenzaA__AGQ47776
augaaggccaaacugcucauccugcuuugcgcucugagcgccaccgacgcggauacaauuuguaucggcuaccacgcuaacaauuccacggacaccguggauacaguccucgagaagaacguuaccgugacacauucugugaaucugcuugaagacagccacaacgggaaacugugcagacucaagggaauugccccgcugcagcugggcaaauguaauaucgccggguggauucucggaaacccugagugcgaaucccugcuuucuaagcggagcugguccuauaucgcugagacccccaauucugaaaacggcacauguuaccccggggauuucgccgacuaugaggagcugcgcgaacaacucagcuccgucagcucuuuugagagauucgaaaucuuuccuaaggagcgguccuggcccaaacauaauauuaacaucggagugaccgcugccugcagccacgcgggcaagucuuccuucuacaaaaaucugcuuuggcugacggagaaggauggcagcuauccuaaccucaauaaaucuuacguuaacaagaaggaaaaagaggugcugguccuguggggagugcaucaccccuccaauauugaagaccagaagacccucuaucgcaaagagaacgccuacguuagcguggucuccucuaacuacaauagacgguuuacaccugaaaucgcugagcgcccgaaggugagagggcaggccggccggaugaacuauuacuggacccugcuugagcccggggauacaauuaucuucgaagcuaauggaaaccugauugccccuugguaugcguuugcccucagccgcggccugggguccggaaucaucaccagcaaugcuucuauggacgagugugauacgaaaugccagacaccccaaggcgccauuaacuccagccuuccuuuccagaauauccaccccuuuaccauuggcgaauguccgaaguacgugagaucuacaaaacugcggauggucaccgggcuccgcaacaucccuagcauucaguccagaggacuguucggcgcuaucgccggguuuaucgagggaggcuggaccgggaugauugacggaugguauggcuaccaucaccagaaugaacaaggcucuggguaugccgcugaucagaaaagcacacagaacgcgaucaauggaauuacgaacaagguuaauuccgugaucgagaaaaugaacacccaguucacagccgugggcaaggaguuuaauaaacuggaaaagcggauggagaaccucaacaaaaaggucgacgacggguuccuggauauuuggaccuacaaugcugaacuucuggugcuccuggagaacgaacgcacacuugacuuccaugauagcaauguuaagaaccuguacgagaaagugaagaaucaacucagaaacaaugccaaagagaucggaaacggcugcuuugaguucuaucacaaguguaauaacgaaugcauggaaucugucaaaaaugggaccuacgacuaucccaaguacuccgaggagagcaagcugaaccgggaaaagaucgauggcgugaagcuggagucuaugggaguuuaucagauucucgccaucuacuccacgguggcuagcucccugguccuucuggugucucucggcgccauuagcuuuuggaugugcuccaaugggucucugcaguguagaaucugcauuuga

SEQ ID NO: 202224 - RNA, 1701 nt, Artificial Sequence
  derived and/or modified CDS sequence (opt5) from hemagglutinin__InfluenzaA__AGQ47788
augaaggccaaacugcucgugcugcuuugcgcucugagcgccaccgacgcggauacaaucuguauuggcuaccacgcuaacaauuccacggacaccgucgauacaguucucgagaagaacgugaccgugacacauucugucaaucugcuugaagacagccacaacgggaaacugugcagacucaagggaaucgccccgcugcagcugggcaaauguaauauugccggguggauccucggaaacccugagugcgaaucccuguucucuaaaaagagcugguccuauauugcugagacccccaauucugaaaacggcacauguuaccccggguauuuugccgauuacgaggagcuucgggaacaacugagcuccgugagcucuuucgagcgcuuugaaaucuucccuaaggagagauccuggcccaagcauaauguuacccggggagugacggcugccugcagccacaaaggcaagucuuccuuuuaucgcaaccuccuguggcuuaccgagaaagacggcagcuacccuaaucugucuaaguccuaugucaacaauaaggaaaaagaggugcucguucuguggggagugcaucaccccagcaacaucgaagaucagaagacacuguacagaaaagagaaugcguacgucuccguggugucuagcaacuauaaccggcgcuucaccccugaaauugccgagagaccgaagguccgggggcaggcuggccgcaucaauuacuauuggacacuccuggagcccggggacaccauuaucuuugaagccaacggaaaucuuauugcuccuuggcacgccuucgcgcuguccagaggcuuugggagcggaaucauuacgucuaacgccuccauggaugagugugacacaaaaugccagacaccccaaggcgcuaucaauagcucucucccuuuccagaacauccaucccguuaccauuggcgaauguccgaaguacgugcggagcaccaaacugcgcauggugaccgggcuuagaaauaucccuuccauucagucucggggacuguuuggcgccaucgcuggguucauugagggaggcuggacagggaugaucgauggaugguauggcuaccaccaucagaacgaacaaggcagcggguaugccgccgaccagaaguccacgcagaaugcuaucaacggaauuaccaauaaggucaacagcgugaucgagaaaaugaauacacaguuuaccgcgguuggcaaggaguucaacaaacucgaaaagcgcauggagaaucugaacaaaaagguggaugacggguuccuggacauuuggacauacaacgccgaacuccugguccuucuggagaaugaaagaacccucgauuuucacgacucuaacgugaagaaucuguacgagaaaguuaagucccaacuuaaaaacaaugcuaaggagaucggaaacggcugcuucgaauuuuaucacaaauguaauaacgagugcauggaaagcgugaagaaugggacguacgauuaucccaaguacucugaggaguccaaacugaaccgggaaaagauugacggcgucaaacucgagagcaugggaguguaucagauccuggccaucuacuccacagucgccucuagccuggugcuccugguuucccuuggcgcuauuucuuucuggaugugcagcaaugggucccugcaguguagaaucugcauuuga

SEQ ID NO: 202225 - RNA, 1701 nt, Artificial Sequence
  derived and/or modified CDS sequence (opt5) from hemagglutinin__InfluenzaA__AGQ47800
augaaggccagacugcucgugcugcuuugcgcucuggccgcgaccgacgcugauacaaucuguauuggcuaccacgccaacaauagcacggacaccgucgauacaauccucgagaaaaacguuaccgugacacauuccgugaaucugcuugaagacucucacaacgggaagcugugccggcucaaaggaauugccccgcugcagcugggcaaguguaauaucgcuggguggauucucggaaacccugagugcgaaagccugcuuuccgagcgcucuuggagcuauaucgucgaaauccccaauuccgagaacggcaccuguuaccccggggauuucacagacuaugaggaacugagagagcaacucucuagcguguccagcuuugaacgguucgagauuuuuccuaaagagucuuccuggcccaagcauaauaccgcccgcggaguuacggcugccugcagccacgcgggcaagucuuccuucuacagaaaccugcuuuggcugaccgaaaaagauggcagcuauccuaaucucaagaacucuuacgugaauaaaaaggggaaagagguccuggugcuguggggaguucaucaccccuccagcaucaaggaacagcagacacucuaucagaaggagaacgccuacguguccgucgugucuagcaauuacaaccggcgcuuuaccccugaaauugcugagagaccgaaagugcgggaccaagccggccgcaugaacuauuacuggacacugcuugagcccggggauaccaucauuuucgaagcuaauggaaaccugaucgccccuugguaugcguuugcccucuccagaggcuucgggagcggaauuaucacgucuaaugcuuccaugcacgagugugacacaaagugccagacaccccagggcgccaucaacagcucucugccuuuucagaauauucaucccgucaccaucggcgaauguccgaaauacguucggagcaccaaacuucgcauggugaccgggcugagaaacauuccuuccauccaaucucggggacucuucggcgcuauugccggguuuaucgagggaggcuggacagggaugaucgauggaugguauggcuaccaccaucagaaugaacagggcagcggguaugccgcugaccagaaguccacgcaaaacgcgauuaauggaaucaccaacaaggugaauagcgucauugagaaaaugaacacacaguucaccgccgugggcaaggaguuuaauaaccuggaaaagcgcauggagaaucugaacaaaaagguugaugacggguuccucgacaucuggacauacaacgcugaacugcuuauucugcucgagaaugaaagaacccuggauuuccacgacucuaacgugaaaaaucuuuacgagaaggucaaaucccagcugcggaacaaugccaaggagaucggaaacggcugcuuugaguucuaucacaaguguaauaacgaaugcauggaaagcgugaaaaaugggacguacgauuaucccaaguacucugaggaguccaaacucaacagagaaaagaucgacggcguuaaacuggagagcaugggaguguaucaaauucuggccaucuacuccacagucgcuucuagccucgugcugcuugucucccugggcgccauuucuuuuuggaugugcagcaaugggucccuccagugucgcaucugcauuuga

SEQ ID NO: 202226 - RNA, 1701 nt, Artificial Sequence
  derived and/or modified CDS sequence (opt5) from hemagglutinin__InfluenzaA__AGQ47811
augaaggccaaacugcucgugcugcuuugcgcucugagcgccaccgacgcggauacaaucuguauuggcuaccacgcuaacaauuccacggacaccgucgauacaguucucgagaagaacgugaccgugacacauucugucaaucugcuugaagacagccacaacgggaaacugugcagacucaagggaaucgccccgcugcagcugggcaaauguaauauugccggguggauccucggaaacccugagugcgaaucccuguucucuaaaaagagcugguccuauauugcugagacccccaauucugaaaacggcacauguuaccccggguuuuucgccgauuaugaggagcuucgggaacaacugagcuccgugagcucuuuugagcgcuucgaaaucuuuccuaaggagagauccuggcccaagcauaauguuacccggggagugacggcugccugcagccacaaaggcaagucuuccuucuaccgcaaccuccuguggcuuaccgagaaaaauggcagcuauccuaaccugucuaaguccuacgucaauaacaaggaaaaagaggugcucguucuguggggagugcaucaccccagcaauaucgaagaccagaagacaauuuauagaaaagagaacgcguacgucuccguggugucuagcaacuacaaucggcgcuuuaccccugaaaucgccgagagaccgaagguccgggggcaggcuggccgcauuaacuauuacuggacacugcucgagcccggggauaccaucauuuucgaagccaauggaaaccugaucgcuccuuggcacgccuuugcgcuuuccagaggcuucgggagcggaauuaucacgucuaaugccuccauggacgagugugauacaaaaugccagacaccccaaggcgcuaucaacagcucucugccuuuucagaauauucaucccguuaccaucggcgaauguccgaaguaugugcggagcaccaaacuccgcauggugaccgggcugagaaacauuccuuccauccagucucggggacuuuucggcgccauugcuggguuuaucgagggaggcuggacagggaugaucgacggaugguacggcuaucaccaucagaaugaacaaggcagcggguacgccgccgaucagaaguccacgcagaacgcuauugacggaaucaccaauaaggucaacagcgugauugagaaaaugaauacacaguucaccgcgguuggcaaggaguucaacaaacuggaaaagcgcauggagaaucucaacaaaaagguggaugacggguuucuggacaucuggacauauaacgccgaacugcucguccugcuugagaaugaaagaacccuggauuuccacgacucuaacgugaagaaucucuacgagaaaguuaagucccaacugaaaaacaaugcuaaggagauuggaaacggcugcuuugaguucuaccacaaauguaauaacgaaugcauggaaagcgugaagaaugggacguaugauuaccccaaguauucugaggaguccaaacuuaaccgggaaaagaucgacggcgucaaacuggagagcaugggaguguaccagauccucgccauuuauuccacagucgccucuagccuggugcugcucguuucccugggcgcuaucucuuuuuggaugugcagcaaugggucccuucaguguagaauuugcaucuga

SEQ ID NO: 202227 - RNA, 1701 nt, Artificial Sequence
  derived and/or modified CDS sequence (opt5) from hemagglutinin__InfluenzaA__AGQ47823
augaaggccaaacugcucgugcugcuuugcgcuuucaccgccacauacgcggacacgaucuguauuggcuaucacgcuaacaauagcaccgauacagucgacaccguucuggagaagaacgugacagugacccauuccgucaaucuccuggaagauucucacaacgggaaacuuugcagacugaagggaaucgcuccccuccagcugggcaauuguagcguggccggguggauucugggaaacccuaaaugcgagucccucuuuucuaaggaaagcugguccuacaucgccgagacaccgaaucccgaaaacggcaccuguuauccuggguacuucgccgacuaugaggagcugcgggaacaacuuucuagcguuuccagcuuugagcgcuucgaaauuuuucccaaggagucuuccuggccuaaucauacggugaccaaaggagucacaaccagcugcucucacaacggcaaguccagcuucuacagaaaucugcucuggcugacagagaaaaacggccuuuaucccaaucugucuaaguccuacgugaacaauaaagaaaaggagguucucgugcuguggggaguccaucacccuagcaacauccgggaucagcgcgcuaucuaccacaccgaaaacgccuauguguccguggucucuagccauuacuccagacgguuuacgccggagauugcgaagcgccccaaaguuagagggcaggaaggccggaucaauuauuacuggacacugcucgagccuggggacaccauuaucuucgaggccaacggaaaucugauugcucccugguaugccuuugcucuuagccgcggcuucgggucuggaaucauuacauccaacgccagcauggaugaaugugacgcgaagugccagaccccucaaggcgccaucaauucuagccugcccuuucagaacgugcacccggugaccaucggcgaguguccuaaauacgucagauccacaaagcuccggauggugacggggcugcgcaauauucccucuauccagagcagaggacuuuucggcgcuauugccggguuuaucgaaggaggcuggaccgggaugauugauggaugguauggcuaccaucaccagaacgagcaaggcuccggguacgcugccgaccagaaaagcacacagaaugccaucaacggaaucaccaauaagguuaacucugugauugaaaagaugaauacacaguucaccgcugucggcaaggaguucaacaagcuggagcggcgcauggaaaaucucaacaaaaagguggaugacggguuucuggauaucuggacguauaacgcggagcugcucguucugcuugaaaauggaagaacacuggacuuccacgacuccaacgugaaaaaucucuacgagaaggucaaaagccaacugaagaacaaugccaaggaaauuggcaacgggugcuuugaguucuaucauaaauguaauaacgagugcauggaaucugugaagaauggcaccuacgauuauccuaaauacuccgaggaaagcaaacuuaaccggggaaaaaucgacggcgucaagcuggaguccauggggguguaucagauucucgcuaucuacucuaccguugccagcucccuggugcugcucgucucucugggagccaucagcuuuuggaugugcuccaauggcagccuucaguguagaauuugcaucuga

SEQ ID NO: 202228 - RNA, 1701 nt, Artificial Sequence
  derived and/or modified CDS sequence (opt5) from hemagglutinin__InfluenzaA__AGQ47835
augaagaccaucauugcccugagcuacaucuucugccucgugcugggccaggacuuucccgggaacgauaauuccacagcuacgcuuugucugggacaccaugccgucccuaacggcaccauuguuaaaacaaucaccaaugaccaaauugaggugacaaacgcgaccgaacucgugcagucuagcuccacagggaagaucugcaauaacccgcacagaauccuggauggaauuaauuguacccuuaucgacgcucugcucggcgauccccauugcgacggguuccagaacgagacgugggaucuguuugucgaacggucuaaagccuucagcaauuguuauccuuacuaugugcccgacuacgccucccugcgcucucucguugcuagcuccggaacccuggaguuuauuaacgaaggcuucaauuggacaggcgugacccagaacgggggaagcaaugccugcaagagaggcccuaacucuggguuuuucucccggcuuaauuggcuguauaaaagcggaacaaccuaccccguccucaacgugacgaugccuaacaaugauaacuuugacaagcuguauaucuggggcguucaccauccgucuacagaucaagagcagaccaaucuuuacgugcaggcuuccgggcgcgucacagugagcaccaagagaucucagcaaaccauuacacccaacaucggaucccggccuugggugcgcggccugagcuccagaauuucuaucuacuggacgaucgucaaacccggcgacauucucguuaucaauagcaacgggaaucugauugccccucggggauauuucaagaugcgcaccggcaaauccagcaucaugagaucugaugcgcccauugggacauguaucuccgagugcaucaccccgaacggaagcauuccuaaugacaagcccuuucagaacgugaauaaaaucacauacggcgccuguccuaaguaugugaagcagaacacccugaaacucgcuacggggaugcggaauguccccgaaaagcagacacgcggaauuuucggcgccaucgcuggcuuuauugagaacgggugggaaggaaugguggacggcugguacggguucagacaccaaaauucugagggaaccggccaggccgcggaucugaaaagcacccaggccgcuaucgaccaaaucaacgggaagcugaaccggguuauugagaaaacaaaugaaaaguuccaccagaucgagaaagaauuuuccgagguggaaggccgcauucaggaucuggagaaguaugucgaggacaccaagaucgaucucuggucuuacaacgccgaacugcuuguggcucuggagaaucagcauacaauugaccucacggauagcgaaaugaacaaacuguucgagaagaccagacggcaacugagagaaaaugccgaggacaugggaaacggcugcuuuaaaaucuaucacaagugugauaaugccugcauuggguccauccgcaacggaacauacgaccaugauguuuaccgggacgaggcucucaauaacagauuccagaucaaaggcguggaacuuaagagcggguauaaggacuggauucuuuggaucucuuuugcgauuuccugcuuccugcucugugucgugcugcuuggauuuaucaugugggccugccagaaaggcaauauucgcuguaacaucugcaucuga

SEQ ID NO: 202229 - RNA, 1701 nt, Artificial Sequence
  derived and/or modified CDS sequence (opt5) from hemagglutinin__InfluenzaA__AGQ47847
augaaggccagacugcucauccugcuuugcgcucuggccgcgaccgacgcugauacaauuuguaucggcuaccacgccaacaauagcacggacaccguggauacaguccucgagaaaaacguuaccgugacacauuccgugaaucugcuugaagacucucacaacgggaagcugugccggcucaaaggaauugcuccccugcagcugggcaaguguaauaucgccggguggcuccugggaaacccugagugcgauagccuucugccggccuccucuuggagcuauauugucgaaacccccaauuccaaaaacggcaucuguuacccuggggacuucaucgauuaugaggaacuccgcgagcaacugucuagcguguccagcuuugagagauucgaaauuuuucccaaggagucuuccuggccuaagcauaauacaaccaaaggaguuacggcugccugcagccacgcgggcaagucuuccuucuaccggaaccuucuguggcucaccaaaaaggaagacagcuaucccaaacugucuaauuccuacgugaacaagaagggcaaagagguccuggugcucuggggaguucaucacccuagcaauuccaaggagcagcagacacuguaucagaacgaaaaugccuacgugucugucgugagcuccaacuacaaccgcagauuuaccccggagaucgcugaacggcccaaagugcgcgaucaagccgggagaaugaauuauuacuggacacuucuggagccuggcgacaccauuaucuucgaagcuaacgggaaucucauugcccccugguaugcguuugcccugagccggggauucggcucugggaucauuacguccaacgcuagcaugcacgaguguaauacaaagugccagaccccucagggagccaucaacucuagccuucccuuucagaauauccauccggucacaauuggcgaguguccuaaauacguuaaguccgcuaaacugcgcauggugaccggccucagaaacauccccucuauucaaagccgggggcuguucggagccaucgccggcuuuauugaagggggauggaccggcaugaucgaugggugguauggauaccaccaucagaaugagcagggcuccggcuaugcugcggaccagaaaagcacacaaaacgccaucaaugggauuacgaacaaggucaauucugugaucgaaaagaugaacacccaguucacagcugugggaaaggaguuuaauaaccuggaaaaacgcauggagaaccucaauaagaaaguugaugacggcuuccuggacauuuggaccuacaacgccgagcuucuggugcuccuggaaaaugagagaacacuugauuuccacgacuccaacgucaagaaucuguacgaaaaggugaaaauccagcucaagaacaaugccaaagagauugggaacggaugcuuugaguucuaucacaagugugauaaugaaugcauggagagcguucggaacggcaccuacgacuauccuaaauacucuaaggaauccaagcugaaucgcgagaaaaucgauggggugaagcuggaacccaugggcgucuaucaaauccucgcuauuuacagcacgguggccuccucucugguccuucuggugagccucggagcgaucuccuuuuggaugugcucuaacggcagccugcaguguagaauuugcaucuga

SEQ ID NO: 202230 - RNA, 1701 nt, Artificial Sequence
  derived and/or modified CDS sequence (opt5) from hemagglutinin__InfluenzaA__AGQ47870
augaaggccauccugcucgugcugcuuugcaccuucgcugccacaaacgcggacacgcuguguauuggcuaccacgcuaauaacagcaccgauacagucgacaccguucucgagaaaaaugugacagugacccauuccgucaaccugcuugaagauagacacaaugggaagcugugcaaacucggaggcaucgcuccccugcaucuggggaaguguaacauugccggauggcuccugggcaauccugagugcgaacuucugcucacagugucuagcugguccuauaucguugagaccucuaacagcgacaaugggacguguuacccgggagauuuuauuaacuaugaagaacugcgggagcagcuuuccucugugagcuccuucgaacgcuuugagaucuuccccaaaaccagcucuuggccuaaucacgaaacaaacagaggcgucaccgccgccugccccuacgcuggcgccaauuccuuuuaucggaaccugaucuggcucgugaagaaggggaauagcuacccuaaacugucuaaguccuauguuaacaacaaaggaaaggaggugcugguccucuggggcauucaucaucccccuacaagcaccgaccaacagucucuguaccagaaugcggaugccuacguguucgugggguccagcaaauauaaccgcaaguuuaagccggagaucgcugccagacccaaaguccggggacaggcuggccgcaugaauuacuauuggacgcuuauugaaccuggggacacaaucaccuucgaggccacaggaaaccugguugugcccagauacgcguuugccaugaaucggggcuccggcucugggauuaucauuagcgaugcuccugugcacgacuguaacaccaagugccaaacccccaaaggagccaucaauacaucccucccguuccagaacauccacccugucacgauuggcgaaugucccaaguaugugaaaagcaccaagcugcgcauggcuacagggcuuagaaauaucccuucuauucagucccggggacuguuuggcgccaucgccggguucauugagggaggcuggaccggcaugaucgaugggugguacggauaucaccaucagaacgaacaaggcagcggguacgcugcggaccagcgcucuacacagaaugccaucgauggaauuaccaacaaaguuaauagcgugaucgagaagaugaacacgcaguuuacagcugucggcaaggaguucaaucaccucgagaaaagaauugagaaccugaacaagaaaguggacgacggguuccuggauaucuggaccuacaaugccgaacuccugguucuucuggagaacgaacggacccucgacuuucacgauuccaaugugaagaaccuguaugagaaaguccgcucucaacuuagaaauaacgccaaggagauuggcaauggaugcuucgaauuuuaccauaagugugacgauacaugcauggagagcgugaaaaacggcaccuaugacuaccccaaguauuccgaagagagcaaacugaaucgggaagagaucgauggggucaagcucgagucuacaagaaucuaccagauucuggcuaucuauuccacgguggccagcucucugguucuccuggugucccuuggagcgauuagcuucuggaugugcuccaacggcucucugcagugucgcaucugcauuuga

SEQ ID NO: 202231 - RNA, 1701 nt, Artificial Sequence
  derived and/or modified CDS sequence (opt5) from hemagglutinin__InfluenzaA__AGQ47882
augaaggccauccugcucgugcugcuuugcaccuucgcugccacaaacgcggacacgcuguguauuggcuaccacgcuaauaacagcaccgauacagucgacaccguucucgagaaaaaugugacagugacccauuccgucaaccugcuugaagauagacacaaugggaagcugugcaaacucggaggcaucgcuccccugcaucuggggaaguguaacauugccggauggcuccugggcaauccugagugcgaacuucugcucacagugucuagcugguccuauaucguugagaccucuaacagcgacaaugggacguguuacccgggagauuuuauuaacuaugaagaacugcgggagcagcuuuccucugugagcuccuucgaacgcuuugagaucuuccccaaaaccagcucuuggccuaaucacgaaacaaacagaggcgucaccgccgccugccccuacgcuggcgccaauuccuuuuaucggaaccugaucuggcucgugaagaaggagaauagcuacccuaaacugucuaaguccuauguuaacaacaaagggaaggaggugcugguccucuggggcauucaucaucccccuacaagcaccgaccaacagucucuguaccagaaugcggaugccuacguguucgugggauccagcaaauauaaccgcaaguuuaagccggaaaucgcugccagacccaaaguccgggggcaggcuggacgcaugaauuacuauuggacgcuuauugagccuggcgacacaaucaccuucgaagccacagggaaccugguugugcccagauacgcguuugccaugaaucggggauccggcucuggcauuaucauuagcgaugcuccugugcacgacuguaacaccaagugccaaacccccaaaggggccaucaauacaucccucccguuccagaacauccacccugucacgauuggagagugucccaaguaugugaaaagcaccaagcugcgcauggcuacaggccuuagaaauaucccuucuauucagucccgggggcuguuuggagccaucgccggcuucauugaagggggauggaccggcaugaucgauggcugguacggguaucaccaucagaacgagcaaggaagcggcuacgcugcggaccagcgcucuacacagaaugccaucgaugggauuaccaacaaaguuaauagcgugaucgagaagaugaacacgcaguuuacagcugucggaaaggaguucaaucaccucgagaaaagaauugaaaaccugaacaagaaaguggacgacggcuuccuggauaucuggaccuacaaugccgagcuccugguucuucuggaaaacgagcggacccucgacuuucacgauuccaaugugaagaaccuguaugagaaaguccgcucucaacuuagaaauaacgccaaggaaauugggaauggcugcuucgaguuuuaccauaagugugacgauacaugcauggaaagcgugaaaaacggaaccuaugacuaccccaaguauuccgaggaaagcaaacugaaucgggaggagaucgauggcgucaagcucgaaucuacaagaaucuaccagauucuggcuaucuauuccacgguggccagcucucugguucuccuggugucccuuggggcgauuagcuucuggaugugcuccaacggaucucugcagugucgcaucugcauuuga

SEQ ID NO: 202232 - RNA, 1701 nt, Artificial Sequence; identical to SEQ ID NO: 201167
  derived and/or modified CDS sequence (opt5) from hemagglutinin__InfluenzaA__AGQ47894

SEQ ID NO: 202233 - RNA, 1701 nt, Artificial Sequence
  derived and/or modified CDS sequence (opt5) from hemagglutinin__InfluenzaA__AGQ47906
augaagaccaucauugcccugagcuacaucuucugccucgcucugggccaggaccuucccgggaacgauaauuccacagccacgcugugucucggacaccaugcggugccuaacggcacccuggucaaaacaauuaccgacgaucaaaucgagguuacaaaugcuaccgaacuugugcagucuagcuccacagggaagauuugcaacaauccgcacagaauccuggacggaaucgauuguacccucauugacgcccugcugggcgauccccauugcgacguguuucagaacgagacgugggaucucuucgucgaacggucuaaagccuuuagcaauuguuauccuuacgacgugcccgauuaugcuucccugcgcucucuuguugccagcuccgggacccuggaguucaucacagaaggauuuaccuggacaggcgugacccagaacggcgggagcaaugcuugcaagagaggaccuggcucuggguucuuuucccggcucaacuggcugacgaaaagcggaucuacauaccccguccuuaaugugaccaugccuaacaaugacaacuucgauaagcuguauauuuggggcauccaccauccguccacaaaucaagagcagaccagccucuacguucaggccucugggcgcgugaccgucuccacaagacggagccagcaaacgauuauccccaacauuggaucccgcccuugggugagaggccugucuagccggaucuccaucuauuggaccauugugaagcccggcgacguccugguuaucaacagcaaugggaaccucauugcgccucgcggauacuuuaaaaugagaacaggcaagucuuccaucaugcggagcgacgcccccauugauaccuguaucucugagugcaucacaccgaaugggagcauuccuaacgacaaacccuuccagaaugugaacaagaucaccuacggagcuuguccuaaauaugugaagcagaauacgcugaaacuugccacaggcaugcgcaacguccccgaaaagcagaccagagggcuguuuggagcuauugccggcuucaucgagaauggcugggaagggaugauugauggaugguacggcuuucggcaccaaaacuccgaggggaccggacaggcggccgaccucaagucuacacaggcugccaucgaucaaaucaauggcaaacugaaccgcgugauugagaagaccaaugaaaaauuccaccagaucgagaaggaguucagcgaaguugaagggcggauucaggaccuugagaaauauguggaggauacaaagaucgaccugugguccuacaacgcugaacuccuggucgcccuggagaaucagcauacgauugaucucaccgacagcgaaaugaacaagcuguuugagaaaacaagaagacaacuucgcgaaaacgccgaggauaugggcaauggaugcuucaagaucuaucacaaaugugacaacgcuugcauugagucuauccggaauggcaccuacgaccaugauguguauagagacgaagcgcugaacaaucgcuuucagaucaaggggguugagcucaaauccggauacaaggauuggauucuguggaucagcuucgccauuucuugcuuucuucugugugugguccuccugggcuucaucaugugggcuugccagcgggggaacauuagauguaauaucugcaucuga

SEQ ID NO: 202234 - RNA, 1701 nt, Artificial Sequence
  derived and/or modified CDS sequence (opt5) from hemagglutinin__InfluenzaA__AGQ47918
augaagaccaucauugcccugagcuacaucuucugccucgcucugggccaggaccuucccgggaacgauaauaacacagccacgcugugucucggacaccaugcggugccuaauggcacccuggucaaaacaauuaccgacgaucaaaucgagguuacaaacgcuaccgaacuugugcaguccucuagcacagggaagauuugcaauaacccgcacagaauccuggacggaaucgauuguacccucauugacgcccugcugggcgauccccauugcgacguguuucagaaugagacgugggaucucuucgucgaacgguccaaagccuuuucuaacuguuauccuuacgacgugcccgauuaugcuagccugcgcucccuuguugccucuagcgggacccuggaguucaucacagaaggauuuaccuggacaggcgugacccagaauggcggguccaacgcuugcaagagaggaccuggcagcggguucuuuucucggcucaauuggcugacgaaauccggaagcacauaccccguccuuaacgugaccaugccuaauaacgacaauuucgauaagcuguauauuuggggcguucaccauccgucuacaaaccaagagcagaccucccucuacgugcaggccagcgggcgcgucaccgugucuacaagacggucccagcaaacgaucauucccaacaucggaagccgcccuugggugagaggccuguccucucggauuagcaucuauuggaccaucgucaagcccggcgacguucuggugauuaauuccaacgggaaucucaucgcgccucgcggauacuuuaaaaugagaacaggcaagagcucuauuaugcgguccgacgcccccaucgauaccuguauuagcgagugcaucacaccgaacgggucuaucccuaaugacaaacccuuccagaacgugaauaagauuaccuacggagcuuguccuaaauaugucaagcagaacacgcugaaacuugccacaggcaugcgcaaugugcccgaaaagcagaccagagggcuguuuggagcuaucgccggcuucauugagaacggcugggaagggaugaucgauggaugguacggcuuucggcaccaaaauagcgaggggaccggacaggcggccgaccucaaguccacacaggcugccauugaucaaaucaacggcaaacugaaucgcguuaucgagaagaccaacgaaaaauuccaccagauugagaaggaguucucugaaguggaagggagaauccaggaccuugagaaauaugucgaggauacaaagauugaccuguggagcuacaaugcugaacuccugguggcccuggagaaccagcauacgaucgaucucaccgacuccgaaaugaacaagcuguuugagaaaacacggagacaacuucgcgaaaaugccgaggauaugggcaacggaugcuucaagauuuaucacaaaugugacaaugcuugcaucgagagcauucggaacggcaccuacgaccaugauguuuauagagacgaagcgcugaauaaccgcuuucagaucaaggggguggagcucaaaucuggauacaaggauuggauccuguggauuuccuucgccaucagcugcuuucuucugugugucgugcuccugggcuucauuaugugggcuugccagcgggggaauaucagauguaacauuugcaucuga

SEQ ID NO: 202235 - RNA, 1701 nt, Artificial Sequence
  derived and/or modified CDS sequence (opt5) from hemagglutinin__InfluenzaA__AGQ47930
augaaggccaaccugcucgugcugcuuugcgcucuggccgcggcugacgccgauaccaucuguauuggcuaccacgccaauaacagcacagacacggucgauaccgcucucgagaaaaauguuacagugacccauuccgugaaccugcuugaagacucucacaaugggaagcugugcagacucaaaggaaucgcuccccugcagcugggcaaguguaacauugccggguggcuccugggaaauccugagugcgauccgcuucugcccguccggagcugguccuauaucguggaaacaccuaacucugagaauggcauuuguuaccccggggacuucaucgauuaugaagaacuccgcgagcaacugagcuccguuucuagcuuugaaagauucgagaucuuuccuaaagaauccagcuggcccaaccauaauaccaacaagggagugacagccgcgugcucucacgccggcaaguccagcuucuaccggaaucuucuguggcucaccgagaaagagggcucuuauccuaagcugaaaaacuccuacgucaauaagaaagggaaggaagugcugguucucuggggcauucaucacccgagcaacucuaaggaccagcagaaccuguaucagaaugagaacgcuuacguguccgucgugacgagcaauuacaaccgcagauuuacccccgaaaucgccgagcggccuaaagugcgcgaucaagcuggaagaaugaauuauuacuggacacuucugaagcccggggacaccauuaucuucgaagccaacggaaaucucauugcgccuauguaugccuuugcucugucccggggcuucgggucuggaaucauuacaagcaacgccuccaugcacgaguguaauaccaaaugccagacgccccuuggcgcuaucaacagcucucugccguuucagaauauccauccugucacaauuggcgagugucccaaguacguucgcuccgccaaacucagaauggugaccgggcugcggaacaucccuagcauucagucucgcggacuguucggcgccaucgcuggguuuauugaaggaggcuggacagggaugaucgauggaugguauggcuaccaccaucaaaaugagcagggcagcggguaugcggccgaccagaaguccacccagaacgcuaucaauggaauuaccaacaaagugaacucugucaucgaaaagaugaauauucaauucacagccgugggcaaggaguuuaacaaacucgaaaagagaauggagaaucugaacaaaaagguugaugacggguuccuugacaucuggacguacaaugccgagcugcucgugcugcuugaaaacgagcggacccuggauuuccacgacagcaaugucaaaaaccucuacgaaaaggugaagucccagcugaaaaauaacgcuaaggagauuggaaauggcugcuuugaguucuaucacaaaugugauaacgagugcauggagagcguucgcaaugggacauacgacuaucccaaguacucugaagaguccaaacugaacagagaaaagguggauggcgucaagcucgagagcaugggaaucuaucagauccuggccauuuacucuaccguggcguccagccuuguccugcucgugucccugggcgcuaucucuuuuuggaugugcagcaaugggucccugcaaugucggauuugcaucuga

SEQ ID NO: 202236 - RNA, 1698 nt, Artificial Sequence; identical to SEQ ID NO: 195350
  derived and/or modified CDS sequence (opt5) from hemagglutinin__InfluenzaA__AGQ47942

SEQ ID NO: 202237 - RNA, 1698 nt, Artificial Sequence
  derived and/or modified CDS sequence (opt5) from hemagglutinin__InfluenzaA__AGQ47954
augaaggccaaccugcucgugcugcuuugcgcucuggccgcggcugacgccgauaccaucuguauuggcuaccacgccaauaacagcacagacacggucgauaccguucucgagaaaaaugugacagugacccauuccgucaaccugcuugaagacucucacaaugggaagcugugcagacucaaaggaaucgcuccccugcagcugggcaaguguaacauugccggguggcuccugggaaauccugagugcgauccgcuucugcccgugcggagcugguccuauaucguugaaacaccuaacucugagaauggcauuuguuaccccggggacuucaucgauuaugaagaacuccgcgagcaacugagcuccgugucuagcuuugaaagauucgagaucuuuccuaaagaauccagcuggcccaaccauaauaccaacggagucacagcugccugcucucacgagggcaaguccagcuucuaccggaaucuucuguggcucaccgagaaggaaggcucuuauccuaaacugaagaacuccuacgugaauaaaaaggggaaagagguucuggugcucuggggcauucaucacccgcccaacagcaaggaacagcagaaccuguaucgcaaugagaacgcguacgucucuguggugacguccaauuacaacagacgguuuaccccugaaaucgccgagcgccccaaggucagagaccaggcuggacggaugaauuauuacuggacacuucugaaaccuggggauaccauuaucuucgaggccaacggaaaucucauugcucccauguaugccuuugcgcugagccgcggcuucggguccggaaucauuacaucuaacgccagcaugcacgaauguaauaccaagugccaaacgccgcuuggcgcuaucaacuccagccugccuuaccagaauauccaucccguuacaauuggcgaguguccuaaauaugugagaucugccaagcuccggauggugaccgggcugcgcaacauccccuccauucagagcagaggacuguuuggcgcuaucgccggguucauugaaggaggcuggacagggaugaucgacggaugguacggcuaucaccaucagaaugagcaaggcucuggguacgccgcugaucagaaaagcacccagaacgcgaucaauggaauuaccaacaaggucaacacagugaucgagaaaaugaauauucaguuuacggccguuggcaaggaguucaacaagcucgagaaacggauggaaaaucugaacaagaaaguggacgauggguuucuugacaucuggaccuacaaugcugagcugcucguccugcuugaaaacgagcgcacacuggacuuccacgauuccaaugugaagaaccucuaugaaaaaguuaagucucaacugaagaauaacgccaaagagauuggaaauggcugcuucgaguuuuaccacaagugugacaacgaaugcauggagagcgugagaaaugggaccuaugauuaccccaaauauuccgaagagagcaagcugaaccgggagaaagucgacggcgugaagcucgaaucuaugggaaucuaccagauccuggccauuuauuccacagucgcuagcucucuugugcugcucguuucccugggcgccaucagcuucuggaugugcuccaaugggucucugcaguguagaauuugcaucuga

SEQ ID NO: 202238 - RNA, 1698 nt, Artificial Sequence
  derived and/or modified CDS sequence (opt5) from hemagglutinin__InfluenzaA__AGQ47966
augaaggccaaccugcucgugcugcuuugcgcucuggccgcggcugacgccgauaccaucuguauuggcuaccacgccaauaacagcacagacacggucgauaccguucucgagaaaaaugugacagugacccauuccgucaaccugcuugaagacucucacaaugggaagcugugcagacucaaaggaaucgcuccccugcagcugggcaaguguaacauugccggguggcuccugggaaauccugagugcgauccgcuucugcccgugggcagcugguccuauaucguugaaacaccuaacucugagaaugggauuuguuaccccggagacuucaucgauuaugaggaacuccgggagcaacugagcuccgugucuagcuuugaacgcuucgagaucuuuccuaaagaauccagcuggcccgaccauaacaccaauggcgucacagcugccugcucucacgagggcaagaacuccuucuacagaaaucuucuguggcucaccgagaaggaaagcucuuauccuaaacugaagaacuccuacgugaauaaaaaggggaaagagguucuggugcucuggggcauucaucacccgcccaacagcaaggaacagcagaaccuguaucagaaugagaacgcguacgucucuguggugacguccaauuacaaccggcgcuuuaccccugaaaucgccgagagacccaaggucaaagaucaagcuggacggaugaauuauuacuggacacuucugaagccuggggacaccauuaucuucgaggccaacggaaaucucauugcucccauguaugccuuugcgcugagccgcggcuucggguccggaaucauuacaucuaacgccagcaugcacgaauguaauaccaaaugccagacgccgcuuggcgcuaucaacuccagccugccuuaccagaauauccaucccguuacaauuggcgaguguccuaaguaugugagaucugccaaacuccggauggugaccgggcugcgcaacauccccuccauucagagcagaggacuguuuggcgcuaucgccggguucauugaaggaggcuggacagggaugaucgauggaugguacggcuaucaccaucaaaaugagcagggcucuggguacgccgcugaccaaaagagcacccagaacgcgaucaauggaauuaccaacaaagucaacacagugaucgaaaagaugaauauucaguuuacggccguuggcaaggaguucaacaaacucgagaagcggauggaaaaucugaacaaaaagguggaugacggguuucuugacaucuggaccuacaaugcugagcugcucguccugcuugaaaacgagcgcacacuggauuuccacgacuccaaugugaaaaaccucuaugaaaagguuaagucucagcugaaaaauaacgccaaggagauuggaaauggcugcuucgaguuuuaccacaaaugugauaacgaaugcauggagagcgugagaaaugggaccuaugacuaccccaaguauuccgaagagagcaaacugaaccgggagaaggucgauggcgugaagcucgaaucuaugggaaucuaccagauccuggccauuuauuccacagucgcuagcucucuugugcugcucguuucccugggcgccaucagcuucuggaugugcuccaaugggucucugcaaugucgcauuugcaucuga

SEQ ID NO: 202239 - RNA, 1698 nt, Artificial Sequence
  derived and/or modified CDS sequence (opt5) from hemagglutinin__InfluenzaA__AGQ47978
augaaggccaaccugcucgugcugcuuugcgcucuggccgcggcugacgccgauaccaucuguauuggcuaccacgccaauaacagcacagacacggucgauaccguucucgagaaaaaugugacagugacccauuccgucaaccugcuugaagacucucacaaugggaagcugugcagacucaaaggaaucgcuccccugcagcugggcaaguguaacauugccggguggcuccugggaaauccugagugcgauccgcuucugcccgugggcagcugguccuauaucguugaaacaccuaacucugagaaugggauuuguuaccccggagacuucaucgauuaugaggaacuccgggagcaacugagcuccgugucuagcuuugaacgcuucgagaucuuuccuaaagaauccagcuggcccgaccauaacaccaauggcgucacagcugccugcucucacgagggcaagaacuccuucuacagaaaucuucuguggcucaccaagaaagagagcucuuauccugaacugaagaacuccuacgugaauaaaaaggggaaagagguucuggugcucuggggcauucaucacccgcccaacagcaaggaacagcagaaccuguaucagaaugagaacgcguacgucucuguggugacguccaauuacaaccggcgcuuuaccccugaaaucgccgagagacccaaggucaaagaucaagcuggacggaugaauuauuacuggacacuucugaagccuggggacaccauuaucuucgaggccaacggaaaucucauugcucccauguaugccuuugcgcugagccgcggcuucggguccggaaucauuacaucuaacgccagcaugcacgaauguaauaccaaaugccagacgccgcuuggcgcuaucaacuccagccugccuuaccagaauauccaucccguuacaauuggcgaguguccuaaguaugugagaucugccaaacuccggauggugaccgggcugcgcaacauccccuccauucagagcagaggacuguuuggcgcuaucgccggguucauugaaggaggcuggacagggaugaucgauggaugguacggcuaucaccaucaaaaugagcagggcucuggguacgccgcugaccaaaagagcacccagaacgcgaucaauggaauuaccaacaaagucaacacagugaucgaaaagaugaauauucaguuuacggccguuggcaaggaguucaacaaacucgagaagcggauggaaaaucugaacaaaaagguggaugacggguuucuugacaucuggaccuacaaugcugagcugcucguccugcuugaaaacgagcgcacacuggauuuccacgacuccaaugugaaaaaccucuaugaaaagguuaagucucagcugaaaaauaacgccaaggagauuggaaauggcugcuucgaguuuuaccacaaaugugauaacgaaugcauggagagcgugagaaaugggaccuaugacuaccccaaguauuccgaagagagcaaacugaaccgggagaaggucgauggcgugaagcucgaaucuaugggaaucuaccagauccuggccauuuauuccacagucgcuagcucucuugugcugcucguuucccugggcgccaucagcuucuggaugugcuccaaugggucucugcaaugucgcauuugcaucuga

SEQ ID NO: 202240 - RNA, 1698 nt, Artificial Sequence
  derived and/or modified CDS sequence (opt5) from hemagglutinin__InfluenzaA__AGQ47990
augaaggccaaccugcucgugcugcuuugcgcucuggccgcggcugacgccgauaccaucuguauuggcuaccacgccaauaacagcacagacacggucgauaccguucucgagaaaaaugugacagugacccauuccgucaaccugcuugaagacucucacaaugggaagcugugcagacucaaaggaaucgcuccccugcagcugggcaaguguaacauugccggguggcuccugggaaauccugagugcgauccgcuucugcccgugggcagcugguccuauaucguugaaacaccuaacucugagaaugggauuuguuaccccggagacuucaucgauuaugaagaacuccgggagcaacugagcuccgugucuagcuuugaacgcuucaaaaucuuuccuaaggaguccagcuggcccgaccauaacaccaauggcgucacagcugccugcucucacgaaggcaagaacuccuucuacagaaaucuucuguggcucaccaaaaaggagagcucuuauccugagcugaaaaacuccuacgugaauaagaaagggaaggaaguucuggugcucuggggcauucaucacccgcccaacagcaaggagcagcagaaccuguaucagaaugaaaacgcguacgucucuguggugacguccaauuacaaccggcgcuuuaccccugagaucgccgaaagacccaaagucaaggaucaagcuggacggaugaauuauuacuggacacuucugaaaccuggggacaccauuaucuucgaggccaacggaaaucucauugcucccauguaugccuuugcgcugagccgcggcuucggguccggaaucauuacaucuaacgccagcaugcacgaguguaauaccaagugccagacgccgcuuggcgcuaucaacuccagccugccuuaccagaauauccaucccguuacaauuggcgaauguccuaaauaugugagaucugccaagcuccggauggugaccgggcugcgcaacauccccuccauucagagcagaggacuguuuggcgcuaucgccggguucauugagggaggcuggacagggaugaucgauggaugguacggcuaucaccaucaaaaugaacagggcucuggguacgccgcugaccagaaaagcacccagaacgcgaucaauggaauuaccaacaaggucaacacagugaucgagaagaugaauauucaauuuacggccguuggcaaagaguucaacaagcucgagaaacggauggagaaucugaacaagaaaguggaugacggguuucuugacaucuggaccuacaaugcugaacugcucguccugcuugagaacgaacgcacacuggauuuccacgacuccaaugugaagaaccucuaugagaagguuaaaucucagcugaagaauaacgccaaagaaauuggaaauggcugcuucgaguuuuaccacaagugugauaacgagugcauggaaagcgugagaaaugggaccuaugacuaccccaaauauuccgaggaaagcaagcugaaccgggagaaggucgauggcgugaaacucgagucuaugggaaucuaccagauccuggccauuuauuccacagucgcuagcucucuugugcugcucguuucccugggcgccaucagcuucuggaugugcuccaaugggucucugcaaugucgcauuugcaucuga

SEQ ID NO: 202241 - RNA, 1698 nt, Artificial Sequence
  derived and/or modified CDS sequence (opt5) from hemagglutinin__InfluenzaA__AGQ48002
augaaggccaaccugcucgugcugcuuugcgcucuggccgcggcugacgccgauaccaucuguauuggcuaccacgccaauaacagcacagacacggucgauaccguucucgagaaaaaugugacagugacccauuccgucaaccugcuugaagacucucacaaugggaagcugugcagacucaaaggaaucgcuccccugcagcugggcaaguguaacauugccggguggcuccugggaaauccugagugcgauccgcuucugcccgugggcagcugguccuauaucguugaaacaccuaacucugagaaugggauuuguuaccccggagacuucaucgauuaugaggagcuccgggagcaacugagcuccgugucuagcuuugaacgcuucaaaaucuuuccuaaggaguccagcuggcccgaccauaacaccaauggcgucacagcugccugcucucacgaaggcaagaacuccuucuacagaaaucuucuguggcucaccaaaaaggagagcucuuauccugagcugaaaaacuccuacgugaauaagaaacggaaggaaguucuggugcucugggggauucaucacccgcccaacagcaaggagcagcagaaccuguaucagaaugaaaacgcguacgucucuguggugacguccaauuacaaccgcagauuuaccccugagaucgccgaacggcccaaagucaaggaucaagcuggacgcaugaauuauuacuggacacuucugaaaccuggcgacaccauuaucuucgaggccaacgggaaucucauugcucccauguaugccuuugcgcugagcagaggauucggcuccgggaucauuacaucuaacgccagcaugcacgaguguaauaccaagugccagacgccgcuuggagcuaucaacuccagccugccuuaccagaauauccaucccguuacaauuggcgaauguccuaaauaugugcggucugccaagcuccgcauggugaccggccugagaaacauccccuccauucagagccgggggcuguuuggagcuaucgccggcuucauugaagggggauggacaggcaugaucgaugggugguacggauaucaccaucaaaaugaacagggcucuggcuacgccgcugaccagaaaagcacccagaacgcgaucaaugggauuaccaacaaggucaacacagugaucgagaagaugaauauucaauuuacggccguuggaaaagaguucaacaagcucgaaaaacgcauggagaaucugaacaagaaaguggaugacggcuuucuugacaucuggaccuacaaugcugaacugcucguccugcuugagaacgaaagaacacuggauuuccacgacuccaaugugaagaaccucuaugagaagguuaaaucucagcugaagaauaacgccaaagaaauugggaauggaugcuucgaguuuuaccacaagugugauaacgagugcauggaaagcgugcggaauggcaccuaugacuaccccaaauauuccgaggaaagcaagcugaaccgcgagaaggucgauggggugaaacucgagucuaugggcaucuaccagauccuggccauuuauuccacagucgcuagcucucuugugcugcucguuucccugggagccaucagcuucuggaugugcuccaauggcucucugcaauguagaauuugcaucuga

SEQ ID NO: 202242 - RNA, 1698 nt, Artificial Sequence
  derived and/or modified CDS sequence (opt5) from hemagglutinin__InfluenzaA__AGQ48014
augaaggccaaccugcucgugcugcuuugcgcucuggccgcggcugacgccgauaccaucuguauuggcuaccacgccaauaacagcacagacacggucgauaccguucucgagaaaaaugugacagugacccauuccgucaaccugcuugaagacucucacaaugggaagcugugcagacucaaaggaaucgcuccccugcagcugggcaaguguaacauugccggguggcuccugggaaauccuggcugcgauccgcuucugcccguggggagcugguccuauaucguugagacaccuaacucugaaaauggaauuuguuaccccggcgacuucaucgauuaugaggaacuccgggagcaacugagcuccgugucuagcuuugagcgcuucaaaaucuuuccuaaggaauccagcuggcccgaccauaacaccaauggcgucacagcugccugcucucacgaggggaagaacuccuucuacagaaaucuucuguggcucaccaaaaaggaaagcucuuauccugagcugaaaaacuccuacgugaauaagaaacggaaggagguucuggugcucuggggcauucaucacccgcccaacagcaaggaacagcagaaccuguaucagaaugagaacgcguacgucucuguggugacguccaauuacaaccgcagauuuaccccugaaaucgccgagcggcccaaagucaaggaucaagcuggacgcaugaauuauuacuggacacuucugaaaccuggggacaccauuaucuucgaagccaacggaaaucucauugcucccauguaugccuuugcgcugagcagaggcuucggguccggaaucauuacaucuaacgccagcaugcacgaguguaauaccaagugccagacgccgcuuggcgcuaucaacuccagccugccuuaccagaauauccaucccguuacaauuggcgaguguccuaaauaugugcggucugccaagcuccgcauggugaccgggcugagaaacauccccuccauucagagccggggacuguuuggcgcuaucgccggguucauugaaggaggcuggacagggaugaucgauggaugguacggcuaucaccaucaaaaugagcagggcucuggguacgccgcugaccagaaaagcacccagaacgcgaucaauggaauuaccaacaaggucaacacagugaucgaaaagaugaauauucaauuuacggccguuggcaaagaguucaacaagcucgaaaaacgcauggagaaucugaacaagaaaguggaugacggguuucuugacaucuggaccuacaaugcugagcugcucguccugcuugaaaacgagagaacacuggauuuccacgacuccaaugugaagaaccucuaugaaaagguuaaaucucagcugaagaauaacgccaaagagauuggaaauggcugcuucgaauuuuaccacaagugugauaacgagugcauggagagcgugcggaaugggaccuaugacuaccccaaauauuccgaagagagcaagcugaaccgcgaaaaggucgauggcgugaaacucgagucuaugggaaucuaccagauccuggccauuuauuccacagucgcuagcucucuugugcugcucguuucccugggcgccaucagcuucuggaugugcuccaaugggucucugcaauguagaauuugcaucuga

SEQ ID NO: 202243 - RNA, 1698 nt, Artificial Sequence
  derived and/or modified CDS sequence (opt5) from hemagglutinin__InfluenzaA__AGQ48026
augaaggccaaccugcucgugcugcuuugcgcucuggccgcggcugacgccgauaccaucuguauuggcuaccacgccaauaacagcacagacacggucgauaccguucucgagaaaaaugugacagugacccauuccgucaaccugcuugaagacucucacaaugggaagcugugcaaacucaagggaaucgcuccccugcagcugggcaaauguaacauugccggguggcuccugggaaauccuggcugcgauccgcuucugcccguggggagcugguccuauaucguugagacaccuaacucugaaaauggaauuuguuaccccggcgacuucaucgauuaugaggaacucagagagcaacugagcuccgugucuagcuuugagcgguucaagaucuuuccuaaggaauccagcuggcccgaccauaacaccaauggcgucacagcugccugcucucacgaggggaaaaacuccuucuaccgcaaucuucuguggcucaccaagaaagaaagcucuuauccugagcugaagaacuccuacgugaauaaaaagagaaaggagguucuggugcucuggggcauucaucacccgcccaacagcaaagaacagcagaaccuguaucagaaugagaacgcguacgucucuguggugacguccaauuacaaccggcgcuuuaccccugaaaucgccgagagacccaaggucaaagaucaagcuggacggaugaauuauuacuggacacuucugaagccuggggacaccauuaucuucgaagccaacggaaaucucauugcucccauguaugccuuugcgcugagccgcggcuucggguccggaaucauuacaucuaacgccagcaugcacgaguguaauaccaaaugccagacgccgcuuggcgcuaucaacuccagccugccuuaccagaauauccaucccguuacaauuggcgaguguccuaaguaugugagaucugccaaacuccggauggugaccgggcugcgcaacauccccuccauucagagcagaggacuguuuggcgcuaucgccggguucauugaaggaggcuggacagggaugaucgauggaugguacggcuaucaccaucaaaaugagcagggcucuggguacgccgcugaccagaaaagcacccagaacgcgaucaauggaauuaccaacaaggucaacacagugaucgaaaagaugaauauucaauuuacggccguuggcaaggaguucaacaaacucgaaaagcggauggagaaucugaacaaaaagguggaugacggguuucuugacaucuggaccuacaaugcugagcugcucguccugcuugaaaacgagcgcacacuggauuuccacgacuccaaugugaagaaccucuaugaaaaaguuaagucucagcugaaaaauaacgccaaggagauuggaaauggcugcuucgaauuuuaccacaaaugugauaacgagugcauggagagcgugagaaaugggaccuaugacuaccccaaguauuccgaagagagcaagcugaaccgggaaaaagucgauggcgugaagcucgagucuaugggaaucuaccagauccuggccauuuauuccacagucgcuagcucucuugugcugcucguuucccugggcgccaucagcuucuggaugugcuccaaugggucucugcaaugucgcauuugcaucuga

SEQ ID NO: 202244 - RNA, 1698 nt, Artificial Sequence
  derived and/or modified CDS sequence (opt5) from hemagglutinin__InfluenzaA__AGQ48038
augaaggccaaccugcucgugcugcuuugcgcucuggccgcggcugacgccgauaccaucuguauuggcuaccacgccaauaacagcacagacacggucgauaccguucucgagaaaaaugugacagugacccauuccgucaaccugcuugaagacucucacaaugggaagcugugcaaacucaagggaaucgcuccccugcagcugggcaaauguaacauugccggguggcuccugggaaauccuggcugcgauccgcuucugcccguggggagcugguccuauaucguugagacaccuaacucugaaaauggaauuuguuaccccggcgacuucaucgauuaugaggaacucagagagcaacugagcuccgugucuagcuuugagcgguucaagaucuuuccuaaggaauccagcuggcccgaccauaacaccaauggcgucacagcugccugcucucacgaggggaaaaacuccuucuaccgcaaucuucuguggcucaccaagaaagaaagcucuuauccugagcugaagaacuccuacgugaauaaaaagagagaggaaguucuggugcucuggggcauucaucacccgcccaacagcgaggaacagcagaaccuguaucagaaugagaacgcguacgucucuguggugacguccaauuacaaccggcgcuuuaccccugaaaucgccgagagacccaaggucaaaggacaagcugggcggaugaauuauuacuggacacuucugaagccuggagauaccauuaucuucgaggccaacggcaaucucauugcucccauguaugccuuugcgcugagccgcggguucggauccggcaucauuacaucuaacgccagcaugcacgaauguaauaccaaaugccagacgccgcuuggcgcuaucaacuccagccugccuuaccagaauauccaucccguuacaauuggggaguguccuaaguaugugagaucugccaaacuccggauggugaccggacugcgcaacauccccuccauucagagcagaggccuguuuggggcuaucgccggauucauugaaggcggguggacaggaaugaucgacggcugguacggcuaucaccaucaaaaugagcaggggucuggauacgccgcugaucaaaagagcacccagaacgcgaucaauggcauuaccaacaaagucaacacagugaucgaaaagaugaauauucaguuuacggccguugggaaggaguucaacaaacucgagaagcggauggaaaaucugaacaaaaagguggacgauggauuucuugacaucuggaccuacaaugcugagcugcucguccugcuugaaaacgagcgcacacuggacuuccacgauuccaaugugaaaaaccucuaugaaaagguuaagucucagcugaaaaauaacgccaaggagauuggcaaugggugcuucgaguuuuaccacaaaugugacaacgaaugcauggagagcgugagaaauggcaccuaugauuaccccaaguauuccgaagagagcaaacugaaccgggagaaggucgacggagugaagcucgaaucuaugggcaucuaccagauccuggccauuuauuccacagucgcuagcucucuugugcugcucguuucccugggggccaucagcuucuggaugugcuccaauggaucucugcaaugucgcauuugcaucuga

SEQ ID NO: 202245 - RNA, 1698 nt, Artificial Sequence
  derived and/or modified CDS sequence (opt5) from hemagglutinin__InfluenzaA__AGQ48050
augaaggccaaccugcucgugcugcuuugcgcucuggccgcggcugacgccgauaccaucuguauuggcuaccacgccaauaacagcacagacacggucgauaccguucucgagaaaaaugugacagugacccauuccgucaaccugcuugaagacucucacaaugggaagcugugcaaacucaagggaaucgcuccccugcagcugggcaaauguaacauugccggguggcuccugggaaauccuggcugcgauccgcuucugcccguggggagcugguccuauaucguugagacaccuaacucugaaaauggaauuuguuaccccggcgacuucaucgauuaugaggaacucagagagcaacugagcuccgugucuagcuuugagcgguucaagaucuuuccuaaggaauccagcuggcccgaccauaacaccaauggcgucacagcugccugcucucacgaggggaaaaacuccuucuaccgcaaucuucuguggcucaccaagaaagaaagcucuuauccugagcugaagaacuccuacgugaauaaaaagagagaggaaguucuggugcucuggggcauucaucacccgcccgauagcgaggaacagcagaaccuguaucagaacgagaaugcguacgucucuguggugacguccaacuacaaucggcgcuuuaccccugaaaucgccgagagacccaaggucaaaggacaagcugggcggaugaacuauuacuggacacuucugaagccuggagacaccauuaucuucaaagccaauggcaaccucauugcucccauguaugccuuugcgcugagccgcggguucggauccggcaucauuacaucuaaugccagcaugcacgaguguaacaccaagugccagacgccgcuuggcgcuaucaauuccagccugccuuaccagaacauccaucccguuacaauuggggaauguccuaaauaugugagaucugccaagcuccggauggugaccggacugcgcaauauccccuccauucagagcagaggccuguuuggggcuaucgccggauucauugagggcggguggacaggaaugaucgauggcugguacggcuaucaccaucaaaacgaacaggggucuggauacgccgcugaccagaaaagcacccagaaugcgaucaacggcauuaccaauaaggucaacacagugaucgagaagaugaacauucaauuuacggccguugggaaagaguucaauaagcucgaaaaacggauggagaaccugaauaagaaaguggaugacggauuucuugacaucuggaccuacaacgcugaacugcucguccugcuugagaaugaacgcacacuggauuuccacgacuccaacgugaagaaucucuaugagaagguuaaaucucagcugaagaacaaugccaaagaaauuggcaacgggugcuucgaguuuuaccacaagugugauaaugagugcauggaaagcgugagaaacggcaccuaugacuaccccaaauauuccgaggaaagcaagcugaaucgggagaaggucgauggagugaaacucgagucuaugggcaucuaccagauccuggccauuuauuccacagucgcuagcucucuugugcugcucguuucccugggggccaucagcuucuggaugugcuccaacggaucucugcaaugucgcauuugcaucuga

SEQ ID NO: 202246 - RNA, 1689 nt, Artificial Sequence
  derived and/or modified CDS sequence (opt5) from hemagglutinin__InfluenzaA__AGQ80946
auggccaucauuuaccugauccuccuguucaccgcugugagaggcgaccagauuugcaucggguaucacagcaacaauuccacagagaaggucgauacgauucuugaacggaacguuaccgugacacaugcccaagacauccuggagaaaacccacaauggaaagcucuguaaacugaacggcauucccccucuugaacugggggauugcucuaucgcgggauggcuccugggcaauccggagugugaccgccugcucacagugcccgaauggagcuacaucauggagaaggagaacccuagaaaugggcugugcuaucccggauccuuuaacgauuacgaagaacuuaaacaucugcucucuagcgucacccacuucgaaaaggugaagauucugccuaaagaccgguggacacagcauaccacgaccggcggcucccgcgcuugugccguuucugggaaucccagcuuuuucagaaacaugguguggcuuacaaagaaaggaccuaauuauccggucgccaagggcuccuacaacaauaccagcggggaucagaugcugaucauuuggggagugcaccaccccaacgacgaggcugagcagcggacacucuaucaaaauguuggcaccuacgugucugucgggacguccacacugaacaaacgcagcgugccugaaaucgccaccagacccaaggugaacggacagggcggccggauggaguuuucuuggacaauucuggauguccucgacaccaucaauuucgaauccaccgggaaccugaucgcuccugaguacggauuuaagauuagcaaacgcgggucuuccggcaucaugaagacagaaggaacgcuugagaauugcgagaccaaaugucagacaccccugggcgccauuaacaccacacucccguuccauaauauccacccucugaccauuggggaaugccccaaguauguuaaaagcgagagacuugugcuggcgacgggacuccggaacgugccucagaucgaaucccgcggccuguuuggcgccaucgcuggguucauugagggaggcuggcaagggauggucgauggaugguacggcuaucaucacucuaaugaccaggggagcggcuacgccgcugauaaggaauccacacagaaagccaucgacggaauuaccaacaaggugaauagcguuaucgagaagaugaacacccaguuugaggcggugggcaaagaguucucuaaucuggagaagagacucgaaaaccugaauaaaaagauggaggacggguuucuugaugucuggacauauaacgccgaacugcucgugcugauggagaaugagcggacccuugacuuccacgauuccaacguuaaaaaccuguacgacaaggugcgcaugcaacucagagauaaugcuaaggaacugggaaacggcuguuucgaguuuuaucauaaaugcgacgaugaauguaugaauagcgucaagaacgggacauacgacuaccccaaauaugaggaggaaucuaagcugaaucggaacgagauuaaaggagugaagcucagcaauaugggcgucuaccagauccuggccaucuaugcuacgguggccgggucccuuucucuggccauuaugaucgcuggcauuagccucuggaugugcuccaacggaagccugcagugcagaaucuguauuuga

SEQ ID NO: 202247 - RNA, 1689 nt, Artificial Sequence
  derived and/or modified CDS sequence (opt5) from hemagglutinin__InfluenzaA__AGQ80947
auggccaucauuuaccugauccuccuguucgcuaccgugagaggcgaccagauuugcaucggguaucacagcaacaauuccacagagaaggucgauacgauucuugaacggaacaucaccguuacacaugcccaagacauccuggagaaaacccacaauggaaagcucuguaaacugaacggcauucccccucuugaacuggggaauugcucuaucgcgggauggcuccugggcaacccggagugugaucgccugcucacagugcccgaauggagcuacauuauggagaaggagaauccuagagacgggcugugcuaucccggauccuuuaacgauuacgaagaacuuaaacaucugcucucuagcgugacccacuucgaaaaggucaagauccugccuaaagaccgguggacacagcauaccacgaccggcggcucccgcgcuugugccgugucugggaaucccagcuuuuucagaaacaugguuuggcuuacaaagaaaggauccaauuauccuauugccaagggcagcuacaacaauaccucuggggagcagaugcugaucauuuggggagugcaccacccgaacgaugacgcugagcagcggacacucuaucaaaaugucggcaccuacguguccguugggacgagcacacugaacaaacgcucuauccccgaaaucgccaccagaccuaaggugaacggacagggcggccggauggaguuuuccuggacaauucuggauaugcucgacaccaucaauuucgaaagcaccgggaaccugauugcucccgaguacggauuuaagaucucuaaacgcggcuccagcgggauuaugaagacagaaggaacgcuugagaauugcgagaccaaaugucagacaccucugggcgccaucaacaccacacuccccuuccauaauauccacccgcugaccauuggggaaugcccuaaguaugucaaauccgagagacuugugcuggcgacgggacuccggaacgugccccagaucgaaucucgcggccuguuuggcgccauugcuggguucaucgagggaggcuggcaagggauggucgauggaugguacggcuaucaucacagcaaugaccagggguccggcuacgccgcugauaaggaaagcacacagaaagccauugacggaaucaccaacaagguuaauucugugaucgagaagaugaacacccaguuugaggcggugggcaaagaguucaauaaccuggagaagagacucgaaaaucugaacaaaaagauggaggacggguuucuugaugucuggacauauaaugccgaacugcucgugcugauggagaacgagcggacccuugacuuccacgauuccaacguuaaaaaucuguacgacaaggugcgcaugcaacucaaggauaacgcuaaagaacugggaaauggcuguuucgaguuuuaucauaagugcgacgaugaauguaugaacagcgucaaaaaugggacauacgacuacccuaaguaugaggaggaaucuaaacugaacagaaaugagauuaagggagugaagcucagcaacaugggcguuuaccagauccuggccauuuaugcuacgguggccgggucccuuucucuggccaucaugauugcuggcgucagccucuggaugugcuccaauggaagccugcagugccggaucuguauuuga

SEQ ID NO: 202248 - RNA, 1689 nt, Artificial Sequence
  derived and/or modified CDS sequence (opt5) from hemagglutinin__InfluenzaA__AGQ80948
auggccaucauuuaccugauccuccuguucgcugccgugagaggcgaccagauuugcaucggguaucacagcaacaauuccaccgagaaggucgauacaauucuugaacggaacguuacggugacccaugcgcaagacauccuggagaaaacacacaauggaaagcucuguaaacugaacggcauucccccucuugaacuggggaauugcucuaucgcuggauggcuccugggcaacccggagugugaucgccugcucaccgugcccgaauggagcuacaucauggagaaggagaauccuagaaacgggcugugcuaucccggauccuuuaaugacuacgaggaacuuaaacaucugcucucuagcgucacacacuucgaaaaggugaagauucugccuaaagaucgguggacccagcauacaaccacgggcggcucccgcgccugugccguuuuugggaaccccucuuucuuuagaaauaugguguggcuuaccaagaaaggaagcaacuauccuaucgcuaagggcuccuacaauaacacaagcggggagcagaugcugauuaucuggggaguccaccacccgaaugacgaugccgagcagcggacccucuaucaaaacgugggcacauacguuucuguggggaccuccacgcugaacaaacgcagcauucccgaaaucgcuacaagaccuaaggucaauggacagggcggccggauggaguucucuuggaccauccuggacaugcucgauacaauuaacuuugaauccaccgggaaucugaucgcccccgaguacggauucaagauuagcaaacgcgggucuuccggcaucaugaagaccgaaggaacacuugagaacugcgagacgaaaugucagaccccucugggcgcgauuaauacaacccuccccuuucauaacauccacccgcugacaaucggggaaugcccuaaguaugugaaaagcgagagacuugugcuggccaccggacuccggaaugucccccagauugaaucccgcggccuguucggcgcuaucgccggguuuauugagggaggcuggcaagggaugguugacggaugguacggcuaucaucacucuaacgaucaggggagcggcuacgcugccgacaaggaauccacgcagaaagcgaucgauggaauuacaaauaaggugaacagcgugaucgagaagaugaauacccaguucgaggccgucggcaaagaauuuaacaaucuggagaagagacucgaaaaccugaauaaaaagauggaggacggguuccuugacguguggaccuauaacgcugaacugcucguucugauggagaacgagcggacacuugauuuccacgacucuaaugugaaaaaccuguacgauaagauccgcaugcaacucaaggacaaugccaaagaacugggaaacggcuguuuugaguucuaucauaagugcgaugacgaauguaugaacuccgucaaaaaugggaccuacgauuacccuaaguaugaggaggaaagcaaacugaauagaaacgagauuaagggagugaagcucucuaauaugggcguuuaccagauccuggcuauuuaugccacaguggccgggagccuuucccuggcuaucaugauugcgggcaucucucucuggaugugcagcaacggaucccugcagugccggauuuguaucuga

SEQ ID NO: 202249 - RNA, 1689 nt, Artificial Sequence
  derived and/or modified CDS sequence (opt5) from hemagglutinin__InfluenzaA__AGQ80949
auggccaucauuuaccugauccuccuguucgcugccgugagaggcgaccagauuugcaucggguaucacagcaacaauuccaccgagaaggucgauacaauucuugaacggaacguuacggugacccaugcgcaagacauccuggagaaaacacacaauggaaagcucuguaaacugaacggcauucccccucuugaacugggggauugcucuaucgcuggauggcuccugggcaauccggagugugaccgccugcucaccgugcccgaauggagcuacaucauggagaaggagaacccuagaaaugggcugugcuaucccggauccuuuaacgauuacgaagaacuuaaacaucugcucucuagcgucacacacuucgaaaaggugaagauucugccuaaagaccgguggacccagcauacaaccacgggcggcucccgcgccugugccguuucugggaaucccagcuuuuucagaaacaugguguggcuuaccaagaaaggauccaauuauccuaucgcuaagggcagcuacaacaauacaucuggggagcagaugcugauuaucuggggaguccaccacccgaacgaugacgccgagcagcggacccucuaucaaaaugugggcacauacguuuccguggggaccagcacgcugaacaaacgcucuauucccgaaaucgcuacaagaccuaaggucaacggacagggcggccggauggaguuuuccuggaccauccuggauaugcucgacacaauuaauuucgaaagcaccgggaaccugaucgcccccgaguacggauuuaagauuucuaaacgcggcuccagcgggaucaugaagaccgaaggaacacuugagaauugcgagacgaaaugucagaccccucugggcgcgauuaacacaacccuccccuuccauaauauccacccgcugacaaucggggaaugcccuaaguaugugaaauccgagagacuugugcuggccaccggacuccggaacgucccccagauugaaucucgcggccuguuuggcgcuaucgccggguucauugagggaggcuggcaagggaugguugauggaugguacggcuaucaucacagcaaugaccagggguccggcuacgcugccgauaaggaaagcacgcagaaagcgaucgacggaauuacaaacaaggucaauucugugaucgagaagaugaacacccaguuugaggccgugggcaaagaguucaauaaccuggagaagagacucgaaaaucugaacaaaaagauggaggacggguuucuugauguguggaccuauaaugcugaacugcucguucugauggagaacgagcggacacuugacuuccacgauuccaacgugaaaaaucuguacgacaagauccgcaugcaacucaaggauaacgccaaagaacugggaaauggcuguuucgaguuuuaucauaagugcgacgaugaauguaugaacagcgucaaaaaugggaccuacgacuacccuaaguaugaggaggaaucuaaacugaacagaaaugagauuaagggagugaagcucagcaacaugggcguuuaccagauccuggcuauuuaugccacaguggccgggucccuuucucuggcuaucaugauugcgggcaucagccucuggaugugcuccaauggaagccugcagugccggauuuguaucuga

SEQ ID NO: 202250 - RNA, 1701 nt, Artificial Sequence
  derived and/or modified CDS sequence (opt5) from hemagglutinin__InfluenzaA__AGQ80950
augaagaccaucauugcccugagcuacaucuucugccucgcuuuuggccagaaccugcccgggaaugacuccucuacagccacgcuuugucugggacaccaugcggugcucaacggcaccauugucaaaacaaucaccgaugaccaaauugagguuacaaaugcuaccgaacuggugcagagcuccucuacagggaagaucugcaacaauccucacaaaauccuugauggaagagacuguacccugauugaugcccuccugggcgacccgcauugcgauguguuccaggacgagacgugggaucuguuugucgaacggagcuccgccuucucuaacuguuaucccuacgacgugccugauuaugcuagccuccgcucccugguugccagcucugggacccuugaguuuaucacagaaggauucaccuggacaggcgugucccagaauggcgggagcggagcuugcaagagaggccccgccaacggguuuuucucucggcugaauuggcucaccaaauccggaaacgcguacccuguccugaaugugacgaugcccaacagcgacaauuuugauaaacuuuauauuuggggcguucaccauccuucuacaaaccaagagcagaccaaucuguacgugcaggccuccgggcgcgucacagugagcaccagacggucccagcaaaccaucauuccgaacaucggaucucgccccugggugagaggccagagcggccggauuuccaucuauuggacaaucgucaagccuggggacguucucgugauuaacagcaauggaaaccugaucgcuccccgcggcuacuucaaaaugagaacggggaagucuuccauuaugcggagcgacgccccuaucgagaccuguauuucugaaugcaucacacccaauggaagcaucccgaacgauaaaccuuuucagaaugugaacaagauuaccuacggcgcuugucccaaauaugucaagcagaauacacugaagcucgccaccgggaugcgcaacgugccugagaaacaaacgagaggacuguucggcgcgaucgccggcuuuauugaaaaugggugggagggaaugaucgacggcugguacggguuccggcaccagaacuccgagggaacaggccaggcugccgaucuuaagucuacccaagcugccauugaccagaucaaugggaaacugaaccgcguuaucgaaaagaccaaugagaaauuccaccagauugaaaaggaguuuagcgaaguggagggcagaauccaggaucucgagaaauaugucgaagacacaaagauugaucugugguccuacaacgccgagcuucugguggcucucgaaaaucaacauaccaucgaccugacagauagcgagaugaacaagcuguucgaaaagacgcggagacagcuccgcgagaacgcggaggacaugggaaauggcugcuuuaagauuuaucacaaaugugauaacgccugcaucgaaucuauucggaaugggaccuacgaccaugacaucuauagagaugaggcucugaacaaucgcuuccagaucaagggaguugaacuuaaauccggcuacaaggacuggauucuguggaucagcuuugccauuucuugcuuccuccugugugugguccuucugggguuuaucaugugggccugccagcggggaaacauuagauguaauaucugcaucuga

SEQ ID NO: 202251 - RNA, 1695 nt, Artificial Sequence
  derived and/or modified CDS sequence (opt5) from hemagglutinin__InfluenzaA__AGQ80951
augcugagcaucgugauucucuuccugcuugucgccgaguccucuagccagaacuacaccggcaaucccguuaucugcauggggcaccaugcuguggccaacggaacaauggugaagacgcugaccgacgaucaagucgaagugguuacagcgcaggagcucguggaaucccagaaucugccugagcuuuguccgucuccccugagacucgucgacggccagaccugcgauauuaucaacggggcucugggaagcccuggcugugaccaccugaauggggccgaaugggauauuuuuaucgagcggcccaacgccauggacacaugcuauccuuucgaugugcccgacuaccaaucccuccgcucuauccuggcuaauaacggaaaauuugaguucauugccgaagaguuucaguggagcaccguuaagcagaauggcaaauccggcgcuuguaagagagccaacgugaaugauuucuuuaaccggcuuaauuggcuggucaaaagcgacgggaacgcguauccucuccagaaucugacaaaggugaacaacggagauuacgcccgccuuuauaucuggggcgugcaucacccgucuaccgacacggaacaaaccaaucuguacaagaacaaucccgggagagucacaguuuccaccaaaacaagccagaccucuguggugccuaacauuggaucccggcccuggguccgcggccagagcgggagaaucucuuucuauuggacgauuguggagccuggagaucucaucguuuuuaauacaauuggcaaccugaucgcuccccggggccauuacaagcucaauucccagaaaaagagcaccauccugaacacagccaccccgauuggguccugcgugucuaaaugucacaccgacaagggaagccuguccacaacgaagccuuuccaaaauaucagccgcgucgcuauuggcgacugccccaaauacgugaagcaggggucucuuaaacuggccaccggaaugagaaacaucccugagaaggcgucccggggccucuuuggggccauugcuggauucaucgaaaauggcuggcagggccugaucgaugggugguauggauuucgccaccaaaacgccgagggcacagggaccgcugccgaccuuaaaagcacacaggccgcuauugaucagaucaauggaaagcugaacagacucauugagaaaaccaaugaaaaguaccaucagaucgaaaaggaguucgagcaaguugaaggccggauucaggaccuggagaaauauguggaagauacgaagaucgaccuguggucuuacaacgcggagcuccuggucgcccuugaaaaccagcacacaaucgaugugaccgacagcgagaugaauaaacuguucgagcgcgucagacggcagcucagagaaaacgcugaggauaaggggaauggcuguuuugaaauuuuccauaaaugcgacaacaauuguaucgaguccauucgcaacggaaccuaugaucacgacguguaccggaaugaagccaucaacaauagauuucaaauucagggcguuaagcugacacagggguauaaggacaucauucuuuggaucucuuucagcaucuccugcuuucugcucguggcccugcugcucgcuuucauucugugggccugccagaacggaaauauccgcugucaaauuugcaucuga

SEQ ID NO: 202252 - RNA, 1683 nt, Artificial Sequence
  derived and/or modified CDS sequence (opt5) from hemagglutinin__InfluenzaA__AGQ80953
augaacacccagauccugguguucgcccucgucgcuauuauccccacaaaugccgacaagauuugccugggccaccaugcgguuagcaacgggacgaaagugaauacccuuacagagagaggaguggaagucgugaacgcuaccgagacaguugaacggaccuccaucccucgcauuuguucuaagggcaaaagagccguggaucuggggcaaugcggacuccugggcacaaucaccgggccgccccagugugaccaguuucuugaguucagcgccgaucugaucauugaacggcgcgagggauccgacgucugcuacccuggcaaguuugugaaugaggaagcucucagacagauccugcgggagucuggcgggauugauaaagaaacgaugggauucaccuauagcggcauccgcacaaacggggccaccuccgcuuguagacggucuggaagcuccuuuuacgccgagaugaaguggcugcucagcaauacagacaacgcggccuucccccaaaccacgaagucuuauaaaaauacacgcaaggauccugcucugauuaucuggggcauucaccauuccgggagcaccacagagcagaccaaacuuuacggaucuggcaacaagcugaucaccguuggcuccagcaauuaucagcagucuuuugugcccuccccuggggccagaccgcaagucaacggacagagcggccggaucgacuuccacuggcucaugcugaaucccaacgauacagugacguuuuccuucaauggggcuuuuauugccccugaccgcgcgucuuuccuuagaggaaaaagcaugggcauccaguccggggugcaggucgaugccaacugcgaaggagacuguuaccauaacggcggcaccauuaucagcaaucugcccuuucaaaacauuaauucucgggcuguugggaagugcccucgcuaugugaagcaggagucccuccugcuggccacaggaaugaaaaacgugcccgaaaucccgaagggcagagggcuuuucggagcuaucgccggcuucauugagaaugggugggaaggccugaucgauggaugguacggcuuucggcaccagaacgcccaaggggagggaaccgcugcggacuacaaaagcacacagucugccauugaccagaucaccggcaagcucaauagacugauugagaaaacgaaccagcaauucgaacucaucgauaaugaguuuacagaagucgagcgccagaucgggaacgugauuaauuggacccgggacagcaugaccgaaguuugguccuauaacgcugagcugcuuguggccauggagaaucagcacacaaucgaucuggccgacucugaaaugaacaagcucuacgagagaguccgccggcagcugagagaaaaugcugaggaagauggaaccggcuguuucgagauuuuucauaaaugcgacgaugacuguauggccagcauccgcaacaacacauaugaucacuccaaguaccgggaggaagcgaugcaaaaucgcauucagaucgacccugugaagcugagcucuggguauaaagauguuauucucugguucuccuuuggcgcuagcugcuucauccugcuugccaucgccaugggacugguguuuauuugcgucaagaacggcaauaugagauguacgaucugcauuuga

SEQ ID NO: 202253 - RNA, 1683 nt, Artificial Sequence; identical to SEQ ID NO: 202252
  derived and/or modified CDS sequence (opt5) from hemagglutinin__InfluenzaA__AGQ80954

SEQ ID NO: 202254 - RNA, 1683 nt, Artificial Sequence; identical to SEQ ID NO: 202252
  derived and/or modified CDS sequence (opt5) from hemagglutinin__InfluenzaA__AGQ80955

SEQ ID NO: 202255 - RNA, 1683 nt, Artificial Sequence; identical to SEQ ID NO: 202252
  derived and/or modified CDS sequence (opt5) from hemagglutinin__InfluenzaA__AGQ80956

SEQ ID NO: 202256 - RNA, 1683 nt, Artificial Sequence; identical to SEQ ID NO: 202252
  derived and/or modified CDS sequence (opt5) from hemagglutinin__InfluenzaA__AGQ80957

SEQ ID NO: 202257 - RNA, 1683 nt, Artificial Sequence; identical to SEQ ID NO: 202252
  derived and/or modified CDS sequence (opt5) from hemagglutinin__InfluenzaA__AGQ80958

SEQ ID NO: 202258 - RNA, 1683 nt, Artificial Sequence
  derived and/or modified CDS sequence (opt5) from hemagglutinin__InfluenzaA__AGQ80959
augaacacccagauccugguguucgcccucauugcuaucauucccacaaaugccgacaagaucugccugggccaccaugcggucagcaacgggacgaaaguuaauacccuuacagagagaggaguggaaguggucaacgcuaccgagacaguggaacggaccaauauuccucgcaucuguuccaagggcaaaagaacaguugaucuggggcaaugcggacuccugggcaccaucacggggccgccccagugugaccaguuucuugaguucucugccgaucugauuaucgaacggcgcgagggaagcgacgugugcuacccuggcaaguuugucaacgaggaagcccucagacagauucugcgggaguccggcgggaucgauaaagaagcuaugggauucaccuauucuggcauucgcacaaauggggccaccagcgcuuguagacgguccggaucuagcuuuuacgccgagaugaaguggcugcucuccaacacagacaaugcggccuucccccaaaugaccaagagcuauaaaaacacgcgcaaggauccugcucugaucauuuggggcauccaccauucuggguccacagccgagcagaccaaacuuuacggaagcggcaauaagcuggugacaguugggucuuccaacuaucagcagagcuuugugcccucuccuggcgcuagaccgcaagucaauggacaguccggccggaucgacuuccacuggcucaugcugaaccccaaugauaccgugaccuuuagcuucaacggggccuuuauugcgccugaccgcgccuccuuccuuagaggaaaaucuaugggcauccagagcggggugcaggucgaugcuaacugcgaaggagacuguuaccauggcggcgggacaauuaucuccaaucugcccuuucaaaacauugauagccgggccguuggaaagugcccucgcuaugugaagcagaaaucucuccugcuggcuacgggcaugaagaaugugcccgaguccccgaaagggagaggacucuucggcgccaucgccggguucaucgaaaacggcugggagggacugauugacggcugguacggguuucggcaccagaaugcucaaggagaaggcaccgcggccgacuacaagagcacacagucugcuaucgaucagauuaccgggaaacuuaacagacugaucgagaagacaaaucagcaauucgagcucauugacaacgaauuuaccgaggucgaaaaacagaucggaaaugugaucaacuggacgcgcgauagcauuacagagguuugguccuauaaugccgaacugcuuguggccauggagaaccagcacaccaucgaccuggcugauucugagaugaauaagcucuacgaacgggucaagagacagcugcgcgagaacgccgaagaggacggcaccggguguuucgaaauuuuucauaaaugcgaugacgauuguauggcgagcauccggaauaacacauaugaccacuccaaguacagagaggaggcuaugcaaaaccgcauucagaucgauccugugaaacugagcucuggcuauaaggacguuauucucugguucuccuuuggagccagcugcuucauccugcuugccaucgcuaugggccugguguuuauuugcgucaaaaaugggaacaugcgguguaccaucugcauuuga

SEQ ID NO: 202259 - RNA, 1683 nt, Artificial Sequence
  derived and/or modified CDS sequence (opt5) from hemagglutinin__InfluenzaA__AGQ80961
augaacacccagauccugguguucgcccucgucgcuauuauccccacaaaugccgacaagauuugccugggccaccaugcgguuagcaacgggacgaaagugaauacccuuacagagagaggaguggaagucgugaacgcuaccgagacaguugaacggaccaaugugccuaagaucuguuccaaaggcaagcgcacagucgaucuggggcaaugcggacuccugggcaccauuacggggccgccccagugugaccaguuucuugaguucucugccgaucugaucaucgaaagacgggagggaagcgacgugugcuacccuggcaaauuuguuaacgaggaaacccuccgccagauucugagagaguccggcgggaucgauaaggaaacaaugggauucaccuauucuggcauucggacaaauggggccaccagcgcuugucgcagauccggaucuagcuuuuacgccgagaugaaguggcugcucuccaacacggacaaugcugccuucccccaaaugacaaaaagcuauaagaacgcgcggaaagauccugcccugaucauuuggggcauccaccauucuggguccaccacagagcagaccaaacuuuacggaagcggcaauaagcugauuaccguggggucuuccaacuaucagcagagcuuuguccccucuccuggcgcucgcccgcaagugaauggacaguccggcagaaucgacuuccacuggcucaugcugaaccccaaugauacagugacguuuagcuucaacggggccuuuaucgcuccugaccgggccugcuuccuucgcggaaaguccaugggcauucagucugggguccagguugaugcgagcugugaaggagacugcuaccauuccggcggcaccaucauuagcaaccugcccuuucaaaauaucaacucuagagccguggggaaguguccucgguaugugaaacaggagucccucaugcuggcuacaggaaugaagaauguccccgaaauuccgaaaggccgcgggcuguucggagccaucgcuggcuucaucgagaacgggugggaaggccucauugauggaugguacggcuuuagacaccagaaugcccaaggggagggaaccgccgcugacuacaagagcacacagucugcgaucgaccagauuaccggcaaacugaaccggcuuaucgagaagacgaaucagcaauucgaacugauugauaacgaguuuacagaaguggagaaacagaucgggaauguuaucaacuggaccagagacagcaugaccgaagugugguccuauaaugccgagcuccuggucgcuauggagaaccagcacacaauugaucuugccgacucugaaaugaauaagcuguacgagcgcgugaagcggcagcucagagaaaacgccgaggaagauggaaccggcugcuucgagaucuuucauaaaugugacgaugacugcauggcuagcauucgcaauaacacauaugaucacuccaaguaccgggaggaagccaugcaaaacagaaucaaaauugacccuguuaagcugagcucuggguauaaagaugugauccugugguucuccuuuggcgcgagcugcuucauucuccuggcuaucgccaugggacuugucuuuaucugugugaagaauggcaacaugcgcugcacgauuuguaucuga

SEQ ID NO: 202260 - RNA, 1683 nt, Artificial Sequence; identical to SEQ ID NO: 202259
  derived and/or modified CDS sequence (opt5) from hemagglutinin__InfluenzaA__AGQ80962

SEQ ID NO: 202261 - RNA, 1683 nt, Artificial Sequence
  derived and/or modified CDS sequence (opt5) from hemagglutinin__InfluenzaA__AGQ80964
augaacacccagauccugguguucgcccucauugcuaucauucccacaaaugccgacaagaucugccugggccaccaugcggucagcaacgggacgaaaguuaauacccuuacagagagaggaguggaaguggucaacgcuaccgagacaguggaacggaccaauauuccucgcaucuguuccaagggcaaaagaacaguugaucuggggcaaugcggacuccugggcaccaucacggggccgccccagugugaccaguuucuugaguucucugccgaucugauuaucgaacggcgcgagggaagcgacgugugcuacccuggcaaguuugucaacgaggaagcccucagacagauucugcgggaguccggcgggaucgauaaagaagcuaugggauucaccuauucuggcauucgcacaaauggggccaccagcgcuuguagacgguccggaucuagcuuuuacgccgagaugaaguggcugcucuccaacacagacaaugcggccuucccccaaaugaccaagagcuauaaaaacacgcgcaaggauccugcucugaucauuuggggcauccaccauucuggguccacagccgagcagaccaaacuuuacggaagcggcaauaagcuggugacaguugggucuuccaacuaucagcagagcuuugugcccucuccuggggcuagaccgcaagucaauggacaguccggccggaucgacuuccacuggcucaugcugaaccccaaugauaccgugaccuuuagcuucaacggggccuuuauugcgccugaccgcgccuccuuccuuagaggaaaaucuaugggcauccagagcggggugcaggucgaugcugacugcgaaggagauuguuaccauuccggcggcacaauuaucagcaaccugcccuuucaaaauauugacucucgggccguugggaagugcccucgcuaugugaagcagagaucccuccugcuggcuacgggaaugaaaaacgugcccgagaucccgaagggccggggccucuucggagccaucgccggcuucauugaaaaugggugggagggccugaucgacggaugguacggcuuuagacaccagaacgcucaaggggaaggaaccgcggccgauuacaaaagcacacagucugcuauugaccagaucaccggcaaacuuaaucgccugauugagaagacaaaccagcaauucgagcucaucgauaaugaauuuaccgaggucgaaaagcagaucgggaacgugauuaauuggacgcgggacagcaucacagagguuugguccuauaacgccgaacugcuuguggccauggagaaucagcacaccauugaucuggcugacucugagaugaacaaacucuacgaaagagucaagcgccagcugcgggagaaugccgaagaggauggaaccggcuguuucgaaaucuuucauaagugcgacgaugacuguauggcgagcauuagaaacaauacauaugaucacuccaaauaccgcgaggaggcuaugcaaaaccggauccagauugacccugugaagcugagcucuggguauaaagacguuauccucugguucuccuuuggcgccagcugcuucauccugcuugccauugcuaugggacugguguuuaucugcgucaagaacggcaauaugagauguaccauuugcaucuga

SEQ ID NO: 202262 - RNA, 1683 nt, Artificial Sequence; identical to SEQ ID NO: 202252
  derived and/or modified CDS sequence (opt5) from hemagglutinin__InfluenzaA__AGQ80965

SEQ ID NO: 202263 - RNA, 1683 nt, Artificial Sequence; identical to SEQ ID NO: 202252
  derived and/or modified CDS sequence (opt5) from hemagglutinin__InfluenzaA__AGQ80966

SEQ ID NO: 202264 - RNA, 1683 nt, Artificial Sequence; identical to SEQ ID NO: 202252
  derived and/or modified CDS sequence (opt5) from hemagglutinin__InfluenzaA__AGQ80968

SEQ ID NO: 202265 - RNA, 1683 nt, Artificial Sequence
  derived and/or modified CDS sequence (opt5) from hemagglutinin__InfluenzaA__AGQ80970
augaacacccagauccugguguucgcccucgucgcuauuauccccacaaaugccgacaagauuugccugggccaccaugcgguuagcaacgggacgaaagugaauacccuuacagagagaggaguggaagucgugaacgcuaccgagacaguugaacggaccuccaucccucgcauuuguucuaagggcaaaaaggccguggaucuggggcaaugcggacuccugggcacaaucaccgggccgccccagugugaccaguuucuugaguucagcgccgaucugaucauugaaagacgggagggauccgacgucugcuacccuggcaaauuugugaaugaggaagcucuccgccagauccugagagagucuggcgggauugauaaggaaacgaugggauucaccuauagcggcauccggacaaacggggccaccuccgcuugucgcagaucuggaagcuccuuuuacgccgagaugaaguggcugcucagcaauacagacaacgcggccuucccccaaaccacgaaaucuuauaagaauacacggaaagauccugcucugauuaucuggggcauucaccauuccgggagcaccacagagcagaccaagcucuacggaucuggcaacaaacugaucaccguuggcuccagcaauuaucagcagucuuuugugcccuccccuggggcccgcccgcaagucaacggacagagcggcagaaucgacuuccacuggcucaugcugaaucccaacgauacagugacguuuuccuucaauggggcuuuuauugccccugaccgggcgucuuuccuucgcggaaagagcaugggcauccaguccggggugcaggucgaugccaacugcgaaggagacuguuaccauaacggcggcaccauuaucagcaaucugcccuuucaaaacauuaauucuagagcuguugggaagugcccucgguaugugaaacaggagucccuccugcuggccacaggaaugaagaacgugcccgaaaucccgaaaggccgcgggcuuuucggagcuaucgccggcuucauugagaaugggugggaaggccugaucgauggaugguacggcuuuagacaccagaacgcccaaggggagggaaccgcugcggacuacaagagcacacagucugccauugaccagaucaccggcaaacuuaaucggcugauugagaagacgaaccagcaauucgaacucaucgauaaugaguuuacagaagucgagagacagaucgggaacgugauuaauuggacccgcgacagcaugaccgaaguuugguccuauaacgcugagcugcuuguggccauggagaaucagcacacaaucgaucuggccgacucugaaaugaacaaacucuacgagcgggucagacgccagcugcgggaaaaugcugaggaagauggaaccggcuguuucgagauuuuucauaagugcgacgaugacuguauggccagcaucagaaacaacacauaugaucacuccaaguaccgcgaggaagcgaugcaaaaucggauucagaucgacccugugaaacugagcucuggguauaaggauguuauucucugguucuccuuuggcgcuagcugcuucauccugcuugccaucgccaugggacugguguuuauuugcgucaaaaacggcaauaugagauguacgaucugcauuuga

SEQ ID NO: 202266 - RNA, 1683 nt, Artificial Sequence
  derived and/or modified CDS sequence (opt5) from hemagglutinin__InfluenzaA__AGQ80971
augaacacccagauccugguguucgcccucgucgcuauuauccccacaaaugccgacaagauuugccugggccaccaugcgguuagcaacgggacgaaagugaauacccuuacagagagaggaguggaagucgugaacgcuaccgagacaguugaacggaccuccaucccucgcauuuguucuaagggcaaaaagacaguggaucuggggcaaugcggacuccugggcaccaucacggggccgccccagugugaccaguuucuugaguucagcgccgaucugaucauugaaagacgggagggauccgacgucugcuacccuggcaaauuugugaaugaggaagcccuccgccagauccugagagagucuggcgggauugauaaggaaaccaugggauucacauauagcggcauccggaccaacggggcuacauccgccugucgcagaucuggaagcuccuuuuacgcugagaugaaguggcugcucagcaauaccgacaacgccgcguucccccaaacgacaaaaucuuauaagaauacccggaaagauccugcccugauuaucuggggcauucaccauuccgggagcacaaccgagcagaccaagcucuacggaucuggcaacaaacugaucacaguuggcuccagcaauuaucagcagucuuuugugcccuccccuggggcucgcccgcaagucaacggacagagcggcagaaucgacuuccacuggcucaugcugaaucccaacgauacggugaccuuuuccuucaauggggccuuuauugcuccugaccgggccucuuuccuucgcggaaagagcaugggcauccaguccggggugcaggucgaugcgaacugcgaaggagacuguuaccauaacggcggcacaauuaucagcaaucugcccuuucaaaacauuaauucuagagccguugggaagugcccucgguaugugaaacaggagucccuccugcuggcuaccggaaugaagaacgugcccgaaaucccgaaaggccgcgggcuuuucggagccaucgcuggcuucauugagaaugggugggaaggccugaucgauggaugguacggcuuuagacaccagaacgcccaaggggagggaacagccgcugacuacaagagcacccagucugcgauugaccagaucacgggcaaacuuaaucggcugauugagaagacaaaccagcaauucgaacucaucgauaaugaguuuaccgaagucgagagacagaucgggaacgugauuaauuggacccgcgacagcaugacagaaguuugguccuauaacgccgagcugcuuguggcuauggagaaucagcacaccaucgaucuggccgacucugaaaugaacaaacucuacgagcgggucagacgccagcugcgggaaaaugccgaggaagauggaacaggcuguuucgagauuuuucauaagugcgacgaugacuguauggcuagcaucagaaacaacacguaugaucacuccaaguaccgcgaggaagccaugcaaaaucggauucagaucgacccugugaaacugagcucuggguauaaggauguuauucucugguucuccuuuggcgcgagcugcuucauccugcuugcuaucgccaugggacugguguuuauuugcgucaaaaacggcaauaugagauguaccaucugcauuuga

SEQ ID NO: 202267 - RNA, 1683 nt, Artificial Sequence
  derived and/or modified CDS sequence (opt5) from hemagglutinin__InfluenzaA__AGQ80974
augaacacccagauccugguguucgcccucgucgcuauuauccccacaaaugccgacaagauuugccugggccaccaugcgguuagcaacgggacgaaagugaauacccuuacagagagaggaguggaagucgugaacgcuaccgagacaguugaacggaccuccaucccucgcauuuguucuaagggcaaaagagccguggaucuggggcaaugcggacuccugggcacaaucaccgggccgccccagugugaccaguuucuugaguucagcgccgaucugaucauugaacggcgcgagggauccgacgucugcuacccuggcaaguuugugaaugaggaagcucucagacagauccugcgggagucuggcgggauugauaaagaaacgaugggauucaccuauagcggcauccgcacaaacggggccaccuccgcuuguagacggucuggaagcuccuuuuacgccgagaugaaguggcugcucagcaauacagacaacgcggccuucccccaaaccacgaagucuuauaaaaauacacgcaaggauccugcucugauuaucuggggcauucaccauuccgggagcaccacagagcagaccaaacuuuacggaucuggcaacaagcugaucaccguuggcuccagcaauuaucagcagucuuuugugcccuccccuggggccagaccgcaagucaacggacagagcggccggaucgacuuccacuggcucaugcugaaucccaacgauacagugacguuuuccuucaauggggcuuuuauugccccugaccgcgcgucuuuccuuagaggaaaaagcaugggcauccaguccggggugcaggucgaugccaacugcgaaggagacuguuaccauaacggcggcaccauuaucagcaaucugcccuuucaaaacauuaauucucgggcuguugggaagugcccucgcuaugugaagcaggagucccuccugcuggccacaggaaugaaaaacgugcccgaaaucccgaagggcagagggcuuuucggagcuaucgccggcuucauugagaaugggugggaaggccuggucgauggaugguacggcuuucggcaccagaacgcccaaggggagggaaccgcugcggacuacaaaagcacacagucugccaucgaccagauuaccggcaagcucaauagacugaucgagaaaacgaaccagcaauucgaacucauugauaaugaguuuacagaaguggagcgccagaucgggaacguuaucaauuggacccgggacagcaugaccgaagugugguccuauaacgcugagcugcuugucgccauggagaaucagcacacaauugaucuggccgacucugaaaugaacaagcucuacgagagagugcgccggcagcugagagaaaaugcugaggaagauggaaccggcuguuucgagaucuuucauaaaugcgacgaugacuguauggccagcauucgcaacaacacauaugaucacuccaaguaccgggaggaagcgaugcaaaauagaauccagauugacccuguuaagcugagcucuggguauaaagaugugauccucugguucuccuuuggcgcuagcugcuucauucugcuugccaucgccaugggacuggucuuuaucugcgugaagaacggcaauaugcgcuguacgauuugcaucuga

SEQ ID NO: 202268 - RNA, 1683 nt, Artificial Sequence
  derived and/or modified CDS sequence (opt5) from hemagglutinin__InfluenzaA__AGQ80977
augaacacccagauccuggcccucgcucuggccgcgauuauccccacaaaugcugacaagauuugccuuggccaccaugccgugagcaacgggacgaaagucaauacccugacagagagaggaguugaaguggugaacgccaccgagacagucgaacggaccuccaucccucgcauuuguucuaagggcaaaagagcuguggaucucgggcaaugcggacugcuuggcacaaucaccgggccgccccagugugaccaguuccuggaguuuagcgccgaucucaucauugaacggcgcgagggauccgacguuugcuacccuggcaaguucgugaaugaggaagcucugagacagauccugcgggagucuggcgggauugauaaagaaacgaugggauuuaccuauagcggcauccgcacaaacggggccaccuccgcguguagacggucuggaagcuccuucuacgccgagaugaaguggcuccugagcaauacagacaacgcugccuuuccccaaaccacgaagucuuauaaaaauacacgcaaggauccugcucuuauuaucuggggcguccaccauuccgggagcaccacagagcagaccaaacuguacggaucuggcaacaagcucauuaccgugggcuccagcaauuaucagcagucuuucguucccuccccuggggccagaccgcaagugaacggacagagcggccggaucgacuuucacuggcugaugcuuaaucccaacgauacagucacguucuccuuuaauggggcguucaucgccccugaccgcgcuucuuuucugagaggaaaaagcaugggcauucaguccgggguccagguggaugccaacugcgaaggagacuguuaccauaacggcggcaccaucauuagcaaucuccccuuccaaaacaucaauucucgggcuguggggaagugcccucgcuauguuaagcaggagucccugcugcucgccacaggaaugaaaaacgugcccgaaauuccgaagggcagagggcuguuuggagccaucgcuggcuucaucgagaaugggugggaaggccuuguggauggaugguacggcuuccggcaccagaacgcgcaaggggagggaaccgccgcugacuacaaaagcacacagucugccauugaccagaucaccggcaagcugaauagacucauugagaaaacgaaccagcaauuugaacugaucgauaaugaguucacagaagucgagcgccagauugggaacgugaucaauuggacccgggacagcaugaccgaaguuugguccuauaacgccgagcuucugguggcuauggagaaucagcacacaaucgaucucgccgacucugaaaugaacaagcuguacgagagaguccgccggcagcugagagaaaaugcggaggaagauggaaccggcuguuuugagauuuuccauaaaugcgacgaugacuguauggcuagcauccgcaacaacacauaugaucacuccaaguaccgggaggaagccaugcaaaaucgcauucagaucgacccugugaagcucagcucuggguauaaagauguuauucugugguuuuccuucggcgccagcugcuuuauccuucuggcuauugccaugggacucguguucaucugcgucaagucuggcaacaugagauguacgaucugcauuuga

SEQ ID NO: 202269 - RNA, 1683 nt, Artificial Sequence
  derived and/or modified CDS sequence (opt5) from hemagglutinin__InfluenzaA__AGQ80978
augaacacccagauccugguguucgcccucgucgcuauuauccccacaaaugccgacaagauuugccugggccaccaugcgguuagcaacgggacgaaagugaauacccuuacagagagaggaguggaagucgugaacgcuaccgagacaguugaacggaccuccaucccucgcauuuguucuaagggcaaaagagccguggaucuggggcaaugcggacuccugggcacaaucaccgggccgccccagugugaccaguuucuugaguucagcgccgaucugaucauugaacggcgcgagggauccgacgucugcuacccuggcaaguuugugaaugaggaagcucucagacagauccugcgggagucuggcgggauugauaaagaaacgaugggauucaccuauagcggcauccgcacaaacggggccaccuccgcuuguagacggucuggaagcuccuuuuacgccgagaugaaguggcugcucagcaauacagacaacgcggccuucccccaaaccacgaagucuuauaaaaauacacgcaaggauccugcucugauuaucuggggcauucaccauuccgggagcaucaccgagcagacaaaacuuuacggaucuggcaacaagcugaucaccguuggcuccagcaauuaucagcagucuuuugugcccuccccuggggccagaccgcaagucaacggacagagcggccggauugacuuccacuggcucaugcugaaucccaacgauaccgugacauuuuccuucaauggggcuuuuaucgccccugaccgcgcgucuuuccuuagaggaaaaagcaugggcauucaguccggggugcaggucgaugccaacugcgaaggagacuguuaccauaacggcggcacgaucauuagcaaucugcccuuucaaaacaucaauucucgggcuguugggaagugcccucgcuaugugaagcaggagucccuccugcuggccaccggaaugaaaaacgugcccgaaaucccgaagggcagagggcuuuucggagcuauugccggcuucaucgagaaugggugggaaggccuggucgauggaugguacggcuuucggcaccagaacgcccaaggggagggaacagcugcggacuacaaaagcacccagucugccauugaccagaucacaggcaagcucaauagacugauugagaaaaccaaccagcaauucgaacucaucgauaaugaguuuacggaaguggagcgccagaucgggaacguuauuaauuggacacgggacagcaugaccgaagugugguccuauaacgcugagcugcuugucgccauggagaaucagcacaccaucgaucuggccgacucugaaaugaacaagcucuacgagagagugcgccggcagcugagagaaaaugcugaggaagauggaacaggcuguuucgagauuuuucauaaaugcgacgaugacuguauggccagcauccgcaacaacaccuaugaucacuccaaguaccgggaggaagcgaugcaaaaucgcauucagaucgacccuguuaagcugagcucuggguauaaagaugugauucucugguucuccuuuggcgcuagcugcuucauccugcuugccaucgccaugggacuggucuuuauuugcgugaagaacggcaauaugagauguacaaucugcauuuga

SEQ ID NO: 202270 - RNA, 1683 nt, Artificial Sequence
  derived and/or modified CDS sequence (opt5) from hemagglutinin__InfluenzaA__AGQ80979
augaacacccagauccugguguucgcccucgucgcuauuauccccacaaaugccgacaagauuugccugggccaccaugcgguuagcaacgggacgaaagugaauacccuuacagagagaggaguggaagucgugaacgcuaccgagacaguugaacggaccuccaucccucgcauuuguucuaagggcaaaagagccguggaucuggggcaaugcggacuccugggcacaaucaccgggccgccccagugugaccaguuucuugaguucagcgccgaucugaucauugaacggcgcgagggauccgacgucugcuacccuggcaaguuugugaaugaggaagcucucagacagauccugcgggagucuggcgggauugauaaagaaacgaugggauucaccuauagcggcauccgcacaaacggggccaccuccgcuuguagacggucuggaagcuccuuuuacgccgagaugaaguggcugcucagcaauacagacaacgcggccuucccccaaaccacgaagucuuauaaaaauacacgcaaggauccugcucugauuaucuggggcauucaccauuccgggagcaccacagagcagaccaaacuuuacggaucuggcaacaagcugaucaccguuggcuccagcaauuaucagcagucuuuugugcccuccccuggggccagaccgcaagucaacggacagagcggccggaucgacuuccacuggcucaugcugaaucccaacgauacagugacguuuuccuucaauggggcuuuuauugccccugaccgcgcgucuuuccuuagaggaaaaagcaucggcauucaguccggggugcaggucgaugccaacugcgaaggagacuguuaccauaacggcggcaccaucauuagcaaucugcccuuucaaaacaucaauucucgggcuguugggaagugcccucgcuaugugaagcaggagucccuccugcuggccacaggaaugaaaaacgugcccgaaaucccgaagggcagagggcuuuucggagcuauugccggcuucaucgagaaugggugggaaggccugauugauggaugguacggcuuucggcaccagaacgcccaaggggagggaaccgcugcggacuacaaaagcacacagucugccaucgaccagauuaccggcaagcucaauagacugaucgagaaaacgaaccagcaauucgaacucaucgauaaugaguuuacagaagucgagcgccagauugggaacgugaucaauuggacccgggacagcaugaccgaaguuugguccuauaacgcugagcugcuuguggccauggagaaucagcacacaauugaucuggccgacucugaaaugaacaagcucuacgagagaguccgccggcagcugagagaaaaugcugaggaagauggaaccggcuguuucgagaucuuucauaaaugcgacgaugacuguauggccagcauucgcaacaacacauaugaucacuccaaguaccgggaggaagcgaugcaaaauagaauccagauugacccugugaagcugagcucuggguauaaagauguuauccucugguucuccuuuggcgcuagcugcuucauccugcuugccauugccaugggacugguguuuaucugcgucaagaacggcaauaugcgcuguacgauuugcaucuga

SEQ ID NO: 202271 - RNA, 1683 nt, Artificial Sequence; identical to SEQ ID NO: 202267
  derived and/or modified CDS sequence (opt5) from hemagglutinin__InfluenzaA__AGQ80980

SEQ ID NO: 202272 - RNA, 1683 nt, Artificial Sequence; identical to SEQ ID NO: 202252
  derived and/or modified CDS sequence (opt5) from hemagglutinin__InfluenzaA__AGQ80981

SEQ ID NO: 202273 - RNA, 1683 nt, Artificial Sequence; identical to SEQ ID NO: 202252
  derived and/or modified CDS sequence (opt5) from hemagglutinin__InfluenzaA__AGQ80982

SEQ ID NO: 202274 - RNA, 1683 nt, Artificial Sequence; identical to SEQ ID NO: 202252
  derived and/or modified CDS sequence (opt5) from hemagglutinin__InfluenzaA__AGQ80983

SEQ ID NO: 202275 - RNA, 1683 nt, Artificial Sequence; identical to SEQ ID NO: 202252
  derived and/or modified CDS sequence (opt5) from hemagglutinin__InfluenzaA__AGQ80984

SEQ ID NO: 202276 - RNA, 1683 nt, Artificial Sequence; identical to SEQ ID NO: 202252
  derived and/or modified CDS sequence (opt5) from hemagglutinin__InfluenzaA__AGQ80985

SEQ ID NO: 202277 - RNA, 1683 nt, Artificial Sequence; identical to SEQ ID NO: 202252
  derived and/or modified CDS sequence (opt5) from hemagglutinin__InfluenzaA__AGQ80986

SEQ ID NO: 202278 - RNA, 1683 nt, Artificial Sequence; identical to SEQ ID NO: 202252
  derived and/or modified CDS sequence (opt5) from hemagglutinin__InfluenzaA__AGQ80987

SEQ ID NO: 202279 - RNA, 1683 nt, Artificial Sequence; identical to SEQ ID NO: 202252
  derived and/or modified CDS sequence (opt5) from hemagglutinin__InfluenzaA__AGQ80988

SEQ ID NO: 202280 - RNA, 1683 nt, Artificial Sequence
  derived and/or modified CDS sequence (opt5) from hemagglutinin__InfluenzaA__AGQ80990
augaacacccagauccugguguucgcccucgucgcuauuauccccacaaaugccgacaagauuugccugggccaccaugcgguuagcaacgggacgaaagugaauacccuuacagagagaggaguggaagucgugaacgcuaccgagacaguugaacggaccuccaucccuaagauuuguucuaaaggcaagcgcgccguggaucuggggcaaugcggacuccugggcacaaucaccgggccgccccagugugaccaguuucuugaguucagcgccgaucugaucauugaaagacgggagggauccgacgucugcuacccuggcaaauuugugaaugaggaagcucuccgccagauccugagagagucuggcgggauugauaaggaaacgaugggauucaccuauagcggcauccggacaaacggggccaccuccgcuugucgcagaucuggaagcuccuuuuacgccgagaugaaguggcugcucagcaauacagacaacgcggccuucccccaaaccacgaaaucuuauaagaauacacggaaagauccugcucugauuaucuggggcauucaccauuccgggagcaccacagagcagaccaagcucuacggaucuggcaacaaacugaucaccguuggcuccagcaauuaucagcagucuuuugugcccuccccuggggcccgcccgcaagucaacggacagagcggcagaaucgacuuccacuggcucaugcugaaucccaacgauacagugacguuuuccuucaauggggcuuuuauugccccugaccgggcgucuuuccuucgcggaaagagcaugggcauccaguccggggugcaggucgaugccaacugcgaaggagacuguuaccauaacggcggcaccauuaucagcaaucugcccuuucaaaacauuaauucuagagcuguugggaagugcccucgguaugugaaacaggagucccuccugcuggccacaggaaugaagaacgugcccgaaaucccgaaaggccgcgggcuuuucggagcuaucgccggcuucauugagaaugggugggaaggccugaucgauggaugguacggcuuuagacaccagaacgcccaaggggagggaaccgcugcggacuacaagagcacacagucugccauugaccagaucaccggcaaacuuaaucggcugauugagaagacgaaccagcaauucgaacucaucgauaaugaguuuacagaagucgagagacagaucgggaacgugauuaauuggacccgcgacagcaugaccgaaguuugguccuauaacgcugagcugcuuguggccauggagaaucagcacacaaucgaucuggccgacucugaaaugaacaaacucuacgagcgggucagacgccagcugcgggaaaaugcugaggaagauggaaccggcuguuucgagauuuuucauaagugcgacgaugacuguauggccagcaucagaaacaacacauaugaucacuccaaguaccgcgaggaagcgaugcaaaaucggauucagaucgacccugugaaacugagcucuggguauaaggauguuauucucugguucuccuuuggcgcuagcugcuucauccugcuugccaucgccaugggacugguguuuauuugcgucaaaaacggcaauaugagauguacgaucugcauuuga

SEQ ID NO: 202281 - RNA, 1683 nt, Artificial Sequence; identical to SEQ ID NO: 202266
  derived and/or modified CDS sequence (opt5) from hemagglutinin__InfluenzaA__AGQ80991

SEQ ID NO: 202282 - RNA, 1683 nt, Artificial Sequence
  derived and/or modified CDS sequence (opt5) from hemagglutinin__InfluenzaA__AGQ80992
augaacacccagauccugguguucgcccucgucgcuauuauccccacaaaugccgacaagauuugccugggccaccaugcgguuagcaacgggacgaaagugaauacccuuacagagagaggaguggaagucgugaacgcuaccgagacaguugaacggaccaaugugccucgcaucuguuccaagggcaaaagaacagucgaucuggggcaaugcggacuccugggcaccauuacggggccgccccagugugaccaguuucuugaguucucugccgaucugaucaucgaacggcgcgagggaagcgacgugugcuacccuggcaaguuuaugaacgaggaagcccucagacagauucugcgggaguccggcgggaucgauaaagaaaccaugggauucacauauucuggcauucgcaccaauggggcuacaagcgccuguagacgguccggaucuagcuuuuacgcugagaugaaguggcugcucuccaacaccgacaaugccgcguucccccaaaugacgaagucuuauaaaaacacacgcaaggauccugcccugaucauuuggggcauccaccauucuggguccaccacagagcagaccaaacuuuacggaagcggcaauaagcugauuaccguuggcagcuccaacuaucagcagagcuuugugcccucuccuggggcuagaccgcaagucaauggacaguccggccggaucgacuuccacuggcucaugcugaaccccaaugauacagugacguuuagcuucaacggggccuuuaucgcuccugaccgcgccugcuuccuuagaggaaaauccaugggcauucagucuggggugcaggucgaugcgagcugugaaggagacugcuaccauuccggcggcaccaucauuagcaaccugcccuuucaaaauaucaacucucgggccguugggaaguguccucgcuaugugaagcaggagucccucaugcuggcuacaggaaugaaaaaugugcccgaaauuccgaagggcagagggcuguucggagccaucgcuggcuucaucgagaacgggugggaaggccucauugauggaugguacggcuuucggcaccagaaugcccaaggggagggaaccgccgcugacuacaaaagcacacagucugcgaucgaccagauuaccggcaagcugaacagacuuaucgagaaaacgaaucagcaauucgaacugauugauaacgaguuuacagaagucgagaagcagaucgggaaugugaucaacuggacccgcgacagcaugaccgaaguuugguccuauaaugccgagcuccugguggcuauggagaaccagcacacaauugaucuugccgacucugaaaugaauaaacuguacgagcgggucaagagacagcuccgcgaaaacgccgaggaagauggaaccggcugcuucgagaucuuucauaagugugacgaugacugcauggcuagcauucggaauaacacauaugaucacuccaaauacagagaggaagccaugcaaaaccgcauccagauugacccugugaagcugagcucuggguauaaagauguuauccugugguucuccuuuggcgcgagcugcuucauucuccuggcuaucgccaugggacuuguguuuaucugugucaagaauggcaacaugcggugcacgauuuguaucuga

SEQ ID NO: 202283 - RNA, 1683 nt, Artificial Sequence; identical to SEQ ID NO: 202252
  derived and/or modified CDS sequence (opt5) from hemagglutinin__InfluenzaA__AGQ80993

SEQ ID NO: 202284 - RNA, 1683 nt, Artificial Sequence; identical to SEQ ID NO: 202259
  derived and/or modified CDS sequence (opt5) from hemagglutinin__InfluenzaA__AGQ80994

SEQ ID NO: 202285 - RNA, 1683 nt, Artificial Sequence; identical to SEQ ID NO: 202261
  derived and/or modified CDS sequence (opt5) from hemagglutinin__InfluenzaA__AGQ80995

SEQ ID NO: 202286 - RNA, 1683 nt, Artificial Sequence; identical to SEQ ID NO: 202261
  derived and/or modified CDS sequence (opt5) from hemagglutinin__InfluenzaA__AGQ80996

SEQ ID NO: 202287 - RNA, 1683 nt, Artificial Sequence
  derived and/or modified CDS sequence (opt5) from hemagglutinin__InfluenzaA__AGQ80997
augaacacccagauccugguguucgcccucgucgcuauuauccccacaaaugccgacaagauuugccugggccaccaugcgguuagcaacgggacgaaagugaauacccuuacagagagaggaguggaagucgugaacgcuaccgagacaguugaacggaccaauaucccucgcauuuguuccaagggcaaaagaacaguggaucuggggcaaugcggacuccugggcaccaucacggggccgccccagugugaccaguuucuugaguucucugccgaucugaucauugaacggcgcgagggaagcgacgucugcuacccuggcaaguuugugaacgaggaagcccucagacagauccugcgggaguccggcgggauugauaaagaaaccaugggauucacauauucuggcauccgcaccgacggggcuacaagcgccuguagacgguccggaucuagcuuuuacgcugagaugaaguggcugcucuccaauaccgauaacgccgcguucccccaaaugacgaagucuuauaaaaauacacgcaaggacccugcccugauuaucuggggcauucaccauucuggguccaccacagagcagaccaaacuuuacggaagcggcaacaagcugaucaccguuggcagcuccaauuaucagcagagcuuugugcccucuccuggggcuagaccgcaagucaacggacaguccggccggaucgauuuccacuggcucaugcugaaucccaacgacacagugacguuuagcuucaauggggccuuuauugcuccugaucgcgccuccuuccuuagaggaaaaucuaugggcauccagagcggggugcaggucgacgcgaacugcgaaggagauuguuaccauuccggcggcaccauuaucagcaaccugcccuuucaaaauauuaacucucgggccguugggaagugcccucgcuaugugaagcaggagucccuccugcuggcuacaggaaugaaaaaugugcccgaaaucccgaagggcagagggcuuuucggagccaucgcuggcuucauugagaacgggugggaaggccugaucgacggaugguacggcuuucggcaccagaauagccaaggggagggaaccgccgccgacuacaaaucuacacagagcgcuauugaucagaucaccggcaagcucaacagacugauugagaaaacgaaucagcaauucgaacucaucgacaacgaguuuacagaagucgagaagcagaucgggaaugugauuaacuggacccgcgauuccaugaccgaaguuuggucuuauaaugcggagcugcuuguggccauggagaaccagcacacaaucgaccuggcugauagcgaaaugaauaaacucuacgagcgggucaagagacagcugcgcgaaaacgccgaggaagacggaaccggcuguuucgagauuuuucauaagugcgaugacgauuguauggccuccauccggaauaacacauaugaccacagcaaauacagagaggaagcuaugcaaaaccgcauucagaucgauccugugaagcugucuuccggguauaaagacguuauucucugguucagcuuuggcgccucuugcuucauccugcuugcgaucgcuaugggacugguguuuauuugcgucaagaauggcaacaugcgguguacgaucugcauuuga

SEQ ID NO: 202288 - RNA, 1683 nt, Artificial Sequence
  derived and/or modified CDS sequence (opt5) from hemagglutinin__InfluenzaA__AGQ81000
augaacacccagauccugguguucgcccucgucgcuauuauccccacaaaugccgacaagauuugccugggccaccaugcgguuagcaacgggacgaaagugaauacccuuacagagagaggaguggaagucgugaacgcuaccgagacaguugaacggaccaauaucccucgcauuuguuccaagggcaaaagaacaguggaucuggggcaaugcggacuccugggcaccaucacggggccgccccagugugaccaguuucuugaguucucugccgaucugaucauugaacggcgcgagggaagcgacgucugcuacccuggcaaguuugugaacgaggaagcccucagacagauccugcgggaguccggcgggauuggaaaagaaaccaugggcuucacauauucugggauccgcaccaauggagcuacaagcgccuguagacgguccggcucuagcuuuuacgcugagaugaaguggcugcucuccaacaccgauaaugccgcguucccccaaaugacaaagagcuauaaaaacacgcgcaaggacccugcccugauuaucugggggauucaccauucuggauccaccacagagcagaccaaacuuuacggcagcggcaauaagcugaucaccguugggucuuccaacuaucagaaaucuuuugugcccagcccuggagcuagaccgcaggucaauggccaauccgggcggaucgauuuccacuggcucaugcugaaccccaaugacacagugacguuuagcuucaacggagccuuuauugcuccugaucgcgccuccuuccuuagaggcaagucuauggggauccagagcggagugcaggucgacgcgaacugcgaaggcgauuguuaccauaauggcgggaccauuaucuccaaccugcccuuucagaauauuaacagccgggccguuggaaagugcccucgcuaugugaaacaagagucucuccugcuggcuacaggcaugaagaaugugcccgaaaucccgaaagggagaggacucuucggcgccaucgcuggguucauugagaacggcugggaaggacugaucgacggcugguacggguuucggcaccagaaugcccagggagagggcaccgccgcugauuacaaguccacacaaagcgcgauugaccagaucaccgggaaacuuaacagacugauugagaagacgaaucagcaguucgaacucaucgacaacgaguuuacagaagucgagaaacaaaucggaaaugugauuaacuggacccgcgauucuaugaccgaaguuuggagcuauaaugccgagcugcuuguggcuauggagaaccagcacacaaucgaccuggccgauuccgaaaugaauaagcucuacgagcgggucaagagacagcugcgcgaaaacgccgaggaagacggcaccggguguuucgagauuuuucauaaaugcgaugacgauuguauggcuucuauccggaacaauacauaugaccacagcaaguacagagaggaagccaugcagaaccgcauucaaaucgauccugugaaacuguccagcggcuauaaggacguuauucucugguucucuuuuggagcguccugcuucauccugcuugcuaucgccaugggccugguguuuauuugcgucaaaaaugggaacaugcgguguacgaucugcauuuga

SEQ ID NO: 202289 - RNA, 1683 nt, Artificial Sequence
  derived and/or modified CDS sequence (opt5) from hemagglutinin__InfluenzaA__AGQ81001
augaacacccagauccugguguucgcccucgucgcuauuauccccacaaaugccgacaagauuugccugggccaccaugcgguuagcaacgggacgaaagugaauacccuuacagagagaggaguggaagucgugaacgcuaccgagacaguugaacggaccaauaucccucgcauuuguuccaagggcaaaagaacaguggaucuggggcaaugcggacuccugggcaccaucacggggccgccccagugugaccaguuucuugaguucucugccgaucugaucauugaacggcgcgagggaagcgacgucugcuacccuggcaaguuugugaacgaggaagcccucagacagauccugcgggaguccggcgggauugauaaagaaaccaugggauucacauauucuggcauccgcaccaauggggcuacaagcgccuguagacgguccggaucuagcuuuuacgcugagaugaaguggcugcucuccaacaccgacaaugccgcguucccccaaaugacaaagagcuauaaaaacacgcgcaaggauccugcccugauuaucuggggcauucaccauucuggguccaccacagagcagaccaaacuuuacggaagcggcaauaagcugaucaccguuggcacaucuaacuaucagcaguccuuugugcccagcccuggggcuagaccgcaagucaauggacagucuggccggaucgacuuccacuggcucaugcugaaccccaaugauacggugaccuuuuccuucaacggggccuuuauugcuccugaccgcgccagcuuccuuagaggaaaauccaugggcauccagucuggggugcaggucgaugcgaacugcgaaggagacuguuaccauaauggcggcacaauuaucagcaaccugcccuuucaaaauauuaacucccgggccguugggaagugcccucgcuaugugaagcaggagagccuccugcuggcuaccggaaugaaaaaugugcccgaaaucccgaagggcagagggcuuuucggagccaucgcuggcuucauugagaacgggugggaaggccugaucgauggaugguacggcuuucggcaccagaaugcccaaggggagggaacagccgcugacuacaaaucuacccaguccgcgauugaccagaucacgggcaagcucaacagacugauugagaaaacaaaucagcaauucgaacucaucgauaacgaguuuaccgaaaucgagaagcagauugggaaugucaucaacuggacccgcgacagcaugacagaaguguggucuuauaaugccgagcugcuuguugcuauggagaaccagcacaccauugaucuggccgacagcgaaaugaauaaacucuacgagcgggugaagagacagcugcgcgaaaacgccgaggaagauggaacaggcuguuucgagaucuuucauaagugcgacgaugacuguauggcuuccauucggaacaauacguaugaucacucuaaauacagagaggaagccaugcaaaaccgcauccagauugacccugucaagcugagcuccggguauaaagaugugauccucugguucagcuuuggcgcgucuugcuucauccugcuugcuauugccaugggacugguuuuuaucugcgugaagaauggcaacaugcgguguaccauuugcaucuga

SEQ ID NO: 202290 - RNA, 1683 nt, Artificial Sequence; identical to SEQ ID NO: 202267
  derived and/or modified CDS sequence (opt5) from hemagglutinin__InfluenzaA__AGQ81002

SEQ ID NO: 202291 - RNA, 1683 nt, Artificial Sequence; identical to SEQ ID NO: 202267
  derived and/or modified CDS sequence (opt5) from hemagglutinin__InfluenzaA__AGQ81003

SEQ ID NO: 202292 - RNA, 1683 nt, Artificial Sequence; identical to SEQ ID NO: 202267
  derived and/or modified CDS sequence (opt5) from hemagglutinin__InfluenzaA__AGQ81004

SEQ ID NO: 202293 - RNA, 1683 nt, Artificial Sequence; identical to SEQ ID NO: 202267
  derived and/or modified CDS sequence (opt5) from hemagglutinin__InfluenzaA__AGQ81005

SEQ ID NO: 202294 - RNA, 1683 nt, Artificial Sequence; identical to SEQ ID NO: 202267
  derived and/or modified CDS sequence (opt5) from hemagglutinin__InfluenzaA__AGQ81006

SEQ ID NO: 202295 - RNA, 1683 nt, Artificial Sequence; identical to SEQ ID NO: 202267
  derived and/or modified CDS sequence (opt5) from hemagglutinin__InfluenzaA__AGQ81007

SEQ ID NO: 202296 - RNA, 1683 nt, Artificial Sequence; identical to SEQ ID NO: 202267
  derived and/or modified CDS sequence (opt5) from hemagglutinin__InfluenzaA__AGQ81008

SEQ ID NO: 202297 - RNA, 1683 nt, Artificial Sequence
  derived and/or modified CDS sequence (opt5) from hemagglutinin__InfluenzaA__AGQ81009
augaacacccagauccugguguucgcccucgucgcuauuauccccacaaaugccgacaagauuugccugggccaccaugcgguuagcaacgggacgaaagugaauacccuuacagagagaggaguggaagucgugaacgcuaccgagacaguugaacggaccuccaucccucgcauuuguucuaagggcaaaagagccguggaucuggggcaaugcggacuccugggcacaaucaccgggccgccccagugugaccaguuucuugaguucagcgccgaucugaucauugaacggcaggagggauccgacgucugcuacccuggcaaguuugugaaugaggaagcucuccgccaaauccugagagagucuggcgggauuaacaaagaaacgaugggauucaccuauagcggcauccggacaaauggggccaccuccgcuugucgcagaucuggaagcuccuuuuacgccgagaugaaguggcugcucagcaacacagauaaugcggccuucccccagaccacgaagucuuauaaaaacacacggaaggacccugcucugauuaucuggggcauucaccauuccgggagcaccacagagcagaccaaacuuuacggaucuggcaauaagcugaucaccguuggcuccagcaacuaucagcaaucuuuugugcccuccccuggggcccgcccgcaggucaauggacagagcggcagaaucgauuuccacuggcucaugcugaaccccaaugacacagugacguuuuccuucaacggggcuuuuauugccccugaucgggcgucuuuccuucgcggaaaaagcaugggcauccaguccggggugcaagucgacgccaacugcgaaggagauuguuaccauaauggcggcaccauuaucagcaaccugcccuuucagaauauuaacucuagagcuguugggaagugcccucgguaugugaagcaggagucccuccugcuggccacaggaaugaaaaaugugcccgaaaucccgaagggccgcgggcuuuucggagcuaucgccggcuucauugagaacgggugggaaggccuggucgacggaugguacggcuuuagacaccaaaaugcccagggggagggaaccgcugcggauuacaaaagcacacagucugccaucgaccagauuaccggcaagcucaaccggcugaucgagaaaacgaaucaacaguucgaacucauugacaacgaguuuacagaaguggagagacagaucgggaauguuaucaacuggacccgcgauagcaugaccgaagugugguccuauaaugcugagcugcuugucgccauggagaaccagcacacaauugaccuggccgauucugaaaugaauaagcucuacgagcgggugagacgccaacugcgggaaaacgcugaggaagacggaaccggcuguuucgagaucuuucauaaaugcgaugacgauuguauggccagcauuagaaacaauacauaugaccacuccaaguaccgcgaggaagcgaugcagaaccggauccagauugauccuguuaagcugagcucuggguauaaagacgugauccucugguucuccuuuggcgcuagcugcuucauucugcuugccaucgccaugggacuggucuuuaucugcgugaagaauggcaacaugagauguacgauuugcaucuga

SEQ ID NO: 202298 - RNA, 1683 nt, Artificial Sequence
  derived and/or modified CDS sequence (opt5) from hemagglutinin__InfluenzaA__AGQ81011
augaacacccagauccugguguucgcccucauugcuaucacacccacgaauagcgacaagauuugccugggccaccaugccgucuccaacgggaccaaaguuaauacacuuaccgagagaggaguggaaguggucaacgcgacagagaccguggaacggacaucuaucccucgcauuuguagcaagggcaaaagaaccguugaucuggggcaaugcggacuccugggcacgaucaccgggccgccccagugugaccaguuucuugaguucuccgcugaucugaucauugaacggcgcgagggaucugacgugugcuacccuggcaaguuugucaaugaggaagcccucagacagauccugcgggagagcggcgggauugauaaagaagccaugggauucacauauuccggcauccgcaccaacggggcuacaucugccuguagacggagcgaguccagcuuuuacgcugagaugaaguggcugcucucuaauaccgacaacgccgcguuucccccuaugacgaaguccuauaaaaauacacgcaaggcccccgcucugauuaucuggggcauucaccauagcggaucuaccgccgaacaaacaaaacuuuacggguccggaaacaagcuggugaccguuagaagcucuaauuaucagcaguccuucgugccuagcccgggcgcuggccccaaagucaacgggcaguccggacggaucgauuuccacuggcucaugcugaauccuaacgacaccgugacauuuucuuucaauggcgccuuuaucgcgcccgaucgcgccagcuuccuuagagggaaguccaugggcauucaaagcggagugcaggucgacgcuaacugcgagggggauuguuaccauucuggaggcacgaucauuuccaaccugccuuuucagaauaucgacagccggguugugggcaagugcccccgcuaugugaaacagaagucucuccugcuggccaccgggaugaaaaacgucccggaaauuccuaagggaagaggccucuucggggcuaucgccggauucaucgagaauggcugggaagggcugauugauggcugguacggauuucggcaccaaaacgcccagggcgaggggacagcugcggacuacaaaagcacccaguccgccaucaaucaaaugacaggaaaacuuaacagacugauugagaagaccaaucagcaguucgaacucaucgacaacgaguuuacggaaguggagaagcagauuggcaauguuaucaacuggacacgcgauucuaucaccgaaguguggagcuauaaugcugagcugcuugucgccauggagaaccaacacaccauugaccuggccgauuccgaaaugaauaagcucuacgagcgggugaaaagacagcugcgcgaaaacgcugaggaagacgggacaggauguuucgagaucuuucauaagugcgaugacgauuguauggccagcauucggaauaacaccuaugaccacucuaaauacagagaggaagcgaugcagaaccgcauccagauugaucccguuaagcuguccagcggcuauaaagacgugauccucugguucucuuuuggggcuuccugccugauucuucuggccaucgccaugggccucgucuucaucugcgugaagaauggaaacaugcgguguacaauuugcaucuga

SEQ ID NO: 202299 - RNA, 1683 nt, Artificial Sequence
  derived and/or modified CDS sequence (opt5) from hemagglutinin__InfluenzaA__AGQ81012
augaacacccagauccugguguucgcccucauugcuaucauucccacaaauagcgacaagaucugccugggccaccaugccgucuccaacgggacgaaaguuaauacccuuacagagagaggaguggaaguggucaacgcgaccgagacaguggaacggaccucuauuccucgcaucuguagcaagggcaaaagaacaguugaucuggggcaaugcggacuccugggcaccaucacggggccgccccagugugaccaguuucuugaguucuccgcugaucugauuaucgaacggcgcgagggaucugacgugugcuacccuggcaaguuugucaaugaggaagcccucagacagauucugcgggagagcggcgggaucaacaaagaagccaugggauucaccuauuccggcauucgcacaaauggggcuaccucugccuguagacggagcggauccagcuuuuacgcugagaugaaguggcugcucucuaacacagauaaugccgcguuucccccuaugaccaaguccuauaaaaacacgcgcaaggcccccgcucugaucauuuggggcauccaccauagcgggucuacagccgagcaaaccaaacuuuacggauccggcaauaagcuggugacaguuagaagcucuaacuaucagcaguccuucgugccuagcccgggcgcugggccccaggucaauggacaauccggccggaucgacuuccacuggcucaugcugaacccuaaugauaccgugaccuuuucuuucaacggggccuuuauugcgcccgaccgcgccagcuuccuuagaggaaaauccaugggcauccagagcggggugcaggucgaugcuaacugcgaaggagacuguuaccauucuggcggcacaauuaucuccaaucugccuuuucagaacauugauagccggguuguggggaagugcccccgcuaugugaagcaaaaaucucuccugcuggccacgggaaugaagaaugucccggagaucccuaaaggcagaggacucuucggggcuaucgccggcuucauugaaaacgggugggagggccugaucgacggaugguacggcuuucggcaccagaaugcccagggggaaggaaccgcugcggauuacaagagcacacaauccgccauuaaccagaugaccggcaaacuuaauagacugaucgagaagacaaaccagcaguucgagcucauugacaaugaauuuaccgagguggaaaaacaaaucgggaacguuaucaauuggacgcgcgacucuauuacagagguguggagcuauaacgcugaacugcuugucgccauggagaaucagcacaccaucgaucuggccgacuccgagaugaacaagcucuacgaacgggugaagagacagcugcgcgagaaugcugaagaggauggaaccggcuguuucgaaauuuuucauaaaugcgacgaugacuguauggccagcauccggaacaacacauaugaucacucuaaguacagagaggaggcgaugcagaaucgcauucaaaucgaccccguuaaacuguccagcggguauaaggaugugauucucugguucucuuuuggcgcuuccugcuucauccugcuugccaucgccaugggacuggucuuuauuugcgugaaaaacggcaauaugcgguguaccaucugcauuuga

SEQ ID NO: 202300 - RNA, 1683 nt, Artificial Sequence
  derived and/or modified CDS sequence (opt5) from hemagglutinin__InfluenzaA__AGQ81017
augaacacccagauccugguguucgcccucauugcuaucacacccacgaauagcgacaagauuugccugggccaccaugccgucuccaacgggaccaaaguuaauacacuuaccgagagaggaguggaaguggucaacgcgacagagaccguggaacggacaucuaucccucgcauuuguagcaagggcaaaagaaccguugaucuggggcaaugcggacuccugggcacgaucaccgggccgccccagugugaccaguuucuugaguucuccgcugaucugaucauugaacggcgcgagggaucugacgugugcuacccuggcaaguuugucaaugaggaagcccucagacagauccugcgggagagcggcgggauugauaaagaagccaugggauucacauauuccggcauccgcaccaacggggcuacaucugccuguagacggagcggauccagcuuuuacgcugagaugaaguggcugcucucuaauaccgacaacgccgcguuucccccuaugacgaaguccuauaaaaauacacgcaaggcccccgcucugauuaucuggggcauucaccauagcgggucuaccgccgagcaaacaaaacuuuacggauccggcaacaagcuggugaccguuagaagcucuaauuaucagcaguccuucgugccuagcccgggcgcugggccccaggucaacggacaauccggccggaucgauuuccacuggcucaugcugaauccuaacgacaccgugacauuuucuuucaauggggccuuuaucgcgcccgaucgcgccagcuuccuuagaggaaaauccaugggcauucagagcggggugcaggucgacgcuaacugcgaaggagauuguuaccauucuggcggcacgaucauuuccaaccugccuuuucagaauaucgacagccggguuguggggaagugcccccgcuaugugaagcaaaaaucucuccugcuggccaccggaaugaagaacgucccggagauuccuaaaggcagaggacucuucggggcuaucgccggcuucaucgaaaaugggugggagggccugauugauggaugguacggcuuucggcaccagaacgcccagggggaaggaacagcugcggacuacaagagcacccaauccgccaucaaucagaugacaggcaaacuuaacagacugauugagaagaccaaucagcaguucgagcucaucgacaacgaauuuacggagguggaaaaacaaauugggaauguuaucaacuggacacgcgauucuaucaccgagguguggagcuauaaugcugaacugcuugucgccauggagaaccagcacaccauugaccuggccgauuccgagaugaauaagcucuacgaacgggugaagagacagcugcgcgagaacgcugaagaggacggaacaggcuguuucgaaaucuuucauaaaugcgaugacgauuguauggccagcauucggaauaacaccuaugaccacucuaaguacagagaggaggcgaugcagaaccgcauccaaauugaucccguuaaacuguccagcggguauaaggacgugauccucugguucucuuuuggcgcuuccugcuucauucugcuugccaucgccaugggacuggucuuuaucugcgugaaaaauggcaacaugcgguguacaauuugcaucuga

SEQ ID NO: 202301 - RNA, 1683 nt, Artificial Sequence
  derived and/or modified CDS sequence (opt5) from hemagglutinin__InfluenzaA__AGQ81018
augaacacccagauccugguguucgcccucauugcuaucauucccacaaauagcgacaagaucugccugggccaccaugccgucuccaacgggacgaaaguuaauacccuuacagagagaggaguggaaguggucaacgcgaccgagacaguggaacggaccucuauuccucgcaucuguagcaagggcaaaagaacaguugaucuggggcaaugcggacuccugggcaccaucacggggccgccccagugugaccaguuucuugaguucuccgcugaucugauuaucgaacggcgcgagggaucugacgugugcuacccuggcaaguuugucaaugaggaagcccucagacagauucugcgggagagcggcgggaucgugaaagaagccaugggauucaccuauuccggcauucgcacaaacggggcuaccucugccuguagacggagcggauccagcuuuuacgcugagaugaaguggcugcucucuaauacagauaacgccgcguuucccccuaugaccaaguccuauaaaaauacgcgcaaggcccccgcuaucauuaucuggggcauccaccauagcgggucuacagccgagcaaaccaaacuguacggauccggcaacaaacuuguuacagugagaagcucuaauuaucagcaguccuucgucccuagcccgggcgcugggccccaggugaacggacaauccggccggauugacuuccacuggcugaugcucaauccuaacgauaccgugaccuuuucuuucaauggggccuuuaucgcgcccgaccgcgccagcuuccugagaggaaaguccaugggcauucagagcgggguccagguugaugcuaacugcgaaggagacuguuaccauucucggggcacaaucauuuccaaccuuccuuuucagaauaucgauagccgcguggugggcaagugccccagauaugucaagcaaaaaucucugcuccuggccacggggaugaagaacgugccggagaucccuaaaggacggggccuguucggggcuauugccggauucaucgaaaauggcugggaggggcucauugacggcugguacggauuuagacaccagaacgcccagggcgaagggaccgcugcggauuacaagagcacacaauccgccaucaaucagaugaccggaaaacugaaccgccuuauugagaagacaaaucagcaguucgagcugaucgacaacgaauuuaccgagguugaaaaacaaaucggcaaugugauuaacuggacgcgggacucuaucacagaggucuggagcuauaaugcugaacuccugguggccauggagaaccagcacaccauugaucuugccgacuccgagaugaauaagcuguacgaaagaguuaagcgccagcuccgggagaacgcugaagaggaugggaccggauguuucgaaaucuuucauaaaugcgacgaugacuguauggccagcauuagaaauaacacauaugaucacucuaaguaccgcgaggaggcgaugcagaaccggauccaaauugaccccgugaaacuguccagcggcuauaaggaugucauccugugguucucuuuuggggcuuccugcuucauccuccuggccauugccaugggccuuguguuuaucugcgucaaaaauggaaacaugagauguaccauuugcaucuga

SEQ ID NO: 202302 - RNA, 1683 nt, Artificial Sequence; identical to SEQ ID NO: 202301
  derived and/or modified CDS sequence (opt5) from hemagglutinin__InfluenzaA__AGQ81019

SEQ ID NO: 202303 - RNA, 1683 nt, Artificial Sequence; identical to SEQ ID NO: 202300
  derived and/or modified CDS sequence (opt5) from hemagglutinin__InfluenzaA__AGQ81020

SEQ ID NO: 202304 - RNA, 1683 nt, Artificial Sequence; identical to SEQ ID NO: 202301
  derived and/or modified CDS sequence (opt5) from hemagglutinin__InfluenzaA__AGQ81021

SEQ ID NO: 202305 - RNA, 1683 nt, Artificial Sequence; identical to SEQ ID NO: 202300
  derived and/or modified CDS sequence (opt5) from hemagglutinin__InfluenzaA__AGQ81022

SEQ ID NO: 202306 - RNA, 1683 nt, Artificial Sequence; identical to SEQ ID NO: 202301
  derived and/or modified CDS sequence (opt5) from hemagglutinin__InfluenzaA__AGQ81023

SEQ ID NO: 202307 - RNA, 1683 nt, Artificial Sequence
  derived and/or modified CDS sequence (opt5) from hemagglutinin__InfluenzaA__AGQ81025
augaacacccagauccugguguucgcccucauugcuaucauucccacaaaugccgacaagaucugccugggccaccaugcggucagcaacgggacgaaaguuaauacccuuacagagagaggaguggaaguggucaacgcuaccgagacaguggaacggaccuccauuccucgcaucuguucuaagggcaaaagaacaguugaucuggggcaaugcggacuccugggcaccaucacggggccgccccagugugaccaguuucuugaguucagcgccgaucugauuaucgaacggcgcgagggauccgacgugugcuacccuggcaaguuugucaaugaggaagcccucagacagauucugcgggagucuggcgggaucgauaaagaagcuaugggauucaccuauagcggcauucgcacaaacggggugaccuccgccuguagacggucuggaagcuccuuuuacgcugagaugaaguggcugcucagcaauacagacaacgccgcguuucccccuaugaccaagucuuauaaaaauacgcgcaaggcccccgcucugaucauuuggggcauccaccauuccgggagcacagccgagcaaaccaaacuuuacggaucuggcaacaagcugguuacagugagauccagcaauuaucagcagucuuucgucccuuccccgggcgcugggccccaggugaacggacaaagcggccggaucgauuuccacuggcucaugcugaauccuaacgacaccgugaccuuuuccuucaauggggccuuuauugcgcccgaucgcgccucuuuccuuagaggaaaaagcaugggcauccaguccgggguccagguugacgcuaacugcgaaggagauuguuaccauagcggcggcacaauuaucucuaaccugccuuuucagaauauugacucccgggugguggggaagugcccccgcuaugucaagcagaaaagccuccugcuggccacgggaaugaagaacgugccggagaucccuaaaggcagaggacucuucggggcuaucgccggcuucauugaaaaugggugggagggccugaucgauggaugguacggcuuucggcaccaaaacgcccagggggaaggaaccgcugcggacuacaagucuacacaaagcgccauuaaucagaugaccggcaaacuuaacagacugaucgagaagacaaaucagcaguucgggcucauugacaacgaguuuaccgaaguugagaaacaaaucggaaaugugaucaacuggacgcgcgauuccauuacagaagucuggucuuauaaugcugagcugcuuguggccauggaaaaccagcacaccaucgaccuggccgauagcgagaugaauaagcucuacgagcggguuaagagacagcugcgcgaaaacgcugaggaagacggcaccggguguuucgagauuuuucauaaaugcgaugacgauuguauggccuccauccggaauaacacauaugaccacagcaaguacagagaagaggcgaugcagaaccgcauucaaaucgaucccgugaaacugucuuccggcuauaaggacgucauucucugguucagcuuuggagcuucuugcuucauccugcuugccaucgccaugggccugguggucauuugcgugaaaaaugggaacaugcgguguaccaucugcauuuga

SEQ ID NO: 202308 - RNA, 1683 nt, Artificial Sequence
  derived and/or modified CDS sequence (opt5) from hemagglutinin__InfluenzaA__AGQ81026
augaacacccagauccugguguucgcccucauugcuaucauucccacaaaugccgacaagaucugccugggccaccaugcggucagcaacgggacgaaaguuaauacccuuacagagagaggaguggaaguggucaacgcuaccgagacaguggaacggaccuccauuccucgcaucuguucuaagggcaaaagaacaguugaucuggggcaaugcggacuccugggcaccaucacggggccgccccagugugaccaguuucuugaguucagcgccgaucugauuaucgaacggcgcgagggauccgacgugugcuacccuggcaaguuugucaaugaggaagcccucagacagauucugcgggagucuggcgggaucgauaaagaagcuaugggauucaccuauagcggcauucgcacaaacggggccaccuccgcuuguagacggucuggaagcuccuuuuacgccgagaugaaguggcugcucagcaauacagacaacgcggccuuucccccuaccacgaagucuuauaaaaauacacgcaaggcucccgcccugaucauuuggggcauccaccauuccgggagcaccgcugagcaaacaaaacuuuacggaucuggcaacaagcuggugaccguuagauccagcaauuaucagcagucuuucgugccuuccccgggcgccgggccccaggucaacggacaaagcggccggaucgauuuccacuggcucaugcugaauccuaacgacaccgugacauuuuccuucaauggggcguuuauugcccccgaucgcgcuucuuuccuuagaggaaaaagcaugggcauccaguccggggugcaggucgacgccaacugcgaaggagauuguuaccauagcggcggcacgauuaucucuaaccugccuuuucagaauauugacucccggguuguggggaagugcccccgcuaugugaagcagaaaagccuccugcuggcuaccggaaugaagaacgucccggagaucccuaaaggcagaggacucuucggggccaucgccggcuucauugaaaaugggugggagggccugaucgauggaugguacggcuuucggcaccaaaacgcucagggggaaggaacagcggccgacuacaagucuacccaaagcgcuauuaaucagaugacaggcaaacuuaacagacugaucgagaagaccaaucagcaguucgagcucauugacaacgaauuuacggagguggaaaaacaaaucgggaauguuaucaacuggacacgcgauuccauuaccgagguguggucuuauaaugccgaacugcuugucgccauggagaaccagcacaccaucgaccuggcugauagcgagaugaauaagcucuacgaacgggugaagagacagcugcgcgagaacgccgaagaggacggaacaggcuguuucgaaauuuuucauaaaugcgaugacgauuguauggcguccauccggaauaacaccuaugaccacagcaaguacagagaggaggcuaugcagaaccgcauucaaaucgaucccguuaaacugucuuccggguauaaggacgugauucucugguucagcuuuggcgccucuugcuucauccugcuugccaucgcuaugggacuggucuuuauuugcgugaaaaauggcaacaugcgguguacaaucugcauuuga

SEQ ID NO: 202309 - RNA, 1683 nt, Artificial Sequence
  derived and/or modified CDS sequence (opt5) from hemagglutinin__InfluenzaA__AGQ81027
augaacacccagauccugguguucgcccucauugcuaucauucccacaaaugccgacaagaucugccugggccaccaugcggucagcaacgggacgaaaguuaauacccuuacagagagaggaguggaaguggucaacgcuaccgagacaguggaacggaccuccauuccucgcaucuguucuaagggcaaaagaacaguugaucuggggcaaugcggacuccugggcaccaucacggggccgccccagugugaccaguuucuugaguucagcgccgaucugauuaucgaacggcgcgagggauccgacgugugcuacccuggcaaguuugucaaugaggaagcccucagacagauucugcgggagucuggcgggaucgauaaagaagcuaugggauucaccuauagcggcauucgcacaaacggggugaccuccgccuguagacggucuggaagcuccuuuuacgcugagaugaaguggcugcucagcaauacagacaacgccgcguuucccccuaugaccaagucuuauaaaaauacgcgcaaggcccccgcucugaucauuuggggcauccaccauuccgggagcacagccgagcaaaccaaacuuuacggaucuggcaacaagcugguuacagugagauccagcaauuaucagcagucuuucgucccuuccccgggcgcugggccccaggugaacggacaaagcggccggaucgauuuccacuggcucaugcugaauccuaacgacaccgugaccuuuuccuucaauggggccuuuauugcgcccgaucgcgccucuuuccuuagaggaaaaagcaugggcauccaguccgggguccagguugacgcuaacugcgaaggagauuguuaccauagcggcggcacaauuaucucuaaccugccuuuucagaauauugacucccgggugguggggaagugcccccgcuaugucaagcagaaaagccuccugcuggccacgggaaugaagaacgugccggagaucccuaaaggcagaggacucuucggggcuaucgccggcuucauugaaaaugggugggagggccugaucgauggaugguacggcuuucggcaccaaaacgcccagggggaaggaaccgcugcggacuacaagucuacacaaagcgccauuaaucagaugaccggcaaacuuaacagacugaucgagaagacaaaucagcaguucgagcucauugacaacgaauuuaccgagguugaaaaacaaaucgggaaugugaucaacuggacgcgcgauuccauuacagaggucuggucuuauaaugcugaacugcuuguggccauggagaaccagcacaccaucgaccuggccgauagcgagaugaauaagcucuacgaacggguuaagagacagcugcgcgagaacgcugaagaggacggaaccggcuguuucgaaauuuuucauaaaugcgaugacgauuguauggccuccauccggaauaacacauaugaccacagcaaguacagagaggaggcgaugcagaaccgcauucaaaucgaucccgugaaacugucuuccggguauaaggacgucauucucugguucagcuuuggcgcuucuugcuucauccugcuugccaucgccaugggacugguguuuauuugcgucaaaaauggcaacaugcgguguaccaucugcauuuga

SEQ ID NO: 202310 - RNA, 1683 nt, Artificial Sequence
  derived and/or modified CDS sequence (opt5) from hemagglutinin__InfluenzaA__AGQ81028
augaacacccagauccugguguucgcccucauugcuaucauucccacaaaugccgacaagaucugccugggccaccaugcggucagcaacgggacgaaaguuaauacccuuacagagagaggaguggaaguggucaacgcuaccgagacaguggaacggaccuccauuccucgcaucuguucuaagggcaaaagaacaguugaucuggggcaaugcggacuccugggcaccaucacggggccgccccagugugaccaguuucuugaguucagcgccgaucugauuaucgaacggcgcgagggauccgacgugugcuacccuggcaaguuugucaaugaggaagcccucagacagauucugcgggagucuggcgggaucgauaaagaagcuaugggauucaccuauagcggcauucgcacaaacggggccaccuccgcuuguagacggucuggaagcuccuuuuacgccgagaugaaguggcugcucagcaauacagacaacgcggccuuucccccuaccacgaagucuuauaaaaauacacgcaaggcucccgcccugaucauuuggggcauccaccauuccgggagcaccgcugagcaaacaaaacuuuacggaucuggcaacaagcuggugaccguuagauccagcaauuaucagcagucuuucgugccuuccccgggcgccgggccccaggucaacggacaaagcggccggaucgauuuccacuggcucaugcugaauccuaacgacaccgugacauuuuccuucaauggggcguuuauugcccccgaucgcgcuucuuuccuuagaggaaaaagcaugggcauccaguccggggugcaggucgacgccaacugcgaaggagauuguuaccauagcggcggcacgauuaucucuaaccugccuuuucagaauauugacucccggguuguggggaagugcccccgcuaugugaagcagaaaagccuccugcuggcuaccggaaugaagaacgucccggagaucccuaaaggcagaggacucuucggggccaucgccggcuucauugaaaaugggugggagggccugaucgauggaugguacggcuuucggcaccaaaacgcucagggggaaggaacagcggccgacuacaagucuacccaaagcgcuauuaaucagaugacaggcaaacuuaacagacugaucgagaagaccaaucagcaguucgagcucauugacaacgaauuuacggagguggaaaaacaaaucgggaauguuaucaacuggacacgcgauuccauuaccgagauguggucuuauaaugccgaacugcuuguggccauggagaaccagcacaccaucgaccuggcugauagcgagaugaauaagcucuacgaacgggucaagagacagcugcgcgagaacgccgaagaggacggaacaggcuguuucgaaauuuuucauaaaugcgaugacgauuguauggcguccauccggaauaacaccuaugaccacagcaaguacagagaggaggcuaugcagaaccgcauucaaaucgaucccgugaaacugucuuccggguauaaggacguuauucucugguucagcuuuggcgccucuugcuucauccugcuugccaucgcuaugggacugguguuuauuugcgucaaaaauggcaacaugcgguguacaaucugcauuuga

SEQ ID NO: 202311 - RNA, 1683 nt, Artificial Sequence
  derived and/or modified CDS sequence (opt5) from hemagglutinin__InfluenzaA__AGQ81029
augaacacccagauccugguguucgcccucauugcuaucauucccacaaaugccgacaagaucugccugggccaccaugcggucagcaacgggacgaaaguuaauacccuuacagagagaggaguggaaguggucaacgcuaccgagacaguggaacggaccuccauuccucgcaucuguucuaagggcaaaagaacaguugaucuggggcaaugcggacuccugggcaccaucacggggccgccccagugugaccaguuucuugaguucagcgccgaucugauuaucgaacggcgcgagggauccgacgugugcuacccuggcaaguuugucaaugaggaagcccucagacagauucugcgggagucuggcgggaucgauaaagaagcuaugggauucaccuauagcggcauucgcacaaacggggugaccuccgccuguagacggucuggaagcuccuuuuacgcugagaugaaguggcugcucagcaauacagacaacgccgcguuucccccuaugaccaagucuuauaaaaauacgcgcaaggcccccgcucugaucauuuggggcauccaccauuccgggagcacagccgagcaaaccaaacuuuacggaucuggcaacaagcugguuacagugagauccagcaauuaucagcagucuuucaugccuuccccgggcgcugggccccaggucaacggacaaagcggccggaucgauuuccacuggcucaugcugaauccuaacgacaccgugaccuuuuccuucaauggggccuuuauugcgcccgaucgcgccucuuuccuuagaggaaaaagcaugggcauccaguccggggugcaggucgacgcuaacugcgaaggagauuguuaccauagcggcggcacaauuaucucuaaccugccuuuucagaauauugacucccggguuguggggaagugcccccgcuaugugaagcagaaaagccuccugcuggccacgggaaugaagaacgucccggagaucccuaaaggcagaggacucuucggggcuaucgccggcuucauugaaaaugggugggagggccugaucgauggaugguacggcuuucggcaccaaaacgcccagggggaaggaaccgcugcggacuacaagucuacacaaagcgccauuaaucagaugaccggcaaacuuaacagacugaucgagaagacaaaucagcaguucgagcucauugacaacgaauuuaccgagguggaaaaacaaaucgggaauguuaucaacuggacgcgcgauuccauuacagagguguggucuuauaaugcugaacugcuugucgccauggagaaccagcacaccaucgaccuggccgauagcgagaugaauaagcucuacgaacgggugaagagacagcugcgcgagaacgcugaagaggacggaaccggcuguuucgaaauuuuucauaaaugcgaugacgauuguauggccuccauccggaauaacacauaugaccacagcaaguacagagaggaggcgaugcagaaccgcauucaaaucgaucccguuaaacugucuuccggguauaaggacgugauucucugguucagcuuuggcgcuucuugcuucauccugcuugccaucgccaugggacuggucuuuauuugcgugaaaaauggcaacaugcgguguaccaucugcauuuga

SEQ ID NO: 202312 - RNA, 1683 nt, Artificial Sequence
  derived and/or modified CDS sequence (opt5) from hemagglutinin__InfluenzaA__AGQ81031
augaacacccagauccugguguucgcccucauugcuaucauucccacaaaugccgacaagaucugccugggccaccaugcggucagcaacgggacgaaaguuaauacccuuacagagagaggaguggaaguggucaacgcuaccgagacaguggaacggaccuccauuccucgcaucuguucuaagggcaaaagaacaguugaucuggggcaaugcggacuccugggcaccaucacggggccgccccagugugaccaguuucuugaguucagcgccgaucugauuaucgaacggcgcgagggauccgacgugugcuacccuggcaaguuugucaaugaggaagcccucagacagauucugcgggagucuggcgggaucaacaaagaagcuaugggauucaccuauagcggcauucgcacaaauggggccaccuccgcuuguagacggucuggaagcuccuuuuacgccgagaugaaguggcugcucagcaacacagauaaugcggccuuucccccuaugaccaagucuuauaaaaacacgcgcaaggcucccgcccugaucauuuggggcauccaccauuccgggagcacagcugagcaaaccaaacuuuacggaucuggcaauaagauggugacaguuagauccagcaacuaucagcagucuuucgugccuuccccgggcgccgggccccaggucaauggacaaagcggccggaucgacuuccacuggcugaugcucaacccuaaugauaccgugaccuuuuccuucaacggggcguuuauugcccccgaccgcgcuucuuuccugagaggaaaaagcaugggcauccaguccggggugcaggucgaugccaacugcgaaggagacuguuaccauagcggcggcacaauuaucucuaaucuuccuuuucagaacauugauucccggguuguggggaagugcccccgcuaugugaagcagaaaagccugcuccuggcuacgggaaugaagaaugucccggagaucccuaaaggcagagggcuguucggagccaucgccggcuucauugaaaacgggugggagggccucaucgacggaugguacggcuuucggcaccaaaaugcucagggggaaggaaccgcggccgauuacaagucuacacaaagcgcuauuaaccagaugaccggcaaacugaauagacuuaucgagaagacaaaccagcaguucgagcugauugacaaugaauuuaccgagguggaacgccaaaucgggaacguuaucaauuggacgcgggacuccauuacagagguguggucuuauaacgccgaacuccuggucgccauggagaaucagcacaccaucgaucuugcugacagcgagaugaacaaacuguacgaaagagugaagcgccagcuccgggagaaugccgaagaggauggaaccggcuguuucgaaauuuuucauaagugcgacgaugacuguauggcguccaucagaaacaacacauaugaucacagcaaauaccgcgaggaggcuaugcagaaucggauucaaaucgaccccguuaagcugucuuccggguauaaagaugugauucugugguucagcuuuggcgccucuugcuucauccuccuggccaucgcuaugggacuugucuuuauuugcgugaagaacggcaauaugagauguaccaucugcauuuga

SEQ ID NO: 202313 - RNA, 1683 nt, Artificial Sequence; identical to SEQ ID NO: 202308
  derived and/or modified CDS sequence (opt5) from hemagglutinin__InfluenzaA__AGQ81032

SEQ ID NO: 202314 - RNA, 1683 nt, Artificial Sequence; identical to SEQ ID NO: 202309
  derived and/or modified CDS sequence (opt5) from hemagglutinin__InfluenzaA__AGQ81033

SEQ ID NO: 202315 - RNA, 1683 nt, Artificial Sequence; identical to SEQ ID NO: 202308
  derived and/or modified CDS sequence (opt5) from hemagglutinin__InfluenzaA__AGQ81034

SEQ ID NO: 202316 - RNA, 1683 nt, Artificial Sequence; identical to SEQ ID NO: 202309
  derived and/or modified CDS sequence (opt5) from hemagglutinin__InfluenzaA__AGQ81035

SEQ ID NO: 202317 - RNA, 1683 nt, Artificial Sequence; identical to SEQ ID NO: 202309
  derived and/or modified CDS sequence (opt5) from hemagglutinin__InfluenzaA__AGQ81036

SEQ ID NO: 202318 - RNA, 1683 nt, Artificial Sequence; identical to SEQ ID NO: 202309
  derived and/or modified CDS sequence (opt5) from hemagglutinin__InfluenzaA__AGQ81037

SEQ ID NO: 202319 - RNA, 1683 nt, Artificial Sequence; identical to SEQ ID NO: 202301
  derived and/or modified CDS sequence (opt5) from hemagglutinin__InfluenzaA__AGQ81038

SEQ ID NO: 202320 - RNA, 1683 nt, Artificial Sequence; identical to SEQ ID NO: 202301
  derived and/or modified CDS sequence (opt5) from hemagglutinin__InfluenzaA__AGQ81039

SEQ ID NO: 202321 - RNA, 1683 nt, Artificial Sequence
  derived and/or modified CDS sequence (opt5) from hemagglutinin__InfluenzaA__AGQ81040
augaacacccagauccugguguucgcccucauugcuaucauucccacaaaugccgacaagaucugccugggccaccaugcggucagcaacgggacgaaaguuaauacccuuacagagagaggaguggaaguggucaacgcuaccgagacaguggaacggaccaauauuccucgcaucuguuccaagggcaaaagaacaguugaucuggggcaaugcggacuccugggcaccaucacggggccgccccagugugaccaguuucuugaguucucugccgaucugauuaucgaacggcgcgagggaagcgacgugugcuacccuggcaaguuugucaacgaggaagcccucagacagauucugcgggaguccggcgggaucgauaaagaagcuaugggauucaccuauucuggcauucgcacaaauggggccaccagcgcuuguagacgguccggaucuagcuuuuacgccgagaugaaguggcugcucuccaacacagacaaugcggccuucccccaaaugaccaagagcuauaaaaacacgcgcaaggauccugcucugaucauuuggggcauccaccauucuggguccacagccgagcagaccaaacuuuacggaagcggcaauaagcuggugacaguugggucuuccaacuaucagcagagcuuugugcccucuccuggggcuagaccgcaagucaauggacaguccggccggaucgacuuccacuggcucaugcugaaccccaaugauaccgugaccuuuagcuucaacggggccuuuauugcgccugaccgcgccuccuuccuuagaggaaaaucuaugggcauccagagcggggugcagauugaugcuaacugcgaaggagacuguuaccauuccggcggcacaaucauuagcaaucugcccuuucaaaacaucgauucucgggccgucgggaagugcccucgcuauguuaagcagaaaucccuccugcuggcuacgggaaugaagaaugugcccgagaucccgaaaggcagaggccucuucggagccauugccggcuucaucgaaaacgggugggagggccugauugacggaugguacggcuuucggcaccagaaugcucaaggggaaggaaccgcggccgacuacaagagcacacagucugcuaucgaucagauuaccggcaaacuuaacagacugaucgagaagacaaaucagcaauucgagcucaucgacaacgaauuuaccgagguggaaaaacagauugggaaugucaucaacuggacgcgcgauagcauuacagaggugugguccuauaaugccgaacugcuuguugccauggagaaccagcacaccaucgaccuggcugauucugagaugaauaagcucuacgaacgggugaagagacagcugcgcgagaacgccgaagaggacggaaccggcuguuucgaaauuuuucauaaaugcgaugacgauuguauggcgagcauccggaauaacacauaugaccacuccaaguacagagaggaggcuaugcaaaaccgcauucagaucgauccugucaaacugagcucuggguauaaggacgugauccucugguucuccuuuggcgccagcugcuucauucugcuugccaucgcuaugggacugguuuuuauuugcgugaaaaauggcaacaugcgguguaccaucugcauuuga

SEQ ID NO: 202322 - RNA, 1683 nt, Artificial Sequence
  derived and/or modified CDS sequence (opt5) from hemagglutinin__InfluenzaA__AGQ81041
augaacacccagauccugguguucgcccucauugcuaucauucccacaaaugccgacaagaucugccugggccaccaugcggucagcaacgggacgaaaguuaauacccuuacagagagaggaguggaaguggucaacgcuaccgagacaguggaacggaccaauauuccucgcaucuguuccaagggcaaaagaacaguugaucuggggcaaugcggacuccugggcaccaucacggggccgccccagugugaccaguuucuugaguucucugccgaucugauuaucgaacggcgcgagggaagcgacgugugcuacccuggcaaguuugucaacgaggaagcccucagacagauucugcgggaguccggcgggaucgauaaagaagcuaugggauucaccuauucuggcauucgcacaaauggggccaccagcgcuuguagacgguccggaucuagcuuuuacgccgagaugaaguggcugcucuccaacacagacaaugcggccuucccccaaaccacaaagagcuauaaaaacacgcgcaaggauccugcucugaucauuuggggcauccaccauucuggguccaccgccgagcagacaaaacuuuacggaagcggcaauaagcuggugaccguugggucuuccaacuaucagcagagcuuugugcccucuccuggggcuagaccgcaagucaauggacaguccggccggaucgacuuccacuggcucaugcugaaccccaaugauaccgugacauuuagcuucaacggggccuuuauugcgccugaccgcgccuccuuccuuagaggaaaaucuaugggcauccagagcggggugcaggucgaugcuaacugcgaaggagacuguuaccauuccggcggcacgauuaucagcaaucugcccuuucaaaacauugauucucgggccguugggaagugcccucgcuaugugaagcagaaaucccuccugcuggcuaccggaaugaagaaugugcccgagaucccgaaaggcagaggccucuucggagccaucgccggcuucauugaaaacgggugggagggccugaucgacggaugguacggcuuucggcaccagaaugcucaaggggaaggaacagcggccgacuacaagagcacccagucugcuauugaucagaucacaggcaaacuuaacagacugauugagaagaccaaucagcaauucgagcucaucgacaacgaauuuacggaggucgaaaaacagaucgggaaugugauuaacuggacacgcgauagcaucaccgagguuugguccuauaaugccgaacugcuuguggccauggagaaccagcacaccauugaccuggcugauucugagaugaauaagcucuacgaacgggucaagagacagcugcgcgagaacgccgaagaggacggaacaggcuguuucgaaaucuuucauaaaugcgaugacgauuguauggcgagcauucggaauaacaccuaugaccacuccaaguacagagaggaggcuaugcaaaaccgcauccagauugauccugugaaacugagcucuggguauaaggacguuauccucugguucuccuuuggcgccagcugcuucauccugcuugccauugcuaugggacugguguuuaucugcgucaaaaauggcaacaugcgguguacaauuugcaucuga

SEQ ID NO: 202323 - RNA, 1683 nt, Artificial Sequence
  derived and/or modified CDS sequence (opt5) from hemagglutinin__InfluenzaA__AGQ81042
augaacacccagauccugguguucgcccucauugcuaucauucccacaaaugccgacaagaucugccugggccaccaugcggucagcaacgggacgaaaguuaauacccuuacagagagaggaguggaaguggucaacgcuaccgagacaguggaacggaccaauauuccucgcaucuguuccaagggcaaaagaacaguugaucuggggcaaugcggacuccugggcaccaucacggggccgccccagugugaccaguuucuugaguucucugccgaucugauuaucgaacggcgcgagggaagcgacgugugcuacccuggcaaguuugucaacgaggaagcccucagacagauucugcgggaguccggcgggaucgauaaagaagcuaugggauucaccuauucuggcauucgcacaaauggggccaccagcgcuuguagacgguccggaucuagcuuuuacgccgagaugaaguggcugcucuccaacacagacaaugcggccuucccccaaaugaccaagagcuauaaaaacacgcgcaaggauccugcucugaucauuuggggcauccaccauucuggguccacagccgagcagaccaaacuuuacggaagcggcaauaagcuggugacaguugggucuuccaacuaucagcagagcuuugugcccucuccuggggcuagaccgcaagucaauggacaguccggccggaucgacuuccacuggcucaugcugaaccccaaugauaccgugaccuuuagcuucaacggggccuuuauugcgccugaccgcgccuccuuccuuagaggaaaaucuaugggcauccagagcggggugcaggucgaugcuaacugcgaaggagacuguuaccauuccggcggcacaauuaucagcaaucugcccuuucaaaacauugauucucgggccguugggaagugcccucgcuaugugaagcagaaaucccuccugcuggcuacgggaaugaagaaugugcccgagaucccgaaaggcagaggccucuucggagccaucgccggcuucauugaaaacgggugggagggccugaucgacggaugguacggcuuucggcaccagaaugcucaaggggaaggaaccgcggccgacuacaagagcacacagucugcuauugaucagaucaccggcaaacuuaacagacugauugagaagacaaaucagcaauucgagcucaucgacaacgaauuuaccgaggucgaaaaacagaucgggaaugugauuaacuggacgcgcgauagcaucacagagguuugguccuauaaugccgaacugcuuguggccauggagaaccagcacaccauugaccuggcugauucugagaugaauaagcucuacgaacgggucaagagacagcugcgcgagaacgccgaagaggacggaaccggcuguuucgaaaucuuucauaaaugcgaugacgauuguauggcgagcauucggaauaacacauaugaccacuccaaguacagagaggaggcuaugcaaaaccgcauccagauugauccugugaaacugagcucuggguauaaggacguuauccucugguucuccuuuggcgccagcugcuucauccugcuugccauugcuaugggacugguguuuaucugcgucaaaaauggcaacaugcgguguaccauuugcaucuga

SEQ ID NO: 202324 - RNA, 1683 nt, Artificial Sequence
  derived and/or modified CDS sequence (opt5) from hemagglutinin__InfluenzaA__AGQ81043
augaacacccagauccugguguucgcccucauugcuaucauucccacaaaugccgacaagaucugccugggccaccaugcggucagcaacgggacgaaaguuaauacccuuacagagagaggaguggaaguggucaacgcuaccgagacaguggaacggaccaauauuccucgcaucuguuccaagggcaaaagaacaguugaucuggggcaaugcggacuccugggcaccaucacggggccgccccagugugaccaguuucuugaguucucugccgaucugauuaucgaacggcgcgagggaagcgacgugugcuacccuggcaaguuugucaacgaggaagcccucagacagauucugcgggaguccggcgggaucgauaaagaagagaugggauucaccuauucuggcauucgcacaaauggggcuaccagcgccuguagacgguccggaucuagcuuuuacgcugagaugaaguggcugcucuccaacacagacaaugccgcguucccccaaaugaccaagagcuauaaaaacacgcgcaagucuccugcccugaucguguggggcauucaccauuccguuagcacagcugaacagaccaaacuuuacgggucuggaaauaagcuggugacagucggcuccagcaacuaucagcagucuuuugugcccuccccuggcgccagaccgcaagugaaugggcucagcggacggaucgauuuccacuggcugaugcuuaaccccaaugacaccgucaccuuuuccuucaacggcgcuuuuaucgccccugaucgcgcgucuuuccugagagggaaaagcaugggcauucaguccggaguucagguggacgccaacugcgagggggauuguuaccauagcggaggcacaaucauuucuaaucuccccuuucagaacaucgacucccgggcugugggcaagugcccucgcuaugucaagcaaagaagccugcugcucgccacggggaugaaaaaugugcccgaaauuccgaagggacggggccuguucggggcuaucgccggauucaucgagaacggcugggaagggcuuauugauggcugguacggauuuagacaccagaaugcccagggcgaggggaccgcugcggacuacaaaucuacacaaagcgccaucgaccagauuaccggaaagcugaaccgccucaucgagaaaacaaaucagcaguucgaacugauugauaacgaguuuaaugaaguugagaagcaaaucggcaacgugaucaauuggacccgggacuccauuacggaagucuggucuuauaacgcugagcuucugguggccauggagaaucagcacacaaucgaucucgccgacagcgaaauggauaaacuguacgagagaguuaagcgccagcugcgggaaaacgcugaggaagacgggaccggauguuucgagauuuuucauaagugcgaugacgauuguauggccuccaucagaaauaacaccuaugaccacagcaaauaccgcgaggaagcgaugcagaaccggauucaaaucgauccugugaagcucucuuccggcuauaaagacgucauucugugguucagcuuuggggcuucuugcuucauccuucuggccaucgugaugggccucgucuuuauuugcgugaagaauggaaacaugagauguacaaucugcauuuga

SEQ ID NO: 202325 - RNA, 1683 nt, Artificial Sequence; identical to SEQ ID NO: 202060
  derived and/or modified CDS sequence (opt5) from hemagglutinin__InfluenzaA__AGQ81044

SEQ ID NO: 202326 - RNA, 1683 nt, Artificial Sequence; identical to SEQ ID NO: 202060
  derived and/or modified CDS sequence (opt5) from hemagglutinin__InfluenzaA__AGQ81045

SEQ ID NO: 202327 - RNA, 1683 nt, Artificial Sequence; identical to SEQ ID NO: 202060
  derived and/or modified CDS sequence (opt5) from hemagglutinin__InfluenzaA__AGQ81046

SEQ ID NO: 202328 - RNA, 1683 nt, Artificial Sequence; identical to SEQ ID NO: 202309
  derived and/or modified CDS sequence (opt5) from hemagglutinin__InfluenzaA__AGQ81047

SEQ ID NO: 202329 - RNA, 1683 nt, Artificial Sequence; identical to SEQ ID NO: 202308
  derived and/or modified CDS sequence (opt5) from hemagglutinin__InfluenzaA__AGQ81049

SEQ ID NO: 202330 - RNA, 1683 nt, Artificial Sequence; identical to SEQ ID NO: 202309
  derived and/or modified CDS sequence (opt5) from hemagglutinin__InfluenzaA__AGQ81050

SEQ ID NO: 202331 - RNA, 1683 nt, Artificial Sequence
  derived and/or modified CDS sequence (opt5) from hemagglutinin__InfluenzaA__AGQ81051
augaacacccagauccugguguucgcccucauugcuaucauucccacaaaugccgacaagaucugccugggccaccaugcggucagcaacgggacgaaaguuaauacccuuacagagagaggaguggaaguggucaacgcuaccgagacaguggaacggaccuccauuccucgcaucuguucuaagggcaaaagaacaguugaucuggggcaaugcggacuccugggcaccaucacggggccgccccagugugaccaguuucuugaguucagcgccgaucugauuaucgaacggcgcgagggauccgacgugugcuacccuggcaaguuugucaaugaggaagcccucagacagauucugcgggagucuggcgggaucaacaaagaagcuaugggauucaccuauagcggcauucgcacaaauggggccaccuccgcuuguagacggucuggaagcuccuuuuacgccgagaugaaguggcugcucagcaacacagauaaugcggccuuucccccuaugaccaagucuuauaaaaacacgcgcaaggcucccgcccugaucauuuggggcauccaccauuccgggagcacagcugagcaaaccaaacuuuacggaucuggcaauaagcuggugacaguuagauccagcaacuaucagcagucuuucgugccuuccccgggcgccgggccccaggucaauggacaaagcggccggaucgacuuccacuggcucaugcugaacccuaaugauaccgugaccuuuuccuucaacggggcguuuauugcccccgaccgcgcuucuuuccuuagaggaaaaagcaugggcauccaguccggggugcaggucgaugccaacugcgaaggagacuguuaccauagcggcggcacaauuaucucuaaucugccuuuucagaacauugauucccggguuguggggaagugcccccgcuaugugaagcagaaaagccuccugcuggcuacgggaaugaagaaugucccggagaucccuaaaggcagaggacucuucggggccaucgccggcuucauugaaaacgggugggagggccugaucgacggaugguacggcuuucggcaccaaaaugcucagggggaaggaaccgcggccgauuacaagucuacacaaagcgcuauuaaccagaugaccggcaaacuuaauagacugaucgagaagacaaaccagcaguucgagcucauugacaaugaauuuaccgagguggaaaaacaaaucgggaacguuaucaauuggacgcgcgacuccauuacagagguguggucuuauaacgccgaacugcuugucgccauggagaaucagcacaccaucgaucuggcugacagcgagaugaacaagcucuacgaacgggugaagagacagcugcgcgagaaugccgaagaggauggaaccggcuguuucgaaauuuuucauaaaugcgacgaugacuguauggcguccauccggaacaacacauaugaucacagcaaguacagagaggaggcuaugcagaaucgcauucaaaucgaccccguuaaacugucuuccggguauaaggaugugauucucugguucagcuuuggcgccucuugcuucauccugcuugccaucgcuaugggacuggucuuuauuugcgugaaaaacggcaauaugcgguguaccaucugcauuuga

SEQ ID NO: 202332 - RNA, 1683 nt, Artificial Sequence; identical to SEQ ID NO: 202309
  derived and/or modified CDS sequence (opt5) from hemagglutinin__InfluenzaA__AGQ81052

SEQ ID NO: 202333 - RNA, 1683 nt, Artificial Sequence
  derived and/or modified CDS sequence (opt5) from hemagglutinin__InfluenzaA__AGQ81053
augaacacccagauccugguguucgcccucauugcuaucauucccacaaaugccgacaagaucugccugggccaccaugcggucagcaacgggacgaaaguuaauacccuuacagagagaggaguggaaguggucaacgcuaccgagacaguggaacggaccuccauuccucgcaucuguucuaagggcaaaagaacaguugaucuggggcaaugcggacuccugggcaccaucacggggccgccccagugugaccaguuucuugaguucagcgccgaucugauuaucgaacggcgcgagggauccgacgugugcuacccuggcaaguuugucaaugaggaagcccucagacagauucugcgggagucuggcgggaucaacaaagaagcuaugggauucaccuauagcggcauucgcacaaauggggccaccuccgcuuguagacggucuggaagcuccuuuuacgccgagaugaaguggcugcucagcaacacagauaaugcggccuuucccccuaugaccaagucuuauaaaaacacgcgcaaggcucccgcccugaucauuuggggcauccaccauuccgggagcacagcugagcaaaccaaacuuuacggaucuggcaauaagauggugacaguuagauccagcaacuaucagcagucuuucgugccuuccccgggcgccgggccccaggucaauggacaaagcggccggaucgacuuccacuggcugaugcucaacccuaaugauaccgugaccuuuuccuucaacggggcguuuauugcccccgaccgcgcuucuuuccugagaggaaaaagcaugggcauccaguccggggugcaggucgaugccaacugcgaaggagacuguuaccauagcggcggcacaauuaucucuaaucuuccuuuucagaacauugauucccggguuguggggaagugcccccgcuaugugaagcagaaaagccugcuccuggcuacgggaaugaagaaugucccggagaucccuaaaggcagagggcuguucggagccaucgccggcuucauugaaaacgggugggagggccucaucgacggaugguacggcuuucggcaccaaaaugcucagggggaaggaaccgcggccgauuacaagucuacacaaagcgcuauuaaccagaugaccggcaaacugaauagacuuaucgagaagacaaaccagcaguucgagcugauugacaaugaauuuaccgagguggaaaaacaaaucgggaacguuaucaauuggacgcgcgacuccauuacagagguguggucuuauaacgccgaacuccuggucgccauggagaaucagcacaccaucgaucuugcugacagcgagaugaacaagcuguacgaacgggugaagagacagcuccgcgagaaugccgaagaggauggaaccggcuguuucgaaauuuuucauaaaugcgacgaugacuguauggcguccauccggaacaacacauaugaucacagcaaguacagaaaagaggcuaugcagaaucgcauucaaaucgaccccguuaagcugucuuccggguauaaagaugugauucugugguucagcuuuggcgccucuugcuucauccuccuggccaucgcuaugggacuugucuuuauuugcgugaagaacggcaauaugcgguguaccaucugcauuuga

SEQ ID NO: 202334 - RNA, 1683 nt, Artificial Sequence; identical to SEQ ID NO: 202309
  derived and/or modified CDS sequence (opt5) from hemagglutinin__InfluenzaA__AGQ81055

SEQ ID NO: 202335 - RNA, 1683 nt, Artificial Sequence; identical to SEQ ID NO: 202309
  derived and/or modified CDS sequence (opt5) from hemagglutinin__InfluenzaA__AGQ81056

SEQ ID NO: 202336 - RNA, 1683 nt, Artificial Sequence; identical to SEQ ID NO: 202309
  derived and/or modified CDS sequence (opt5) from hemagglutinin__InfluenzaA__AGQ81057

SEQ ID NO: 202337 - RNA, 1683 nt, Artificial Sequence; identical to SEQ ID NO: 202309
  derived and/or modified CDS sequence (opt5) from hemagglutinin__InfluenzaA__AGQ81058

SEQ ID NO: 202338 - RNA, 1683 nt, Artificial Sequence; identical to SEQ ID NO: 202060
  derived and/or modified CDS sequence (opt5) from hemagglutinin__InfluenzaA__AGQ81059

SEQ ID NO: 202339 - RNA, 1683 nt, Artificial Sequence; identical to SEQ ID NO: 202060
  derived and/or modified CDS sequence (opt5) from hemagglutinin__InfluenzaA__AGQ81060

SEQ ID NO: 202340 - RNA, 1683 nt, Artificial Sequence; identical to SEQ ID NO: 202060
  derived and/or modified CDS sequence (opt5) from hemagglutinin__InfluenzaA__AGQ81061

SEQ ID NO: 202341 - RNA, 1683 nt, Artificial Sequence
  derived and/or modified CDS sequence (opt5) from hemagglutinin__InfluenzaA__AGQ81081
auggagguggucagccugaucaccauucuccugguuaucacaggcuccaacgccgacaagauuugcaucggguaccagucuacgaauagcaccgaaacaguggauacccuuacagagaacaaugugcccgucacccacgcuaaagaacugcuccauacagagcacaacggaaugcugugugccaccaaucuuggcagaccucugauucucgacacgugcaccaucgaagggcugaucuauggaaacccguccugugauauucugcucggcgggcgggaguggucuuacaucguggagcgccccagcgcgguuaauggacugugcuauccuggcaacguggaaaaucuugaggaacugagaucccucuucucuagcgcuuccagcuaccaacggauucagaucuuucccgacacaauuuggaacgucucuuauuccggcaccagcaaggccuguucugauuccuucuaccgcagcaugagauggcugacacagaaaaauaacgccuauccugugcaggacgcucaauacaccaauaaccgggggcgcaauauccuuuuuauguggggaauuaaccaucccccuacggauacagcccagaccaaccuguacacaagaaccgacaccacaacgucuguugcuaccgaggauaucaaucggacauucaagccgcucaucggcccccgcccucuggugaacgggcugcagggaagaauugacuauuacugggccguccuccggcccggccagacccugcgcaucagauccaaugggaaccuuauugcgccuugguauggacacauccugagcggcgagucccauggccggauucucaaaacagaucuuaauucugggaacugcguggugcaaugucagaccgaacgcggaggccugaauacgacacugcccuuucacaacgucagcaaguacgccuucgggaauugcccgaaguauguuggagugaaaucccucaagcuggcugugggccugagaaacgucccugcccggagcucuagagggcucuuuggagcuaucgccggcuucaucgagggcgggugguccggacugguggcgggcugguacggguuucagcacagcaaugaccagggaaccggcauggccgcugaucgcgacucuacccaaaaagccauugacaagaucacaagcaaaguuaacaauauuguggauaagaugaacaagcaguaugaaaucauugaccaugaguucuccgaaaucgagacccggcuuaauaugaucaacaacaaaauugaugaccagauccaagauauuugggcuuacaaugccgagcugcucguccugcuugaaaaccagaagacacuggacgagcacgaugccaaugugaacaaucucuacaacaaaguuaagagagcucuggggucuaaugcgguggaagacggcaaaggauguuuugagcuguaucauaagugcgauaaccaguguauggaaacgauccgcaauggcaccuacaaccggagaaaauauaaggaggagagccgccucgaacggcagaagauugagggggucaaacuggaauccgagggaacauacaagauccuuaccauuuauagcacaguggccucuucccuggucaucgcuaugggcuucgccgccuuucucuucugggcuaugagcaaugggucuugcagaugcaacaucuguauuuga

SEQ ID NO: 202342 - RNA, 1683 nt, Artificial Sequence
  derived and/or modified CDS sequence (opt5) from hemagglutinin__InfluenzaA__AGQ81086
auggagguggucagccugaucaccauucuccugguuaucacaggcuccaacgccgacaagauuugcaucggguaccagucuacgaauagcaccgaaacaguggauacccuuacagagaacaaugugcccgucacccacgcuaaagaacugcuccauacagagcacaacggaaugcugugugccaccaaucuuggcagaccucugauucucgacacgugcaccaucgaagggcugaucuauggaaacccguccugugaucugcuccugggcgggcgggaguggucuuacauuguggagcgccccagcgcgguuaauggacuuugcuauccuggcaacguggaaaaucuggaggaacucagaucccuguucucuagcgcuuccagcuaccaacggauccagauuuuucccgacacaaucuggaacgucucuuauuccggcaccagcaaggccuguucugauuccuucuaccgcagcaugagauggcuuacacagaaaaauaacgccuauccugugcaggacgcucaauacaccaauaaccgggggcgcaauauucuguuuauguggggaaucaaccaucccccuacggauacagcccagaccaaccucuacacaagaaccgacaccacaacgucuguugcuaccgaggauauuaaucggacauucaagccgcugaucggcccccgcccucuggugaacgggcuccagggaagaaucgacuauuacugggccguccugcggcccggccagacccuucgcauuagauccaaugggaaccugaucgcgccuugguauggacacauucucagcggcgagucccauggccggauccugaaaacagaucuuaauucugggaacugcguggugcaaugucagaccgaacgcggaggccugaauacgacacuccccuuucacaacgucagcaaguacgccuucgggaauugcccgaaguauguuggagugaaaucccugaagcuggcugugggccucagaaacgucccugcccggagcucuagagggcuguuuggagcuauugccggcuucaucgagggcgggugguccggacuuguggcgggcugguacggguuucagcacagcaaugaccagggaaccggcauggccgcugaucgcgacucuacccaaaaagccaucgacaagauuacaagcaaaguuaacaauaucguggauaagaugaacaagcaguaugaaauuaucgaccaugaguucuccgaaauugagacccggcugaauaugaucaacaacaaaaucgaugaccagauucaagauaucugggcuuacaaugccgagcuccugguccuucuggaaaaccagaagacacucgacgagcacgaugccaaugugaacaaucuguacaacaaaguuaagagagcucuggggucuaaugcgguggaagacggcaaaggauguuuugagcucuaucauaagugcgauaaccaguguauggaaacgauucgcaauggcaccuacaaccggagaaaauauaaggaggagagccgccuggaacggcagaagaucgagggggucaaacuugaauccgagggaacauacaagauucugaccaucuauagcacaguggccucuucccucgucauugcuaugggcuucgccgccuuucuguucugggcuaugagcaaugggucuugcagaugcaacaucuguaucuga

SEQ ID NO: 202343 - RNA, 1683 nt, Artificial Sequence
  derived and/or modified CDS sequence (opt5) from hemagglutinin__InfluenzaA__AGQ81087
auggagaccgugagccugaucacaaugcuccuggucgccacgguuauuaacgcugacaagaucugcauuggcuaccaguccaccaauucuacagaaaccguggauacacuuaccgagaacaaugugcccgucacacacgccaaagaacugcuccauaccgagcacaacgggaugcugugugcgacgaaucuuggacauccucugauccucgauaccugcacaauugaaggccugaucuaugggaacccgagcugugaccugcuccugggaggcagagagugguccuacaucguggagcggcccucugcuguuaaugggcuuugcuauccuggaaacguggaaaaucuggaggaacuccgcagccuguucuccucugccagcuccuaccaacggauucagaucuuucccgacaccauuuggaacgucagcuauucuggcacauccaaggccuguagcgauucuuucuacagauccaugcgcuggcuuacccagaaaaauaacgcuuauccuauccaggacgcccaauacacgaauaacagagagaagaauauucuguuuauguggggcaucaaccaucccccuacagauaccgcucagacaaaccucuacacccggaccgacacaacgaccagcguggccacagaggaaauuaaucgcaccuucaaaccgcugaucgggcccagaccucugguuaacggacuccagggccggaucgauuauuacuggucugugcugaagcccgggcagacacuucgcauuagauccaauggaaaccugaucgcgccuugguauggccacauucucagcggggagucccacggacggguccugaagaccgaccuuaaacgcggcucuugcacggugcaaugucagacagaaaagggcgggcugaauaccacccuccccuuucagaacgugagcaaauacgccuucggaaauugcuccaaguaugucggcguuaaaagccugaagcuggcuguggggcucagaaacgugccgucucgguccagccgcggacuguuuggcgccaucgcuggguucauugagggaggcuggucuggccuugucgccgggugguacggauuucagcacagcaaugaucaaggcguggggauggcggccgacagagauuccacacagaaggcuaucgacaaaaugaccucuaagguuaacaauaucguggacaaaaugaacaagcaguaugaaauuaucaaucaugaguucagcgagauugaaacacggcugaacaugaucaauaacaaaauugaugaccaaauccaggauaucugggccuacaacgcugagcuccugguccuucuggaaaaucagaagacgcucgacgagcacgaugccaacgugaauaaccuguacaauaaaguuaagagagcccugggauccaacgcuguggaagacggcaagggguguuuugagcucuaucauaaaugcgaugaccaguguauggagaccauucgcaauggcacauacaaccggagacgcuaucaagaagagagcaagcuggaacggcagaaaaucgagggagucaaacuugaaucugagggcaccuacaagauucugacaaucuauuccaccguggcgagcucucucgucauugccaugggguucgcugccuuucuguucugggccauguccaauggaagcugcagaugcaacaucuguauuuga

SEQ ID NO: 202344 - RNA, 1683 nt, Artificial Sequence
  derived and/or modified CDS sequence (opt5) from hemagglutinin__InfluenzaA__AGQ81092
auggagguggucagccugaucaccauucuccugguuaucacaggcuccaacgccgacaagauuugcaucggguaccagucuacgaauagcaccgaaacaguggauacccuuacagagaacaaugugcccgucacccacgcuaaagaacugcuccauacagagcacaacggaaugcugugugccaccaaucuuggcagaccucugauucucgacacgugcaccaucgaagggcugaucuauggaaacccguccugugaucugcuccugggcgggcgggaguggucuuacauuguggagcgccccagcgcgguuaauggacuuugcuauccuggcaacguggaaaaucuggaggaacucagaucccuguucucuagcgcuuccagcuaccaacggauccagauuuuucccgacacaaucuggaacgucucuuauaccggcacauccaaggccuguagcgauucuuucuaccgcuccaugagauggcuuacccagaaaaauaacgccuauccugugcaggacgcucaauacacgaauaaccgggggcgcaauauucuguuuauguggggaaucaaccaucccccuacagauaccacacagaccaaccucuacaccagaacagacacgaccacaagcguugccaccgaggauauuaaucggacauucaagccgcugaucggcccccgcccucuggugaacgggcuccagggaagaaucgacuauuacugggcuguccugcggcccggccagacccuucgcauuagaucuaaugggaaccugaucgccccuugguauggacacauucucuccggcgagagccauggccggauccugaaaacggaucuuaaguccgggaauugcguggugcaaugucagacagaacgcggaggccugaacaccacccuccccuuucacaaugucucuaaguacgcguucgggaacugcccgaaauauguuggagucaagagccugaaacuggccgugggccucagaaaugugccugcucgguccagcagagggcuguuuggagccauugcuggcuucaucgagggcggguggucuggacuuguggccggcugguacggguuucagcacuccaacgaccagggaacaggcauggcggccgaucgcgacagcacccaaaaggcuaucgacaaaauuacaucuaagguuaauaacaucguggauaagaugaauaaacaguaugaaauuaucgaccaugaguucagcgaaauugagacgcggcugaacaugaucaauaacaagaucgaugaccagauucaagauaucugggccuacaacgcugagcuccugguccuucuggaaaaucagaaaacccucgacgagcacgaugccaacgugaauaaccuguacaauaagguuaaaagagcccugggguccaacgcuguggaagacggcaagggauguuuugagcucuaucauaaaugcgauaaucaguguauggaaacaauucgcaacggcaccuacaaucggagaaaguauaaggaggagucucgccuggaacggcagaaaaucgagggggucaaacuugaaagcgagggaacauacaagauucugaccaucuauuccacgguggcgagcucucucgucauugccaugggcuucgcugccuuucuguucugggccauguccaacgggagcugcagaugcaauaucuguaucuga

SEQ ID NO: 202345 - RNA, 1683 nt, Artificial Sequence
  derived and/or modified CDS sequence (opt5) from hemagglutinin__InfluenzaA__AGQ81095
auggagguggucagccugaucaccauucuccugguuaucacaguguccaacgccgacaagauuugcaucggcuaccagucuacgaauagcaccgaaacagugaacacccuuacagaggauaauguccccgugacccacgcuaaagaacugcuccauacagagcacaacgggaugcugugugccaccaaucuuggaagaccucugauucucgacacgugcaccaucgaaggccugaucuaugggaacccguccugugaucugcuccugggaggccgggaguggucuuacauuguugagcgccccagcgcggugaaugggcuuugcuauccuggaaacgucgaaaaucuggaggaacucagaucccuguucucuagcgcuuccagcuaccaacggauccagauuuuucccgacacaaucuggaacgugucuuauuccggcaccagcaaggccuguucugauuccuucuaccgcagcaugagauggcuuacacagaaaaauaacgccuauccuguucaggacgcucaauacaccaauaaccggggccgcaauauucuguuuaugugggggaucaaccaucccccuacggauacagcccagaccaaccucuacacaagaaccgacaccacaacgucuguggcuaccgaggauauuaaucggacauucaagccgcugaucggaccccgcccucuggucaacggccuccaggggagaaucgacuauuacugggccgugcugaaacccggacagacccuucggauucgcuccaauggcaaccugaucgcgccuugguaugggcacauucucagcggagagucccauggcagaauccugaagacagaucuuaauucuggcaacugcgugguccaaugucagagcgaacgcgggggacugaauaccacgcuccccuuucacaacguuuccaaguacgccuucggcaauugcccgaaauaugugggggucaagagccugaaacuggcugugggacuccggaacgugccugccagaucuucccggggccuguuuggggcuauugccggauucaucgagggcggcuggagcgggcuuguugcgggaugguacggcuuucagcacucuaaugaccaggggacaggaauggccgcugauagagacagcacccaaaaggccaucgacaaaauuaccuccaaggugaacaauaucgucgauaagaugaacaaacaguaugaaauuaucgaccaugaguucucugaaauugagacacgccugaauaugaucaacaacaagaucgaugaccagauucaagauaucugggcuuacaaugccgagcuccuggugcuucuggaaaaccagaaaacccucgacgagcacgaugccaauguuaacaaucuguacaacaaggugaaacgggcucugggcagcaaugcggucgaagacgggaagggcuguuuugagcucuaucauaaaugcgauaaccaguguauggaaacaauuagaaauggaacguacgaccgccggaaguauaaggaggaguccagacuggaacgccagaaaaucgagggcgugaaacuugaaagcgaggggaccuacaagauucugacaaucuauucuaccgucgccuccagccucgugauugcuaugggauucgccgccuuucuguucugggcuaugucuaacggcuccugccggagaaauaucugcaucuga

SEQ ID NO: 202346 - RNA, 1683 nt, Artificial Sequence
  derived and/or modified CDS sequence (opt5) from hemagglutinin__InfluenzaA__AGQ81099
auggagaccgugagccugaucacaauucuccugaucgucacgguuuccaacgccgacaagauuugcaucggcuaccagucuaccaauagcacagaaaccguggauacacuuaccgagaacaaugugcccgucacacacgcuaaagaacugcuccauaccgagcacaacgggaugcugugugccacgaaucuuggacauccucugauucucgauaccugcacaaucgaaggccugaucuaugggaacccguccugugaccugcuccugggaggcagagaguggucuuacauuguggagcggcccagcgcgguuaaugggcuuugcuauccuggaaacguggaaaaucuggaggaacuccgcucccuguucucuagcgcuaacuccuaccaaagaauccagauuuuucccgacaccaucuggaaugucagcuauucuggcacauccaaggccuguagcgauucuuucuaccgguccaugcgcuggcuuacccagaaaaacaaugccuauccuacgcaggacgcucaauacacaaacaauagagagaagaacauucuguuuauguggggcaucaaccaucccccuaccgauacagcccagaccaaucucuacacccggacagacacgaccacaagcguggcuaccgaggaaauuaaccgcacauucaaaccgcugaucgggcccagaccucugguuaauggacuccagggccggaucgauuauuacuggucugugcugaagcccgggcagacccuucgcauuagauccaacggaaaucugaucgccccuugguauggccacauucucagcggggagucccacggacggauccugaagacggaccuuaaacgcggcucuugcacaguccaaugucagaccgaaaagggcgggcugaacaccacacuccccuuucagaaugugagcaaauacgcguucggaaacugcuccaaguaugugggcgucaaaagccugaagcuggccguugggcucagaaaugugccgucucgguccagccgcggacuguuuggcgcuauugccggguucaucgagggaggcuggucuggccuuguggcugggugguacggauuucagcacagcaacgaucaaggcgucgggauggccgcggacagagauuccacccagaaggccaucgacaaagugacaucuaagguuaauaacauuguggacaaaaugaauaagcaguaugaaaucauugaucaugaguucagcgaggucgaaacgcggcugaacaugaucaauaacaaaauugacgaucaaauccaggacaucugggcuuacaacgccgagcuccuggugcuucuggaaaaucagaagacccucgaugagcacgacgcuaacguuaauaaccuguacaauaaagugaagagagcccugggauccaacgccgucgaagauggcaagggguguuuugagcucuaucauaaaugcgacgaucaguguauggagacaauucgcaauggcaccuacaaccggagaaaguaucaagaagagagcaaacuggaacgccagaagaucgagggagugaaacuugaaucugagggcacauacaagauucugaccaucuauuccacggucgcuagcucucucgugauugcgaugggguucgccgcuuuucuguucugggccauguccaauggaagcugccggagaaacaucugcauuuga

SEQ ID NO: 202347 - RNA, 1683 nt, Artificial Sequence
  derived and/or modified CDS sequence (opt5) from hemagglutinin__InfluenzaA__AGQ81100
auggagaccgugagccugaucacaaugcuccuggucgccacgguuauuaacgcugacaagaucugcauuggcuaccaguccaccaauucuacagaaaccguggauacacuuaccgagaacaaugugcccgucacacacgccaaagaacugcuccauaccgagcacaacgggaugcugugugcgacgaaucuuggacauccucugauccucgauaccugcacaauugaaggccugaucuaugggaacccgagcugugaccugcuccugggaggcagagagugguccuacaucguggagcggcccucugcuguuaaugggcuuugcuauccuggaaacguggaaaaucuggaggaacuccgcagccuguucuccucugccagcuccuaccaacggauucagaucuuucccgacaccauuuggaacgucagcuauucuggcacauccaaggccuguagcgauucuuucuacagauccaugcgcuggcuuacccagaaaaauaacgcuuauccuauccaggacgcccaauacacgaauaacagagagaagaauauucuguuuauguggggcaucaaccaucccccuacagauaccgcucagacaaaccucuacacccggaccgacacaacgaccagcguggccacagaggaaauuaaucgcaccuucaaaccgcugaucgggcccagaccucugguuaacggacuccagggccggaucgauuauuacuggucugugcugaagcccgggcagacacuucgcauuagauccaauggaaaccugaucgcgccuugguauggccacauucucagcggggagucccacggacggauccugaagaccgaccuuaaacgcggcucuugcacgguccaaugucagacagaaaagggcgggcugaauaccacccuccccuuucagaacgugagcaaauacgccuucggaaauugcuccaaguaugugggcgucaaaagccugaagcuggcuguugggcucagaaacgugccgucucgguccagccgcggacuguuuggcgccauugcuggguucaucgagggaggcuggucuggccuuguggccgggugguacggauuucagcacagcaaugaucaaggcgucgggauggcggccgacagagauuccacacagaaggcuaucgacaaaauuaccucuaaggugaacaauaucguugacaaaaugaacaagcaguaugaaauuaucgaucaugaguucagcgagguggaaacacggcugaauaugauuaacaauaaaaucgacgaucaaauccaggacauuugggccuacaacgcugagcuccugguccuucuggaaaaccagaagacgcucgaugagcacgacgccaaugugaacaaucuguacaacaaaguuaagagagcccugggauccaaugcuguggaagauggcaagggguguuuugagcucuaucauaaaugcgacgaucaguguauggagaccauccgcaacggcacauacaaucggagacgcuaucaagaagagagcaagcuggaacggcagaaaauugagggagucaaacuugaaucugagggcaccuacaagauccugacaauuuauuccaccguggcgagcucucucgucaucgccaugggguucgcugccuuucuguucugggccauguccaacggaagcugcagacgcaauauuugcaucuga

SEQ ID NO: 202348 - RNA, 1683 nt, Artificial Sequence
  derived and/or modified CDS sequence (opt5) from hemagglutinin__InfluenzaA__AGQ81123
auggagguggucagccugaucaccauucuccugguuaucacaguguccaacgccgacaagauuugcaucggcuaccagucuacgaauagcaccgaaacagugaacacccuuacagaggauaauguccccgugacccacgcuaaagaacugcuccauacagagcacaacgggaugcugugugccaccaaucuuggaagaccucugauucucgacacgugcaccaucgaaggccugaucuaugggaacccguccugugaucugcuccugggaggccgggaguggucuuacauuguugagcgccccagcgcggugaaugggcuuugcuauccuggaaacgucgaaaaucuggaggaacucagaucccuguucucuagcgcuuccagcuaccaacggauccagauuuuucccgacacaaucuggaacgugucuuauuccggcaccagcaaggccuguucugauuccuucuaccgcagcaugagauggcuuacacagaaaaauaacgccuauccuguucaggacgcucaauacaccaauaacaagggccggaauauucuguuuaugugggggaucaaccaucccccuacggauacagcccagaccaaccucuacacacgcaccgacaccacaacgucuguggcuaccgaggauauuaauagaacauucaaaccgcugaucggaccccggccucuggucaacggccuccaggggcgcaucgacuauuacugggccgugcugaagcccggacagacccuucggauuagauccaauggcaaccugaucgcgccuugguaugggcacauucuccugggagagagccauggccgcauccuuaagacagaucucaauuccggcgacugcgugguccaaugucagucugaaagagggggacugaacaccacgcugcccuuucacaauguuagcaaauacgccuucggcaacugcccgaaguaugugggggugaaaucccugaagcucgcugucggacugcggaaugugccugcccgcagcacaagaggccuuuuuggggcuauugccggauucaucgagggcggcuggucugggcugguugcgggaugguacggcuuucagcacuccaacgaucaggggaccggaauggccgcugaccgggacagcacccaaaaagccaucgauaagauuacaucuaaggugaauaacaucgucgacaaaaugaauaagcaguaugaaauuaucgaucaugaguucagcgaaauugagaccagacucaacaugaucaauaacaaaaucgacgaucagauucaagacaucugggcuuacaacgccgagcugcuugugcugcucgaaaaucagaagacacuggaugagcacgacgccaacguuaauaaccuguacaauaaagugaagcgcgcucucggcuccaacgcggucgaagaugggaaaggcuguuuugagcuguaucauaagugcgacaaucaguguauggaaacgauucggaacggaaccuacgauagacgcaaguauaaagaggagucucggcuugaaagacagaagaucgagggcgugaaacuggaaagcgaggggacauacaagauucucaccaucuauuccacagucgccagcucucuggugauugcuaugggauucgccgccuuucuguucugggcuauguccaauggcagcugccgcugcaacaucuguaucuga

SEQ ID NO: 202349 - RNA, 1683 nt, Artificial Sequence
  derived and/or modified CDS sequence (opt5) from hemagglutinin__InfluenzaA__AGQ81124
auggagguggccacccugaucacaauucuccuggucaucacgggcagcaacgcugacaagauuugcaucggguaccaauccaccaauucuacagaaaccguugauacacuuaccgagaacaaugugcccgugacacacgccaaagaacugcuccauaccgagcacaacggaaugcugugugcgacgaaucuuggcagaccucugauucucgauaccugcacaaucgaagggcugaucuauggaaacccgagcugugaccugccccucgagggccgggagugguccuacauugucgaacgcccuucugcugugaaugggguuugcuaucccggaaacguggagaaucuggaagaacuuagaagccuguucuccucugccagcuccuaccaacggauccagauuuuuccugacagcaucuggaacgucucuuauuccggcaccagcaaggccuguucugauuccuucuaccgcaauaugagauggcucacacagaaagacaacaauuaucccgugcaggaugcucaauacaccaacaaucggggcaagaacauucuguuuaugugggggaucaaccauccuccgacggacacagcccagaccaaucuuuacacacgcaccgauaccacaacgagcguugcuaccgaggacauuaacagaacauucaaaccccugaucggaccucggccccucgugaauggccugcaggggcgcaucgauuauuacugggccguccugaagccuggacagacccucagagugcggucuaacggcaaucugauugcgcccugguaugggcacauccuucugggagaaucccauggccgcauucucaagacagaccugaaaagcggcaacugcgugguccaaugucagaccgagagagggggacuuaauacgacacugccguuucacaacguuuccaaguacgccuucggcaauugcccuaaauauaucggggugaagucucucaaacuggcugugggacugcggaacguccccgcccgcagcuccagaggccucuuuggggcuauugccggauucaucgaaggcggcuggagcgggcugguggcgggaugguacggcuuucagcacucuaaugaucaggggaccggaauggccgcugaccgggacuccacccaaaaggccaucgauaagauuacaagcaaaguuaacaauaucguggacaagaugaacaaacaguaugagauuaucgaucaugaguucucugagauugagaccagacuuaauaugaucaacgacaagaucgaugaccagauucaagauaucugggcuuacaacgccgaacugcucguccugcuugagaaucagaaaacacuggacgaacacgaugccaacgugaauaaccucuacaauaagguuaaacgcgcucugggcagcaacgcgguggaggacgggaagggcuguuuugaucuguaucauaagugcgacaaucaguguauggaaacgauucggaacggaaccuacaauagacgcaaauaucagaaggagucccggcucgagagacagaaaaucgaaggcgucaagcuggagucugaagggacauacaaaauucuuaccaucuauagcacaguggccuccagccuggucauugcuaugggauucgccgccuuucucuucugggcuaugucuaacggcuccugccgcugcaauaucuguaucuga

SEQ ID NO: 202350 - RNA, 1683 nt, Artificial Sequence
  derived and/or modified CDS sequence (opt5) from hemagglutinin__InfluenzaA__AGQ81125
auggagguggccacccugaucacaauucuccuggucaucacgggcagcaacgcugacaagauuugcaucggguaccaguccaccaauucuacagaaaccguugauacacuuaccgagaacaaugugcccgugacacacgccaaagaacugcuccauaccgagcacaacggaaugcugugugcgacgaaucuuggcagaccucugauucucgauaccugcacaaucgaagggcugaucuauggaaacccgagcugugaccugccccucgagggccgggagugguccuacauugucgaacgcccuucugcugugaaugggguuugcuaucccggaaacguggagaaucuggaggaacuuagaagccuguucuccucugccagcuccuaccaacggauccagauuuuuccugacagcaucuggaacgucucuuauuccggcaccagcaaggccuguucugauuccuucuaccgcagcaugagauggcucacacagaaagacaauaacuaucccgugcaggaugcucaauacaccaauaaccggggcaagaauauucuguuuaugugggggaucaaccauccuccgacggacacagcccagaccaaccuuuacacacgcaccgauaccacaacgucuguugcuaccgaggacauuaauagaacauucaaaccccugaucggaccucggccccucgugaacggccugcaggggcgcaucgauuauuacugggccguccugaagccuggacagacccucagagugcgguccaauggcaaccugauugcgcccugguaugggcacauccuucugggagugagccauggccgcauucucaagacagaccugaaauccggcaauugcgucguucaaugucagaccgaaagagggggacuuaacacgacacugccguuucacaaugugucuaaguacgccuucggcaacugcccuaaauauaucggggucaagagccucaaacuggcugugggacugcggaaugugcccgcccgcuccagcagaggccucuuuggggcuauugccggauucaucgagggcggcuggucugggcugguugcgggaugguacggcuuucagcacuccaacgaucaggggaccggaauggccgcugaccgggacagcacccaaaaggccaucgauaagauuacaucuaaagugaauaacaucgucgacaagaugaauaaacaguaugaaauuaucgaucaugaguucagcgaaauugagaccagacuuaacaugaucaaugacaagaucgaugaccagauucaagauaucugggcuuacaacgccgagcugcucgugcugcuugaaaaccagaaaacacuggacgagcacgaugccaauguuaacaaucucuacaacaaggugaaacgcgcucugggcuccaaugcggucgaagacgggaagggcuguuuugaucuguaucauaagugcgacaaccaguguauggagacgauucggaauggaaccuacaacagacgcaaauaucaggaagagucucggcucgagagacaaaagaucgaaggcgugaaacuggagagcgaagggacauacaagauucuuaccaucuauuccacagucgccagcucucuggugauugcuaugggauucgccgccuuucucuucugggcuauguccaauggcagcugccgcugcaacaucuguaucuga

SEQ ID NO: 202351 - RNA, 1683 nt, Artificial Sequence
  derived and/or modified CDS sequence (opt5) from hemagglutinin__InfluenzaA__AGQ81126
auggagaccaucagccugaugacaauucuccugaucacgaccgccuccaacgcugacaagauuugcaucggccaccagucuacaaauagcaccgaaacaguggauacccuuacagagaccaacguccccguuacgcaugccaaagaacugcuccaaaccgagcacaaugggaugcugugugcgacaaaccuuggacauccucugauucucgacacgugcacaaucgaaggccugaucuacgggaauccguccugugaucugcuccuggagggaagagaguggucuuauauuguggaacggcccagcgcugugaacgggaccugcuacccuggcaaugucgagaaccuugaagaacugcgcacccucuucuccucugccagcuccuaucagagaauccagauuuuucccgacacaaucuggaaugugaccuacacaggaaccagccggucuuguuccggcagcuucuaucgcucuaugagauggcugacccagaaguccggcuuuuacccuguucaagaugccaaauauacaaacaaucgggggaagaacauucuuuucguguggggaauccaccauccccacacguacaccgaccagacaacccuguacauucgcaaugauacaaccacgagcgucacaaccgaggaacucaacagaaucuuuaaaccugugaucguuccgcggcugcuggugaauggccagcaggggcgcauugacuauuacuggucuguccucaagcccggacaaacccugagagugcgguccaacggcaaccuuaucgcuccuugguaugggcacgugcugagcggaggcucccauggccgcauucucaagacagaucugaaagggggaaauugcgucguucagugucagaccgagaagggcggguucaacucuacacuucccuuucacaauaucagcaaauacgccuucggaacgugcccuaaguaugugaaagugaacucccugaagcucgcuauuggccugagaaauguccccgcccggagcaaccgcgggcuguuuggagcgaucgccggcuucaucgaaggcggguggccgggacucguggcuggcugguacggguuucagcauucuaaugaccaaggaguuggcauggccgcugauagagacuccacccagaaggccguggauaaaauuacaagcaaggucaacaauaucguggacaaaaugaacaagcaguaugagauuaucgaccacgaguucucugagguugagacccggcugaauaugauuaacaauaaaaucgaugaccaaauccaggauauuugggcguacaacgccgaacuucuggugcuccuggagaaucagaagacacuugacgaacacgaugcuaacgucaacaaucuguacaacaaagugaagagagcccucgggagcaaugcuauggaggacggcaagggauguuuugaacuguaucauaaaugcgaugaccaguguauggagaccauccgcaacggcacguacaaucggagaaaguaucgcgaggaaucccggcuggagcaacagagaauugaaggggucaaacucgagucugaaggaaccuacaagauccugacaauuuauagcaccguggccuccagccuuguucuggccaugggcuucgcugcguuccucuuuugggccaugucuaacggguccugccgcugcaauaucuguauuuga

SEQ ID NO: 202352 - RNA, 1683 nt, Artificial Sequence
  derived and/or modified CDS sequence (opt5) from hemagglutinin__InfluenzaA__AGQ81127
auggagguggccacccugaucacaauucuccugcuuaucacgggcagcaacgcugacaagauuugcaucggguaccaguccaccaauucuacagaaaccgucgauacacugaccgagaacaauguucccgugacacacgccaaagaacuccugcauaccgagcacaacggaaugcuuugugcgacgaaucugggcagaccucucauucuggauaccugcacaaucgaagggcugaucuauggaaacccgagcugugaccucccccuggagggccgggagugguccuacauuguggaacgcccuucugcugucaauggggugugcuaucccggaaacguugagaaucuugaagaacugagaagccucuucuccucugccagcuccuaccaacggauccagauuuuuccugacagcaucuggaacgugucuuauuccggcaccagcaaggccuguucugauuccuucuaccgcagcaugagauggcugacacagaaaaauaacaauuaucccguccaggacgcucaauacaccaacaaucggggcaagaacauucuuuuuaugugggggaucaaccauccuccgacggauacagcccagaccaaucuguacacacgcaccgacaccacaacgucuguggcuaccgaggauauuaacagaacauucaaaccccucaucggaccucggccccugguuaauggccugcaggggcgcaucgacuauuacugggccgugcucaagccuggacagacccugagaguccgguccaacggcaaucuuauugcgcccugguaugggcacauccugcucggagaaagccauggccgcauucugaagacagaucuuaaauccggcaacugcguggugcaaugucagaccgagagagggggacugaauacgacacucccguuucacaacgucucuaaguacgccuucggcaauugcccuaaauauaucgggguuaagagccugaaacuggcugugggacuccggaacgugcccgcccgcuccagcagaggccuguuuggggcuauugccggauucaucgaaggcggcuggucugggcuugucgcgggaugguacggcuuucagcacuccaaugaccaggggaccggaauggccgcugaucgggacagcacccaaaaggccaucgacaagauuacaucuaaagugaacaauaucguugauaagaugaacaaacaguaugagauuaucgaccaugaguucagcgagauugagaccagacugaauaugaucaacgauaagaucgacgaucagauucaagacaucugggcuuacaacgccgaacuccuggugcuucuggagaaucagaaaacacucgaugaacacgacgccaacgucaauaaccuguacaauaaggugaaacgcgcucugggcuccaacgcgguugaggaugggaagggcuguuuugaccucuaucauaagugcgauaaucaguguauggaaacgauucggaacggaaccuacaauagacgcaaauaucaggaggagucucggcuggaaagacaaaagaucgagggcgugaaacuugaaagcgaggggacauacaagauucugaccaucuauuccacagucgccagcucucucgugauugcuaugggauucgccgccuuucuguucugggcuauguccaacggcagcugccgcugcaauaucuguaucuga

SEQ ID NO: 202353 - RNA, 1683 nt, Artificial Sequence
  derived and/or modified CDS sequence (opt5) from hemagglutinin__InfluenzaA__AGQ81128
auggaggccgcuaccaucauuacaauccugcucgugauuacgggcagcaacgccgacaagaucugcauuggguaccaguccaccaauucuacagaaaccgucgauacacugaccgagaacaauguucccgugacacacgcgaaagaacuucugcauaccgagcacaacggaaugcucugugcuacgaaucugggcagaccucuuauccuggauaccugcacaaucgaagggcucauuuauggaaacccgagcugugaccugccccuggagggccgggagugguccuacaucguggaacgcccuucugccgucaauggggugugcuaucccggaaacguugagaaucucgaggaacugagaagccuuuucuccucugccagcuccuaccaacggauucagaucuuuccugacagcauuuggaacgugucuuauuccggcaccagcaaggcuuguucugauuccuucuaccgcagcaugagauggcugacacagaaaaauaacaauuaucccguccaggacgcccaauacaccaacaaucggggcaagaacauccucuuuaugugggggauuaaccauccuccgacggauacagcucagaccaaucuguacacacgcaccgacaccacaacgucuguggccaccgaggauaucaacagaacauucaaaccccuuaucggaccucggccccugguuaauggccuccaggggcgcauugacuauuacugggcggugcugaagccuggacagacccugagaguccgguccaacggcaaucucaucgcccccugguaugggcacauucugcuuggagaaagccauggccgcauccugaagacagaucucaaauccggcaacugcguggugcaaugucagaccgagagagggggacugaauacgacacuuccguuucacaacgucucuaaguacgcuuucggcaauugcccuaaauauauugggguuaagagccugaaacucgccgugggacugcggaacgugcccgcucgcuccagcagaggccuguuuggggccaucgcgggauucaucgaaggcggcuggucugggcucgucgccggaugguacggcuuucagcacuccaaugaccaggggaccggaauggcugccgaucgggacagcacccaaaaggcuauugacaagaucacaucuaaagugaacaauauuguugauaagaugaacaaacaguaugacaucauugaucaugaguucagcgaaaucgagaccagacugaauaugaucaacgacaagauugaugaccagauccaagauauuugggccuacaacgccgagcuucuggugcuccuggaaaaucagaaaacacuugacgagcacgaugcuaacgucaauaaccuguacaauaaggugaaacgcgcgcucggcuccaacgccguugaagacgggaagggcuguuuugaucuguaucauaagugcgacaaucaguguauggagacgauccggaacggaaccuacaauagacgcaaauaucaggaagagucucggcuggagagacaaaagauugaaggcgugaaacucgagagcgaagggacauacaagauccugaccauuuauuccacagucgcuagcucucuuguggucgccaugggauucgccgcuuuucuguucugggccauguccaacggcagcugccgcugcaauaucuguaucuga

SEQ ID NO: 202354 - RNA, 1683 nt, Artificial Sequence
  derived and/or modified CDS sequence (opt5) from hemagglutinin__InfluenzaA__AGQ81130
auggagaccgugagccugaucacaauucuccuggucguuacgaucggcaacgccgacaagauuugcaucggguaccaguccaccaauucuacagaaaccguggauacacuuaccgagaacaaugugcccgucacacacgcuaaagaacugcuccauaccgagcacaacggaaugcugugugccacgagccuuggccauccucugauucucgauaccugcacaaucgaagggcugaucuauggaaauccguccugugaccugcuccugggcgggagagaguggucuuacauuguggagcggcccagcgcgguuaacggacuuugcuauccuggcaauguggaaaaccuggaggaacuccgcucccuguucucuagcgcuagauccuaccaacggauccagauuuuucccgacaccaucuggaaugucagcuauucuggcacauccaaggccuguagcgauucuuucuaccgcuccaugagauggcuuacccagaaaaacaaugccuauccuauucaggacgcucaauacacgaacaaucaggagaagaacauccuguuuaugugggggauuaaucaucccccuacagauaccgugcagacaaaccucuacacccggaccgacacaacgaccagcguugccacagaggaaaucaaccgcaccuucaaaccgcugaucggacccagaccucuggugaauggccuccaggggcggauugauuauuacuggucuguccugaagcccggacaaacacuucgcaucagauccaacggcaaucugauugcuccuugguaugggcacauccucagcggagagucccacggccggauucugaagaccgaccuuaaacgcggcucuugcacggugcagugucagacagaaaaagggggacugaacaccacccuccccuuucagaaugugagcaaguacgccuucggcaacugcuccaaguauaucgggaugaaaagccugaagcuggcggucggacucagaaauguuccgucucgguccagccgcggccuguuuggggccaucgcuggauucauugagggcggcuggucugggcuuguggccggaugguacggcuuucaacacagcaacgaucagggggugggaauggcugccgacagagauuccacacagaaggcgaucgacaaaauuaccucuaaggucaauaacaucguggacaaaaugaauaagcaauaugaaauuaucgaucaugaguucagcgagguugaaacacggcugaacaugaucaauaacaaaauugacgaucagauccaggacauuugggccuacaaugcugagcuccuggugcuucuggaaaaccagaagacgcucgaugagcacgacgccaacgucaauaaccuguacaauaaagugaagagagcucugggcuuuaacgccguugaagaugggaagggcuguuucgagcucuaucauaaaugcgacgaucaauguauggagaccauccgcaauggaacauacaaccggagaaaguaucaggaagaguccaaacuggaacgccagaagauugagggcgugaaacuugaaagcgaggggaccuacaagauccugacaauuuauucuaccgucgccuccagccucgugaucgcuaugggauuugcggccuuccuguucugggcuaugucuaauggcuccugccggugcaacaucuguauuuga

SEQ ID NO: 202355 - RNA, 1683 nt, Artificial Sequence
  derived and/or modified CDS sequence (opt5) from hemagglutinin__InfluenzaA__AGQ81132
auggagaccaucagccugaugacaauucuccugaucacgaccgccuccaacgcugacaagauuugcaucggccaccagucuacaaauagcaccgaaacaguggauacccuuacagagaccaacguccccguuacgcaugccaaagaacugcuccaaaccgagcacaaugggaugcugugugcgacaaaccuuggacauccucugauucucgacacgugcacaaucgaaggccugaucuacgggaauccguccugugaucugcuccuggagggaagagaguggucuuauauuguggaacggcccagcgcugugaacgggaccugcuacccuggcaaugucgagaaccuugaagaacugcgcacccucuucuccucugccagcuccuaucagagaauccagauuuuucccgacacaaucuggaaugugaccuacacaggaaccagccggucuuguuccggcagcuucuaucgcucuaugagauggcugacccagaaguccggcuuuuacccuguucaagaugccaaauauacaaacaaucgggggaagaacauucuuuucguguggggaauccaccauccccacacguacaccgaccagacaacccuguacauucgcaaugauacaaccacgagcgucacaaccgaggaacucaacagaaucuuuaaaccugugaucguuccgcggcugcuggugaauggccagcaggggcgcauugacuauuacuggucuguccucaagcccggacaaacccugagagugcgguccaacggcaaccuuaucgcuccuugguaugggcacgugcugagcggaggcucccauggccgcauucucaagacagaucugaaagggggaaauugcgucguucagugucagaccgagaagggcggguucaacucuacacuucccuuucacaauaucagcaaauacgccuucggaacgugcccuaaguaugugaaagugaacucccugaagcucgcuauuggccugagaaauguccccgcccggagcaaccgcgggcuguuuggagcgaucgccggcuucaucgaaggcggguggccgggacucguggcuggcugguacggguuucagcauucuaaugaccaaggaguuggcauggccgcugauagagacuccacccagaaggccguggauaaaauuacaagcaaggucaacaauaucguggacaaaaugaaccggcaguaugagauuaucgaccacgaguucucugagguugagaccagacugaauaugauuaacaauaagaucgaugaccaaauccaggauauuugggcguacaacgccgaacuucuggugcuccuggagaaucagaaaacacuugacgaacacgaugcuaacgucaacaaucuguacaacaaggugaaacgcgcccucgggagcaaugcuauggaggacggcaagggauguuuugaacuguaucauaagugcgaugaccaguguauggagaccauccggaacggcacguacaauagacgcaaauaucgggaggaauccagacuggagcaacagcgcauugaaggggucaagcucgagucugaaggaaccuacaaaauccugacaauuuauagcaccguggccuccagccuuguucuggccaugggcuucgcugcguuccucuuuugggccaugucuaacggguccugccggugcaauaucuguauuuga

SEQ ID NO: 202356 - RNA, 1683 nt, Artificial Sequence
  derived and/or modified CDS sequence (opt5) from hemagglutinin__InfluenzaA__AGQ81133
auggagaccaucagccugaugacaauucuccugaucacgaccgccuccaacgcugacaagauuugcaucggccaccagucuacaaauagcaccgaaacaguggauacccuuacagagaccaacguccccguuacgcaugccaaagaacugcuccaaaccgagcacaaugggaugcugugugcgacaaaccuuggacauccucugauucucgacacgugcacaaucgaaggccugaucuacgggaauccguccugugaucugcuccuggagggaagagaguggucuuauauuguggaacggcccagcgcugugaacgggaccugcuacccuggcaaugucgagaaccuugaagaacugcgcacccucuucuccucugccagcuccuaucagagaauccagauuuuucccgacacaaucuggaaugugaccuacacaggaaccagccggucuuguuccggcagcuucuaucgcucuaugagauggcugacccagaaguccggcuuuuacccuguucaagaugccaaauauacaaacaaucgggggaagaacauucuuuucguguggggaauccaccauccccacacguacaccgaccagacaacccuguacauucgcaaugauacaaccacgagcgucacaaccgaggaacucaacagaaucuuuaaaccugugaucguuccgcggcugcuggugaauggccagcaggggcgcauugacuauuacuggucuguccucaagcccggacaaacccugagagugcgguccaacggcaaccuuaucgcuccuugguaugggcacauucugagcggaggcucccauggccgcauccucaagacagaucugaaaucugggaauugcgugguccagugucagaccgagaagggaggcuucaacagcacacuucccuuucacaauauuuccaaauacgccuucgggacgugcccuaaguauguuaaagugaacagccugaagcucgcuaucggacugagaaaugugcccgcccggucuaaccgcggccuguuuggggcgaucgccggauucauugaaggcggcuggccggggcucgucgcuggaugguacggcuuucagcauuccaaugaccaaggggugggaauggccgcugauagagacagcacccagaaggccguugauaaaaucacaucuaaggugaacaauauugucgacaaaaugaacaagcaguaugagaucauugaccacgaguucagcgagguggagacccggcugaauaugaucaacaauaaaaucgaugaccaaauucaggauaucugggcguacaacgccgaacuucugguucuccuggagaaucagaagacacuugacgaacacgaugcuaacgugaacaaucuguacaacaaagucaagagagcccucggcuccaaugcuauggaggacgggaagggcuguuuugaacuguaucauaaaugcgaugaccaguguauggagaccauucgcaacggaacguacaaucggagaaaguaucgcgaggaaucucggcuggagcaacagagaaucgaaggcgugaaacucgagagcgaagggaccuacaagauucugacaaucuauuccaccgucgccagcucucuugugcuggccaugggauucgcugcguuccucuuuugggccauguccaacggcagcugccgcugcaauauuuguaucuga

SEQ ID NO: 202357 - RNA, 1683 nt, Artificial Sequence
  derived and/or modified CDS sequence (opt5) from hemagglutinin__InfluenzaA__AGQ81134
auggagaccaucagccugaugacaauucuccugaucacgaccgccuccaacgcugacaagauuugcaucggccaccagucuacaaauagcaccgaaacaguggauacccuuacagagaccaacguccccguuacgcaugccaaagaacugcuccaaaccgagcacaaugggaugcugugugcgacaaaccuuggacauccucugauucucgauaccugcacaaucgaaggccugaucuacgggaauccguccugugaccugcuccuggagggaagagaguggucuuauauuguggaacggcccagcgcugccaacgggaccugcuacccuggcaauguggagaaccccgaagaacuucgcacgcuguucuccucugccagcuccuaucagagaauccagauuuuuccugacacaaucuggaaugucaccuacacaggaaccagccggucuuguuccggcagcuucuaucgcucuaugagauggcucacccagaaguccggcuuuuaccccgugcaagaugcuaaauauacaaacaaucgggggaagaacauucuguucguuuggggaauccaccauccucacacguacaccgaccagacaacccuuuacauucgcaaugauacaaccacgagcgugacaaccgaggaacugaacagaaucuuuaaaccggucaucgugccccggcuccugguuaauggccagcaggggcgcauugacuauuacuggucugugcugaagccuggacaaacccucagaguccgguccaacggcaaccugaucgcccccugguaugggcacgugcuuagcggaggcucccauggccgcauucugaagacagaucucaaaucugggaauugcgugguccagugucagaccgagaagggaggcuucaacagcacacugccuuuucacaauaucuccaaauacgcuuucgggacgugccccaaguauguuaaagugaacagccuuaagcuggccauuggacucagaaaugugccggcgcggucuaaccgcggccuguuuggggccaucgcuggauucaucgaaggcggcuggccugggcuggucgccggaugguacggcuuucagcauuccaaugaccaaggggugggaauggcugccgauagagacagcacccagaaggcgguugauaaaauuacaucuaaggugaacaauaucgucgacaaaaugaacaagcaguaugagauuaucgaccacgaguucagcgagguggagacccggcucaauaugauuaacaauaaaaucgaugaccaaauccaggauauuugggccuacaacgcugaacugcuuguucugcucgagaaucagaagacacuggacgaacacgaugccaacgugaacaaucuuuacaacaaagucaagagagcucugggcuccaaugccauggaggacgggaagggcuguuuugaacucuaucauaaaugcgaugaccaguguauggagaccauccgcaacggaacguacaaucggagaaaguaucgcgaggaaucucggcuggagcaacagagaauugaaggcgugaaacuggagagcgaagggaccuacaagauccucacaauuuauuccaccgucgccagcucucuggugcuugcuaugggauucgcggccuuccuguuuugggcuauguccaacggcagcugccgcugcaauaucuguauuuga

SEQ ID NO: 202358 - RNA, 1683 nt, Artificial Sequence
  derived and/or modified CDS sequence (opt5) from hemagglutinin__InfluenzaA__AGQ81135
auggagguggccaccaucauuacaauccugcucgucauuacgggcagcaacgcugacaagaucugcauuggguaccaguccaccaauucuacagaaaccguugauacacugaccgagaacaaugugcccgugacacacgccaaagaacuucugcauaccgagcacaacggaaugcucugugcgacgaaucugggcagaccucuuauccuggauaccugcacaaucgaagggcucauuuauggaaacccgagcugugaccugccccuggagggccgggagugguccuacaucgucgaacgcccuucugcugugaaugggguuugcuaucccggaaacguggagaaucucgaagaacugagaagccuuuucuccucugccagcuccuaccaacggauucagaucuuuccugacagcauuuggaacgucucuuauuccggcaccagcaaggccuguucugauuccuucuaccgcagcaugagauggcugacacagaaaaauaacaauuaucccgugcaggacgcucaauacaccaacaaucggggcaagaacauccucuuuaugugggggauuaaccauccuccgacggauaaugcccagacaaaccuguacacccgcacagacaccaccacaucuguugcuacggaggauaucaauagaaccuucaaaccccuuaucggaccucggccccuggugaacggccuccaggggcgcauugacuauuacugggccguccugaagccuggacagacacugagagugcgguccaauggcaaccucaucgcgcccugguaugggcacauucugcuuggagaaagccauggccgcauccugaagaccgaucucaaauccggcaauugcgugguccaaugucagacagagagagggggacugaacaccacgcuuccguuucacaauguuucuaaguacagcuucggcaacugcccuaaauauauuggggugaagucccugaaacucgccgugggacugcggaauguccccgcucgcagcucuagaggccuguuuggggccaucgcuggauucaucgaaggcggcugguccgggcucguggccggaugguacggcuuucagcacagcaacgaccaggggacaggaauggcggccgaucgggacucuacccaaaaggcuauugacaagaucaccagcaaaguuaauaacauuguggauaagaugaauaaacaguaugagaucauugaccaugaguucaacgagaucgagacaagacugaacaugaucaauaacaagauugaugaccagauccaagauauuugggccuacaaugcugaacuucugguccuccuggagaaccagaaaacccuugacgaacacgaugccaaugugaacaaucuguacaacaagguuaaacgcgcccucggcuccaaugcuguggaggacgggaagggcuguuuugaucuguaucauaagugcgacaaccaguguauggaaacaauccggaauggaacguacaacagacgcaaauaucaggaggagucucggcuggaaagacaaaagauugagggcgucaaacucgaaagcgaggggaccuacaagauccugacaauuuauuccaccguggcgagcucucuugucaucgccaugggauucgcugccuuucuguucugggccauguccaauggcagcugccgcugcaacaucuguauuuga

SEQ ID NO: 202359 - RNA, 1683 nt, Artificial Sequence
  derived and/or modified CDS sequence (opt5) from hemagglutinin__InfluenzaA__AGQ81136
auggagaccaucagccugaugacaauucuccugaucacgaccgccuccaacgcugacaagauuugcaucggccaccagucuacaaauagcaccgaaacaguggauacccuuacagagaccaacguccccguuacgcaugccaaagaacugcuccaaaccgagcacaaugggaugcugugugcgacaaaccuuggacauccucugauucucgacacgugcacaaucgaaggccugaucuacgggaauccguccugugaucugcuccuggagggaagagaguggucuuauauuguggaacggcccagcgcugugaacgggaccugcuacccuggcaaugucgagaaccuugaagaacugcgcacccucuucuccucugccagcuccuaucagagaauccagauuuuucccgacacaaucuggaaugugaccuacacaggaaccagccggucuuguuccggcagcuucuaucgcucuaugagauggcugacccagaaguccggcuuuuacccuguucaagaugccaaauauacaaacaaucgggggaagaacauucuuuucguguggggaauccaccauccccacacguacaccgaccagacaacccuguacauucgcaaugauacaaccacgagcgucacaaccgaggaacucaacagaaucuuuaaaccugugaucguuccgcggcugcuggugaauggccagcaggggcgcauugacuauuacuggucuguccucaagcccggacaaacccugagagugcgguccaacggcaaccuuaucgcuccuugguaugggcacgugcugagcggaggcucccauggccgcauucucaagacagaucugaaagggggaaauugcgucguucagugucagaccgagaagggcggguucaacucuacacuucccuuucacaauaucagcaaauacgccuucggaacgugcccuaaguaugugaaagugaacucccugaagcucgcuauuggccugagaaauguccccgcccggagcaaccgcgggcuguuuggagcgaucgccggcuucaucgaaggcggguggccgggacucguggcuggcugguacggguuucagcauucuaaugaccaaggaguuggcauggccgcugauagagacuccacccagaaggccguggauaaaauuacaagcaaggucaacaauaucguggacaaaaugaaccggcaguaugagauuaucgaccacgaguucucugagguugagaccagacugaauaugauuaacaauaagaucgaugaccaaauccaggauauuuggacauacaacgcggaacuucuggugcuccuggagaaucagaaaacccuugacgaacacgaugccaacgucaacaaucuguacaacaaggugaaacgcgcucucgggagcaaugccauggaggacggcaagggauguuuugaacuguaucauaagugcgaugaccaguguauggagacgauccggaacggcaccuacaauagacgcaaauaucgggaggaauccagacuggagcaacagcgcauugaaggggucaagcucgagucugaaggaacauacaaaauccugaccauuuauagcacaguggcuuccagccuuguucuggccaugggcuucgccgcuuuccucuuuugggcgaugucuaacggguccugccggugcaauaucuguauuuga

SEQ ID NO: 202360 - RNA, 1683 nt, Artificial Sequence; identical to SEQ ID NO: 202355
  derived and/or modified CDS sequence (opt5) from hemagglutinin__InfluenzaA__AGQ81137

SEQ ID NO: 202361 - RNA, 1683 nt, Artificial Sequence
  derived and/or modified CDS sequence (opt5) from hemagglutinin__InfluenzaA__AGQ81138
auggaggccgcuaccaucauuacaauccugcucgccauuacgggcagcaacgcggacaagaucugcauuggguaccaauccaccaauucuacagaaaccguggauacacugaccgagaacaauguccccguuacacacgcuaaagaacuucugcauaccgagcacaacggaaugcucugugccacgaaucugggcagaccucuuauccuggauaccugcacaaucgaagggcucauuuauggaaacccgagcugugaccugccccuggagggccgggagugguccuacaucguggaacgcccuucugccgugaauggggucugcuaucccggacauguggagaaccucgaagaacugagaagccuuuucuccucugcuagcuccuaccaacggguucagauuuuuccugacagcaucuggaaugugucuuauuccggcaccagcaaggccuguucugauuccuucuaccgcagcaugagauggcugacacagaaaaacaauaacuaucccguccaggacgcucaauacaccaauaacaagggcaaaaauauucucuuuaugugggggaucaaccacccuccgacggauacagcccagaccaaccuguacacacggaccgacaccacaacgucuguggcgaccgaggauauuaaucgcacauucaagccccuuaucggaccuagaccccugguuaacggccuccaggggcggaucgacuauuacugggccgugcugaagccuggacagacccugcgcgucagauccaauggcaaccucauugcucccugguaugggcauauccugcuuggagaaagccacggccggauucugaaaacagaucucaaguccggcaauugcguggugcaaugucagaccgagcgcgggggacugaacacgacacuuccguuucacaaugucucuaaauacgccuucggcaacugcccuaaguauaucgggguuaaaagccugaagcucgcugugggacugagaaaugugcaugcccgguccagccgcggccuguuuggggcgauugccggauucaucgaaggcggcuggucugggcucgucgcuggaugguacggcuuucagcacuccaacgaccaggggaccggaauggccgcugauagagacagcacccaaaaggccaucgacaaaauuacaucuaaggugaauaacaucguugauaaaaugaauaagcaguaugagauuaucgaccaugaguucagcgagauugagacccggcugaacaugaucaaugauaaaaucgacgaucagauucaagacaucugggccuacaacgcugaacuucuggugcuccuggagaaccagaagacacuugaugaacacgacgcgaaugucaacaaucuguacaacaaagugaagagagcccucggcuccaaugcuguugaggaugggaagggcuguuuugaccuguaucacaaaugcgauaaccaguguauggaaacgauucgcaauggaaccuacaaccggagaaaguaucaggaggagucucgccuggaacggcagaaaaucgagggcgugaagcucgaaagcgaggggacauacaaaauucugaccaucuauuccacagucgccagcucucuugugauugccaugggauucgcugccuuucuguucugggcgauguccaauggcagcugcagaugcaacaucuguaucuga

SEQ ID NO: 202362 - RNA, 1683 nt, Artificial Sequence
  derived and/or modified CDS sequence (opt5) from hemagglutinin__InfluenzaA__AGQ81139
auggagguggccaccaucauuacaauccugcucgucauuacgggcgggaacgcugacaagaucugcauuggauaccagagcaccaauuccacagaaaccguugauacacugaccgagaacaaugugcccgugacacacgccaaagaacuucugcauaccgagcacaacggcaugcucugugcgacgaaucuggggagaccucuuauccuggauaccugcacaaucgaaggacucauuuauggcaacccgucuugugaccugccccuggaggggcgggaguggagcuacaucgucgaacgcuccucugcugugaauggaguuugcuauccuggcaacguggagaaucucgaagaacugagaagccuuuucuccucugccagcuccuaccaacggauucagaucuuucccgacagcauuuggaacgucucuuauuccggcaccagcaaggccuguucugauuccuucuaccgcagcaugagauggcugacacagaaaaauaacaauuauccugugcaggacgcucaauacaccaacaaucgggggaagaacauccucuuuauguggggaauuaaccaucccccuacggauaaugcccagacaaaccuguacacccgcacagacaccaccacaucuguugcuacggaggauaucaauagaaccuucaaaccgcuuaucggcccccggccucuggugaacgggcuccagggacgcauugacuauuacugggccguccugaagcccggccagacacugagagugcgguccaaugggaaccucaucgcgccuugguauggacacauucugcuuggcgaaagccauggccgcauccugaagaccgaucucaaauccgggaauugcgugguccaaugucagacagagagaggaggccugaacaccacgcuucccuuucacaauguuucuaaguacagcuucgggaacugcccgaaauauauuggagugaagucccugaaacucgccgugggccugcggaaugucccugcucgcagcucuagagggcuguuuggagccaucgcuggcuucaucgaaggcgggugguccggacucguggccggcugguacggguuucagcacagcaacgaccagggaacaggcauggcggccgaucgggacucuacccaaaaggcuauugacaagaucaccagcaaaguuaauaacauuguggauaagaugaauaaacaguaugagaucauugaccaugaguucuccgagaucgagacaagacugaacaugaucaacaauaagauugaugaccagauccaagauauuugggccuacaacgcugaacuucugguccuccuggagaaucagaaaacccuugacgaacacgaugccaacgugaauaaccuguacaauaagguuaaacgcgcccucgggucuaacgcuguggaggacggcaagggauguuuugaucuguaucauaagugcgacaaucaguguauggaaacaauccggaacggcacguacaauagacgcaaauaucaggaggagagccggcuggaaagacaaaagauugagggggucaaacucgaauccgagggaaccuacaagauccugacaauuuauagcaccguggcgucuucccuugucaucgccaugggcuucgcugccuuucuguucugggccaugagcaacgggucuugccgcugcaauaucuguauuuga

SEQ ID NO: 202363 - RNA, 1683 nt, Artificial Sequence
  derived and/or modified CDS sequence (opt5) from hemagglutinin__InfluenzaA__AGQ81141
auggaggccgcuaccaucauuacaauccugcucgugauuacgggcagcaacgccgacaagaucugcauuggguaccaguccaccaauucuacagaaaccgucgauacacugaccgagaacaauguucccgugacacacgcgaaagaacuucugcauaccgagcacaacggaaugcucugugcuacggaccugggcagaccucuuauccuggauaccugcacaaucgaagggcucauuuauggaaauccgagcugugaccugccccuggagggccgggagugguccuacaucguggaacgcccuucugccgucaacggggugugcuaucccggaaauguugagaaccucgaggaacugagaagccuuuucuccucugccagcuccuaccaacggauucagaucuuuccugauagcauuuggaaugugucuuauuccggcaccagcaaggcuuguucugacuccuucuaccgcagcaugagauggcugacacagaaaaacaauaacuaucccguccaggaugcccaauacaccaauaaccggggcaagaauauccucuuuaugugggggauuaaccauccuccgacggacacagcucagaccaaccuguacacacgcaccgauaccacaacgucuguggccaccgaggacaucaauagaacauucaaaccccuuaucggaccucggccccugguuaacggccuccaggggcgcauugauuauuacugggcggugcugaagccuggacagacccugagaguccgguccaauggcaaccucaucgcccccugguaugggcacauucugcuuggagaaagccauggccgcauccugaagacagaccucaaauccggcaauugcguggugcaaugucagaccgagagagggggacugaacacgacacuuccguuucacaaugucucuaaguacgcuuucggcaacugcccuaaauauauugggguuaagagccugaaacucgccgugggacugcggaaugugcccgcucgcuccagacggggccuguuuggggccaucgcgggauucaucgaaggcggcuggaccgggcucgucgccggaugguacggcuuucagcacagcaacgaucaggggaccggaauggcugccgacagagacucuacacaaaaggcuauugauaagaucaccuccaaagugaauaacauuguugacaagaugaauaaacaguaugauaucauugaccaugaguucagcgaaaucgagacacgccugaacaugaucaaugauaagauugacgaucagauccaagacauuugggccuacaacgccgagcuucuggugcuccuggaaaaccagaaaacgcuugaugagcacgacgcuaaugucaacaaucuguacaacaaggugaaaggcgcgcucgggucuaaugccguugaagauggcaagggauguuuugaccuguaucauaagugcgacaaccaguguauggagaccauccggaauggcacauacaacagacgcaaauaucaggaagagagccggcuggagagacaaaagauugaaggggugaaacucgaguccgaaggaaccuacaagauccugacaauuuauucuaccgucgcuagcucccuugugaucgccaugggcuucgccgcuuuucuguucugggccaugagcaaugggucuugccgcugcaacaucuguauuuga

SEQ ID NO: 202364 - RNA, 1683 nt, Artificial Sequence
  derived and/or modified CDS sequence (opt5) from hemagglutinin__InfluenzaA__AGQ81143
auggagguggccaccaucauuacaauccugcucgucauuacgggcagcaacgcugacaagaucugcauuggguaccaguccaccaauucuacagaaaccguugauacacugaccgagaacaaugugcccgugacacacgccaaagaacuucugcauaccgagcacaacggaaugcucugugcgacgaaucugggcagaccucuuauccuggauaccugcacaaucgaagggcucauuuauggaaacccgagcugugaccugccccuggagggccgggagugguccuacaucgucgaacgcccuucugcugugaaugggguuugcuaucccggaaacguggagaaucucgaagaacugagaagccuuuucuccucugccagcuccuaccaacggauucagaucuuuccugacagcauuuggaacgucucuuauuccggcaccagcaaggccuguucugauuccuucuaccgcagcaugagauggcugacacagaaaaauaacaauuaucccgugcaggacgcucaauacaccaacaaucggggcaagaacauccucuuuaugugggggauuaaccauccuccgacggauaaugcccagacaaaccuguacacccgcacagacaccaccacaucuguugcuacggaggauaucaauagaaccuucaaaccccuuaucggaccucggccccuggugaacggccuccaggggcgcauugacuauuacugggccguccugaagccuggacagacacugagagugcgguccaauggcaaccucaucgcgcccugguaugggcacauucugcuuggagaaagccauggccgcauccugaagaccgaucucaaauccggcaauugcgugguccaaugucagacagagagagggggacugaacaccacgcuuccguuucacaauguuucuaaguacagcuucggcaacugcccuaaauauauuggggugaagucccugaaacucgccgugggacugcggaauguccccgcucgcagcucuagaggccuguuuggggccaucgcuggauucaucgaaggcggcugguccgggcucguggccggaugguacggcuuucagcacagcaacgaccaggggacaggaauggcggccgaucgggacucuacccaaaaggcuauugacaagaucaccagcaaaguuaauaacauuguggauaagaugaauaaacaguaugagaucauugaccaugaguucuccgagaucgagacaagacugaacaugaucaacaauaagauugaugaccagauccaagauauuugggccuacaacgcugaacuucugguccuccuggagaaucagaaaacccuugacgaacacgaugccaacgugaauaaccuguacaauaagguuaaacgcgcccucggcucuaacgcuguggaggacgggaagggcuguuuugaucuguaucauaagugcgacaaucaguguauggaaacaauccggaacggaacguacaauagacgcaaauaucaggaggagagccggcuggaaagacaaaagauugagggcgucaaacucgaauccgaggggaccuacaagauccugacaauuuauagcaccguggcgucuucccuugucaucgccaugggauucgcugccuuucuguucugggccaugagcaacggcucuugccgcugcaauaucuguauuuga

SEQ ID NO: 202365 - RNA, 1683 nt, Artificial Sequence
  derived and/or modified CDS sequence (opt5) from hemagglutinin__InfluenzaA__AGQ81144
auggaggccgcuaccaucauuacaauccugcucguggucacgggcagcaacgccgacaagauuugcaucggguaccaguccaccaauucuacagaaaccguugauacacugaccgagaacaaugugcccgugacacacgcgaaagaacuucugcauaccgagcacaacggaaugcucugugcuacgaaucugggcagaccucuuauucuggauaccugcacaaucgaagggcucaucuauggaaacccgagcugugaccugccccuggagggccgggagugguccuacauugucgaacgcccuucugccgugaaugggguuugcuaucccggaaacguggagaaucucgaagaacugagaagccuuuucuccucugccagcuccuaccaacggauccagauuuuuccugacagcaucuggaacgucucuuauggcggcaccuccaaggcuuguagcgauucuuucuaccgcuccaugagauggcugacacagaaaaauaacaauuaucccgugcaggacgcccaauacaccaacaaucgggggaagaacauucucuuuauguggggaaucaaccauccuccgacggauacagcucagaccaaucuguacacacgcaccgacaccacaacgagcguugccaccgaggauauuaacagaacauucaaaccccuuaucggcccucggccccuggugaaugggcuccagggacgcaucgacuauuacugggcgguccugaagccuggccagacccugagagugcggucuaacgggaaucucauugcccccugguauggacacauccugcuuggcgaaucccauggccgcauucugaagacagaucucaaaagcgggaacugcgugguccaaugucagaccgagagaggaggccugaauacgacacuuccguuucacaacguuuccaaguacgcuuucgggaauugcccuaaauauaucggagugaagucucugaaacucgccgugggccugcggaacaugcccgcucgcagcuccagagggcuguuuggagccauugcgggcuucaucgaaggcggguggagcggacucgucgccggcugguacggguuucagcacucuaaugaccagggaaccggcauggcugccgaucgggacuccacccaaaaggcuaucgacaagauuacaagcaaagugaacaauaucguugauaagaugaacaaacaguaugagauuaucgaccaugaguucucugagauugagaccagacugaauaugaucaacgauaagaucgacgaucagauucaagacaucugggccuacaacgccgaacuucuggugcuccuggagaaucagaaaacacuugaugaacacgacgcuaacgucaauaaccuguacaauaaggugaaacgcgcgcucgggagcaacgccguugaggauggcaagggauguuuugaccuguaucauaagugcgauaaucaguguauggaaacgauucggaacggcaccuacaauagacgcaaauaucaggaggagucccggcuggaaagacaaaagaucgagggggugaaacucgaaucugagggaacauacaagauucugaccaucuauagcacagucgcuuccagccuugugauugccaugggcuucgccgcuuuucuguucugggccaugucuaacggguccugccgcugcaauaucuguaucuga

SEQ ID NO: 202366 - RNA, 1683 nt, Artificial Sequence
  derived and/or modified CDS sequence (opt5) from hemagglutinin__InfluenzaA__AGQ81146
auggaggccgcuaccaucauuacaauccugcucgugauuacgggcagcaacgccgacaagaucugcauuggguaccaguccaccaauucuacagaaaccgucgauacacugaccgagaacaauguucccgugacacacgcgaaagaacuucugcauaccgagcacaacggaaugcucugugcuacgaaucugggcagaccucuuauccuggauaccugcacaaucgaagggcucauuuauggaaacccgagcugugaccugccccuggagggcaaggagugguccuacaucguggaacggccuucugccgucaaugggaugugcuaucccggaaacguggagaaucucgaggaacugcgcagccuuuucuccucugccagcuccuaccaacggauucagaucuuuccugacagcauuuggaacguuucuuauuccggcaccagcaaggcuuguucugauuccuucuacagaagcaugcgcuggcugacacagaaaaauaacaauuaucccgugcaggacgcccaauacaccaacaauagaggcaaaaacauccucuuuaugugggggauuaaccauccuccgacggauacagcucagaccaaucuguacacacggaccgacaccaagacaucugucgccacggaggaaaucaaccgcaccuucaagccccuuaucggaccuagaccccuggugaauggccuccaggggcggauugauuauuacugggcgguucugaaaccuggacagacacugcgcgugagauccaacggcaaucucaucgcccccugguaugggcacauucugcuuggagagagccauggccggauccugaagaccgaccucaaauccggcaacugcgucgugcaaugucagacagaacgcgggggacugaauaccacgcuuccguuucacaacgugucuaaguacgcuuucggcaauugcccuaaauauauuggggucaagagccugaagcucgccguuggacugagaaacgugcccgcucgguccagccgcggccuguuuggggccaucgcgggauucaucgagggcggcuggucugggcucguggccggaugguacggcuuucagcacuccaaugaucaggggacaggaauggcugccgacagagauagcacccaaaaagcuauugacaagaucaccucuaaagucaacaauauuguggacaagaugaacaaacaguaugaaaucauugaucaugaguucagcgagaucgaaacacggcugaauaugaucaacgacaagauugaugaccagauccaagauauuugggccuacaacgccgagcuucugguucuccuggaaaaucagaaaacccuugacgagcacgauuccaacgugaauaaccuguacaauaaggucaagagagcucucggcucuaacgcgguggaagacgggaaaggcuguuuugaucuguaucauaagugcgacaaucaguguauggagacaauccgcaacggaacguacaaucggagaaaauaucaggaggaaagccgccuggagcggcaaaagauugaaggcguuaaacucgaguccgaagggaccuacaagauccugacaauuuauagcaccguggccucuucccuugucaucgcuaugggauucgccgccuuucuguucugggcuaugagcaacggcucuugcagaugcaauaucuguauuuga

SEQ ID NO: 202367 - RNA, 1683 nt, Artificial Sequence
  derived and/or modified CDS sequence (opt5) from hemagglutinin__InfluenzaA__AGQ81147
auggaggccgcuaccaucauuacaauccugcucgugauuacgggcagcaacgccgacaagaucugcauuggguaccaguccaccaauucuacagaaaccgucgauacacugaccgagaacaauguucccgugacacacgcgaaagaacuucugcauaccgagcacaacggaaugcucugugcuacgaaucugggcagaccucuuauccuggauaccugcacaaucgaagggcucauuuauggaaacccgagcugugaccugccccuggagggcaaggagugguccuacaucguggaacggccuucugccgucaaugggaugugcuaucccggaaacguggagaaucucgaggaacugcgcagccuuuucuccucugccagcuccuaccaacggauucagaucuuuccugacagcauuuggaacguuucuuauuccggcaccagcaaggcuuguucugauuccuucuacagaagcaugcgcuggcugacacagaaaaauaacaauuaucccgugcaggacgcccaauacaccaacaauagaggcaaaaacauccucuuuaugugggggauuaaccauccuccgacggauacaguccagaccaaucuguacacacggaccgacaccaagacaucuguggcuacggaggaaaucaaccgcaccuucaagccccuuaucggaccuagaccccugguuaauggccuccaggggcggauugauuauuacugggccgugcugaaaccuggacagacacugcgcgucagauccaacggcaaucucaucgcgcccugguaugggcacauucugcuuggagagagccauggccggauccugaagaccgaccucaaauccggcaacugcguggugcaaugucagacagaacgcgggggacugaauaccacgcuuccguuucacaacgucucuaaguacgccuucggcaauugcccuaaauauauugggguuaagagccugaagcucgcugugggacugagaaacgugcccgcccgguccagccgcggccuguuuggggcuaucgccggauucaucgagggcggcuggucugggcucgucgcgggaugguacggcuuucagcacuccaaugaucaggggacaggaauggccgcugacagagauagcacccaaaaagccauugacaagaucaccucuaaagugaacaauauuguugacaagaugaacaaacaguaugaaaucauugaucaugaguucagcgagaucgaaacacggcugaauaugaucaacgacaagauugaugaccagauccaagauauuugggcuuacaacgccgagcuucuggugcuccuggaaaaucagaaaacccuugacgagcacgaugccaacgucaauaaccuguacaauaaggugaagagagcucucggcuccaacgcgguugaagacgggaaaggcuguuuugaucuguaucauaagugcgacaaucaguguauggagacaauccgcaacggaacguacaaucggagaaaauaucaggaggaaucucgccuggagcggcaaaagauugaaggcgugaaacucgagagcgaagggaccuacaagauccugacaauuuauuccaccgucgccagcucucuugugaucgcuaugggauucgccgccuuucuguucugggcuauguccaacggcagcugcagaugcaauaucuguauuuga

SEQ ID NO: 202368 - RNA, 1683 nt, Artificial Sequence
  derived and/or modified CDS sequence (opt5) from hemagglutinin__InfluenzaA__AGQ81148
auggaggccgcuaccaucauuacaauccugcucgugauuacgggcagcaacgccgacaagaucugcauuggguaccaguccaccaauucuacagaaaccgucgauacacugaccgagaacaauguucccgugacacacgcgaaagaacuucugcauaccgagcacaacggaaugcucugugcuacgaaucugggcagaccucuuauccuggauaccugcacaaucgaagggcucauuuauggaaacccgagcugugaccugccccuggagggcaaggagugguccuacaucguggaacggccuucugccgucaaugggaugugcuaucccggaaacguggagaaucucgaggaacugcgcagccuuuucuccucugccagcuccuaccaacggauucagaucuuuccugacagcauuuggaacguuucuuauuccggcaccagcaaggcuuguucugauuccuucuacagaagcaugcgcuggcugacacagaaaaauaacaauuaucccgugcaggacgcccaauacaccaacaauagaggcaaaaacauccucuuuaugugggggauuaaccauccuccgacggauacagcucagaccaaucuguacacacggaccgacaccaagacaucugucgccacggaggaaaucaaccgcaccuucaagccccuuaucggaccuagaccccuggugaauggccuccaggggcggauugauuauuacugggcgguucugaaaccuggacagacacugcgcgugagauccaacggcaaucucaucgcccccugguaugggcacauucugcuuggagagagccauggccggauccugaagaccgaccucaaauccggcaacugcgucgugcaaugucagacagaacgcgggggacugaauaccacgcuuccguuucacaacgugucuaaguacgcuuucggcaauugcccuaaauauauuggggucaagagccugaagcucgccguuggacugagaaacgugcccgcucgguccagccgcggccuguuuggggccaucgcgggauucaucgagggcggcuggucugggcucguggccggaugguacggcuuucagcacuccaaugaucaggggacaggaauggcugccgacagagauagcacccaaaaagcuauugacaagaucaccucuaaagucaacaauauuguggacaagaugaacaaacaguaugaaaucauugaucaugaguucagcgagaucgaaacacggcugaauaugaucaacgacaagauugaugaccagauccaagauauuugggccuacaacgccgagcuucugguucuccuggaaaaucagaaaacccuugacgagcacgaugcuaacgugaauaaccuguacaauaaggucaagagagcgcucggcuccaacgccguggaagacgggaaaggcuguuuugaucuguaucauaagugcgacaaucaguguauggagacaauccgcaacggaacguacaaucggagaaaauaucaggaggaaucucgccuggagcggcaaaagauugaaggcguuaaacucgagagcgaagggaccuacaagauccugacaauuuauuccaccguggcuagcucucuugucaucgccaugggauucgccgcuuuucuguucugggccauguccaacggcagcugcagaugcaauaucuguauuuga

SEQ ID NO: 202369 - RNA, 1683 nt, Artificial Sequence
  derived and/or modified CDS sequence (opt5) from hemagglutinin__InfluenzaA__AGQ81149
auggaggccgcuaccaucauuacaauccugcucgugauuacgggcagcaacgccgacaagaucugcauuggguaccaguccaccaauucuacagaaaccgucgauacacugaccgagaacaauguucccgugacacacgcgaaagaacuucugcauaccggacacaacggcaugcucugugcuacgaaucuggggagaccucuuauccuggauaccugcacaaucgagggacucauuuauggcaacccgagcugugaccugccccuggaagggcgggagugguccuacaucguggagcgcccuucugccauuaauggagucugcuaucccggcaacguggaaaaucucgaggaacugagaagccuuuucuccucugccagcuccuaccaacggauccagauuuuuccugacagcaucuggaacguuucuuauuccggcaccagcaaggcuuguucugauuccuucuaccgcagcaugagauggcugacacagaaaaauaacaauuaucccgugcaggacgcccaauacaccaacaaucgggggaagaacauucucuuuauguggggaaucaaccauccuccgacggauacagcucagaccaaucuguacacacgcaccgacaccacaacgucugucgccaccgaggauaucaacagaacauucaaaccccuuauuggcccucggccccuggugaaugggcuccagggacgcaucgacuauuacugggcgguucugaagccuggccagacccugagagugcgguccaacgggaaucucauugcccccugguauggacacauccugcuuggcgagagccauggccgcauucugaagacagaucucaaauccgggaacugcgucgugcaaugucagaccgaaagaggaggccugaauacgacacuuccguuucacaacgugucuaaguacgcuuucgggaauugcccuaaauauaucggagucaagagccugaaacucgccguuggccugcggaacgugcccgcucgcuccagcagagggcuguuuggagccaucgcgggcuucauugagggcggguggucuggacucguggccggcugguacggguuucagcacuccaaugaccagggaaccggcauggcugccgaucgggacagcacccaaaaggcuaucgacaagauuacaucuaaagucaacaauaucguggauaagaugaacaaacaguaugaaauuaucgaccaugaguucagcgaaaucgagaccagacugaauaugauuaacgauaagaucgacgaucagauucaagacaucugggccuacaacgccgagcuucugguucuccuggaaaaucagaaaacacuugaugagcacgacgcuaacgugaauaaccuguacaauaaggucaaacgcgcgcucggguccaacgccguggaagauggcaagggauguuuugaccuguaucauaagugcgauaaucaguguauggagacgauucggaacggcaccuacaauagacgcaaauaucaggaagagucucggcuggagagacaaaagaucgaagggguuaaacucgagagcgaaggaacauacaagauucugaccaucuauuccacaguggcuagcucucuugucaucgccaugggcuucgccgcuuuucuguucugggccauguccaacgggagcugccgcugcaauauuuguaucuga

SEQ ID NO: 202370 - RNA, 1683 nt, Artificial Sequence
  derived and/or modified CDS sequence (opt5) from hemagglutinin__InfluenzaA__AGQ81150
auggaggccgcuaccaucauuacaauccugcucgugauuacgggcagcaacgccgacaagaucugcauuggguaccaauccaccaauucuacagaaaccgucgauacacugaccgagaacaauguucccgugacacacgcgaaagaacuucugcauaccgagcacaacggaaugcucugugcuacggaccugggcagaccucuuauccuggauaccugcacaaucgaagggcucauuuauggaaauccgagcugugaccugccccuggagggccgggagugguccuacaucguggaacgcccuucugccgucaacggggugugcuaucccggaaauguugagaaccucgaggaacugagaagccuuuucuccucugccagcuccuaccaacggauucagaucuuuccugauagcauuuggaaugugucuuauuccggcaccagcaaggcuuguucugacuccuucuaccgcagcaugagauggcugacacagaaaaacaauaacuaucccguccaggaugcccaauacaccaaugaccggggcaacaauauccucuuuaugugggggauuaaccauccuccgacggauacagugcagaccaaccuguacacacgcaccgacaccacaacgucuguugcuaccgaggauaucaauagaacauucaagccccuuaucggaccucggccccuggugaacggccuccaggggcgcauugacuauuacugggccguccugaaaccuggacagacccugagagugcgguccaauggcaaccucaucgcgcccugguaugggcacauucugcuuggagaaagccauggccgcauccugaagacagaucucaaguccggcaauugcgugguccaaugucagaccgagagagggggacugaacacgacacuuccguuucacaauguuucuaaauacgccuucggcaacugcccuaaguauauuggggugaaaagccugaagcucgcugugggacugcggaauguccccgcccgcuccagcagaggccuguuuggggcuaucgccggauucaucgaaggcggcuggucugggcucguggcgggaugguacggcuuucagcacuccaacgaccaggggaccggaauggccgcugaccgggauagcacccaaaaagccauugacaagaucacaucuaagguuaauaacauuguggauaaaaugaauaagcaguaugacaucauugaucaugaguucagcgaaaucgagaccagacugaacaugaucaaugacaaaauugaugaccagauccaagauauuugggcuuacaacgccgagcuucugguccuccuggaaaaccagaagacacuugacgagcacgaugccaaugugaacaaucuguacaacaaaguuaagcgcgcucucggcuccaaugcgguggaagacgggaaaggcuguuuugaccuguaucauaagugcgauaaccaguguauggagacgauccggaauggaaccuacaacagacgcaaguaucaggaagagucucggcuggagagacagaaaauugaaggcgucaagcucgagagcgaagggacauacaaaauccugaccauuuauuccacaguggccagcucucuugucaucgcuaugggauucgccgccuuucuguucugggcuauguccaauggcagcugccgcugcaacaucuguauuuga

SEQ ID NO: 202371 - RNA, 1683 nt, Artificial Sequence
  derived and/or modified CDS sequence (opt5) from hemagglutinin__InfluenzaA__AGQ81152
auggaggccgcuaccaucauuacaauccugcucgugauuacgggcagcaacgccgacaagaucugcauuggguaccaauccaccaauucuacagaaaccgucgauacacugaccgagaacaauguucccgugacacacgcgaaagaacuucugcauaccgagcacaacggaaugcucugugcuacgaaucugggcagaccucuuauccuggauaccugcacaaucgaagggcucauuuauggaaacccgagcugugaccugccccuggagggccgggacugguccuacaucguggagcgcccuucugccgucaauggggugugcuaucccggaaacguugaaaaucucgaggaacugagaagccuuuucuccucugccagcuccuaccaaaagauucagaucuuuccugauagcauuuggaacgugucuuauuccggcaccagcaaggcuuguucugacuccuucuaccggagcaugcgcuggcugacacagaaaaauaacaauuaucccguccaggaugcccaauacaccaacaauagaggcaaaaacauccucuuuaugugggggauuaaccauccuccgacggacacagugcagaccaaucuguacacacggaccgauaccacaacgucuguugcuaccgaggacaucaaccgcacauucaagccccuuaucggaccuagaccccuggugaauggccuccaggggcggauugauuauuacugggccguccugaagccuggacagacccugcgcgugagauccaacggcaaucucaucgcgcccugguaugggcacauucugcuuggagagagccauggccggauccugaaaacagaccucaaguccggcaacugcgugguccaaugucagaccgaacgcgggggacugaauacgacacuuccguuucacaacguuucuaaauacgccuucggcaauugcccuaaguauauuggggugaaaagccugaagcucgcugugggacugagaaacguccccgcccgguccagccgcggccuguuuggggcuaucgccggauucaucgagggcggcuggucugggcucguggcgggaugguacggcuuucagcacuccaaugaucaggggaccggaauggccgcugacagagacagcacccaaaaggccauugauaaaaucacaucuaagguuaacaauauuguggacaaaaugaacaagcaguaugaaaucauugaucaugaguucagcgaaaucgagacccggcugaauaugaucaacgacaaaauugaugaccagauccaagauauuugggcuuacaacgccgagcuucugguccuccuggaaaaucagaagacacuugacgagcacgaugccaacgugaauaaccuguacaauaaaguuaagagagcucucggcuccaacgcgguggaagacgggaagggcuguuuugaucuguaucauaaaugcgacaaucaguguauggagacgauccgcaacggaaccuacaaucggagaaaguaucaggaagagucucgccuggagcggcagaaaauugaaggcgucaagcucgagagcgaagggacauacaaaauccugaccauuuauuccacaguggccagcucucuugucaucgcuaugggauucgccgccuuucuguucugggcuauguccaacggcagcugcagaugcaauaucuguauuuga

SEQ ID NO: 202372 - RNA, 1683 nt, Artificial Sequence
  derived and/or modified CDS sequence (opt5) from hemagglutinin__InfluenzaA__AGQ81153
auggaggccgcuaccaucauuacaauccugcucgugauuacgggcagcaacgccgacaagaucugcauuggguaccaguccaccaauucuacagaaaccgucgauacacugaccgagaacaauguucccgugacacacgcgaaagaacuucugcauaccgagcacaacggaaugcucugugcuacgaaucugggcagaccucuuauccuggauaccugcacaaucgaagggcucauuuauggaaacccgagcugugaccugccccuggagggccgggacugguccuacaucguggagcgcccuucugccgucaauggggugugcuaucccggaaacguugaaaaucucgaggaacugagaagccuuuucuccucugccagcuccuaccaaaagauucagaucuuuccugauagcauuuggaacgugucuuauggcggcaucuccaaggcuuguagcaauucuuucuaccgguccaugcgcuggcugacccagaaaaacaauaacuaucccguccaggacgcccaauacacaaauaacagagggaaaaacauucucuuuauguggggaaucaaucauccuccgaccaacacgacacagaccgaucuguacacacggaccgacaccacaacgagcguggcuaccgaggauauccaccgcacauucaagccccuuauuggcccuagaccccugguuaaugggcuccagggacggaucgacuauuacugggccgugcugaagccuggccagacccugcgcgucagaucuaacgggaaucucauugcgcccugguauggacauauccugcuuggcaaaucccacggccggauucugaagacagaucucaaaagcgggaacugcguggugcaaugucagaccgagcgcggaggccugaauacgacacuuccguuucacaacgucuccaaguacgccuucgggaauugcccuaaauauaucggaguuaagucucugaagcucgcugugggccugagaaacgugcccgcccggagcucccgcgggcuguuuggagcuaucgccggcuucauugaaggcggguggagcggacucgucgcgggcugguacggguuucagcauucuaaugaccagggaaccggcauggccgcugauagagacuccacccaaaaagccaucgacaagauuacaagcaaagugaacaauaucguugauaagaugaacaaacaguaugagauuaucgaccacgaguucucugaaaucgaaacccggcugaauaugauuaacgauaagaucgacgaucagauucaagacaucugggcuuacaacgccgagcuucuggugcuccuggagaaucagaaaacacuugaugaacaugacgccaacgucaauaaccuguacaauaaggugaagagagcucucgggagcaacgcgguugaggauggcaaaggauguuuugaccuguaucacaagugcgauaaucaguguauggaaacgauucgcaacggcaccuacaaucggagaaaauaucaggaggaaucccgccuggagcggcaaaagaucgagggggugaaacucgaaucugagggaacauacaagauucugaccaucuauagcacagucgccuccagccuugugaucgcuaugggcuucgccgccuuucuguucugggcuaugucuaacggguccugcagaugcaauauuuguaucuga

SEQ ID NO: 202373 - RNA, 1683 nt, Artificial Sequence
  derived and/or modified CDS sequence (opt5) from hemagglutinin__InfluenzaA__AGQ81155
auggaggccgcuaccaucauuacaauccugcucgugauuacgggcagcaacgccgacaagaucugcauuggguaccaguccaccaauucuacagaaaccgucgauacacugaccgagaacaauguucccgugacacacgcgaaagaacuucugcauaccgagcacaacggaaugcucugugcuacgaaucugggcagaccucuuauccuggauaccugcacaaucgaagggcucauuuauggaaacccgagcugugaccugccccuggagggccgggacugguccuacaucguggagcgcccuucugccgucaauggggugugcuaucccggaaacguugaaaaucucgaggaacugagaagccuuuucuccucugccagcuccuaccaaaagauucagaucuuuccugauagcauuuggaacgugucuuauaauggcaccuccaaggcuuguagcgacucuuucuaccgguccaugcgcuggcugacacagaaaaacaauaacuaucccguccaggaugcccaauacaccaauaacagaggcaaaaacauccucuuuaugugggggauuaaucauccuccgacggacacaacccagacaaaccuguacacccggaccgauacaacgaccagcguggcuacagaggacaucaaucgcaccuucaagccccuuaucggaccuagaccccugguuaacggccuccaggggcggauugauuauuacugggccgugcugaagccuggacagacacugcgcgucagaucuaauggcaaccucaucgcgcccugguaugggcacauucugcuuggagagucccauggccggauccugaaaaccgaccucaagagcggcaauugcguggugcaaugucagacggaacgcgggggacugaacacaacccuuccguuucacaaugucuccaaauacgccuucggcgauugcccuaaguauauugggguuaaaucucugaagcucgcugugggacugagaaacgugcccgcccggagcucccgcggccuguuuggggcuaucgccggauucaucgagggcggcuggagcgggcucgucgcgggaugguacggcuuucagcacucuaaugaccaggggaccggaauggccgcugacagagauuccacacaaaaggccauugacaaaaucaccagcaaggugaacaauauuguugauaaaaugaacaagcaguaugaaaucauugaccaugaguucucugaaaucgagacacggcugaauaugaucaacgauaaaauugacgaucagauccaagacauuugggcuuacaacgccgagcuucuggugcuccuggaaaaucagaagacgcuugaugagcacgacgccaacgucaauaaccuguacaauaaagugaagagagcucucggcagcaacgcgguugaagaugggaagggcuguuuugaccuguaucauaaaugcgacaaucaguguauggagaccauccgcaacggaacauacaaucggagaaaguaucaggaagagucccgccuggagcggcaagaaauugagggcgugaaacucgaaucugaggggaccuacaagauccugacaauuuauagcaccgucgccuccagccuugugaucgcuaugggauucgccgccuuucuguucugggcuaugucuaacggcuccugcagaugcaauaucuguauuuga

SEQ ID NO: 202374 - RNA, 1683 nt, Artificial Sequence
  derived and/or modified CDS sequence (opt5) from hemagglutinin__InfluenzaA__AGQ81156
auggaggccgcuaccaucauuacaauccugcucgugauuacgggcagcaacgccgacaagaucugcauuggguaccaauccaccaauucuacagaaaccgucgauacacugaccgagaacaauguucccgugacacacgcgaaagaacuucugcauaccgagcacaacggaaugcucugugcuacgaaucugggcagaccucuuauccuggauaccugcacaaucgaagggcucauuuauggaaacccgagcugugaccugccccuggagggccgggacugguccuacaucguggagcgcccuucugccgucaauggggugugcuaucccggaaacguugaaaaucucgaggaacugagaagccuuuucuccucugccagcuccuaccaaaagauucagaucuuuccugauagcauuuggaacgugucuuauggcggcaucuccaaggcuuguagcaauucuuucuaccgguccaugcgcuggcugacccagaaaaacaauaacuaucccguccaggacgcccaauacacaaauaacagagggaaaaacauucucuuuauguggggaaucaaucauccuccgaccaacacgacacagaccgaucuguacacacggaccgacaccacaacgagcguggcuaccgaggauauccaccgcacauucaagccccuuauuggcccuagaccccugguuaaugggcuccagggacggaucgacuauuacugggccgugcugaagccuggccagacccugcgcgucagaucuaacgggaaucucauugcgcccugguauggacauauccugcuuggcgagucccacggccggauucugaaaacagaucucaagagcgggaacugcguggugcaaugucagaccgaacgcggaggccugaauacgacacuuccguuucacaacgucuccaaauacgccuucgggaauugcccuaaguauaucggaguuaaaucucugaagcucgcugugggccugagaaacgugcccgcccggagcucccgcgggcuguuuggagcuaucgccggcuucauugagggcggguggagcggacucgucgcgggcugguacggguuucagcauucuaaugaccagggaaccggcauggccgcugauagagacuccacccaaaaggccaucgacaaaauuacaagcaaggugaacaauaucguugauaaaaugaacaagcaguaugaaauuaucgaccacgaguucucugaaaucgagacccggcugaauaugauuaacgauaaaaucgacgaucagauucaagacaucugggcuuacaacgccgagcuucuggugcuccuggaaaaucagaagacacuugaugagcaugacgccaacgucaauaaccuguacaauaaagugaagagagcucucgggagcaacgcgguugaagauggcaagggauguuuugaccuguaucacaaaugcgauaaucaguguauggagacgauucgcaacggcaccuacaaucggagaaaguaucaggaagagucccgccuggagcggcagaaaaucgaaggggugaagcucgagucugaaggaacauacaaaauucugaccaucuauagcacagucgccuccagccuugugaucgcuaugggcuucgccgccuuucuguucugggcuaugucuaacggguccugcagaugcaauauuuguaucuga

SEQ ID NO: 202375 - RNA, 1683 nt, Artificial Sequence
  derived and/or modified CDS sequence (opt5) from hemagglutinin__InfluenzaA__AGQ81157
auggaggccgcuaccaucauuacaauccugcucgugauuacgggcaacaaugccgacaagaucugcauuggguaccaaagcaccaacuccacagaaaccgucgauacacugaccgagaauaacguucccgugacacacgcgaaagaacuucugcauaccgagcacaauggaaugcucugugcuacgaaccugggcagaccucuuauccuggauaccugcacaaucgaagggcucauuuauggaaauccgucuugugaccugccccuggagggccgggacuggagcuacaucguggagcgcccuuccgccgucaacggggugugcuaucccggaaauguugaaaaccucgaggaacugagaucucuuuucagcuccgccucuagcuaccaaaagauucagaucuuuccugauuccauuuggaaugugagcuauaacggcaccucuaaggcuuguuccgacagcuucuaccggucuaugcgcuggcugacacagaaaaauaacaauuaucccguccaggaugcccaauacaccaacaacagaggcaaaaauauccucuuuaugugggggauuaaccauccuccgacggacacaacccagacaaaucuguacacccggaccgauacaacgaccuccguggcuacagaggacaucaaccgcaccuucaagccccuuaucggaccuagaccccugguuaauggccuccaggggcggauugauuauuacugggccgugcugaagccuggacagacacugcgcgucagaagcaacggcaaucucaucgcgcccugguaugggcacauucugcuuggagagucucauggccggauccugaaaaccgaccucaaguccggcaacugcguggugcaaugucagacggaacgcgggggacugaauacaacccuuccguuucacaacgucagcaaauacgccuucggcgauugcccuaaguauauugggguuaaaucccugaagcucgcugugggacugagaaaugugcccgcccggucuagccgcggccuguuuggggcuaucgccggauucaucgagggcggcugguccgggcucgucgcgggaugguacggcuuucagcacagcaacgaccaggggaccggaauggccgcugacagagauucuacacaaaaggccauugacaaaaucaccuccaaggugaauaacauuguugauaaaaugaauaagcaguaugaaaucauugaccaugaguucagcgaaaucgagacacggcugaacaugaucaacgauaaaauugacgaucagauccaagacauuugggcuuacaaugccgagcuucuggugcuccuggaaaaccagaagacgcuugaugagcacgacgccaaugucaacaaucuguacaacaaagugaagagagcucucggcucuaaugcgguugaagaugggaagggcuguuuugaccuguaucauaaaugcgacaaccaguguauggagaccauccgcaauggaacauacaaccggagaaaguaucaggaagagagccgccuggagcggcagaaaauugaaggcgugaagcucgaguccgaagggaccuacaaaauccugacaauuuauucuaccgucgccagcucccuugugaucgcuaugggauucgccgccuuucuguucugggcuaugagcaauggcucuugcagaugcaacaucuguauuuga

SEQ ID NO: 202376 - RNA, 1683 nt, Artificial Sequence
  derived and/or modified CDS sequence (opt5) from hemagglutinin__InfluenzaA__AGQ81158
auggagguggucaccaucauuacaauccugcucguuauuacgagaagcaacgccgacaagaucugcauuggcuaccaauccaccaauucuacagaaaccguggauacacugaccgagaacaaugugcccgucacacacgcuaaagaacuucugcauaccgagcacaacgggaugcucugugccacgaaucugggacggccucuuauccuggauaccugcacaaucgaaggccucauuuaugggaacccgagcugugaccugccccuggagggacgcgagugguccuacaucguggaaagaccuucugcgguuaauggcgugugcuaucccgggaacgucgagaaucucgaagaacugcggagccuuuucuccucugcuagcuccuaccaacgcauucagaucuuuccugacagcauuuggaacgugucuuauuccggaaccagcaaggccuguucugauuccuucuacagaagcaugcgguggcugacacagaaaaauaacaauuaucccguucaggacgcccaauacaccaacaaucgcggcaagaacauccucuuuauguggggcauuaaccauccuccgacggauacagcucagaccaaucuguacacaagaaccgacaccacaacgucuguggccaccgaggauaucaaccggacauucaaaccccuuaucgggccucgcccccuggucaauggacuccagggcagaauugacuauuacugggcugugcugaagccugggcagacccugcgggugcgcuccaacggaaaucucaucgcccccugguauggccacauucugcuuggggaaagccauggaagaauccugaagacagaucucaaauccggcucuugcgucguucaaugucagaccgagcggggcgggcugaacacgacacuuccguuucacaaugugagcaaguacgcguucggaaacugcccuaaauauauuggcgugaagucccugaaacucgccgucgggcugcgcaaugugcccgcuagaagcucucggggacuguuuggcgccaucgcuggguucaucgaaggaggcugguccggccucguugccgggugguacggauuucagcacagcaacgaccagggcaccgggauggcggccgauagagacucuacccaaaaggcuauugacaagaucacaagcaaagugaauaacauugucgauaagaugaauaaacaguaugagaucauuaaccaugaguucuccgagaucgagacccgccugaauaugaucaacgacaagauugaugaccagauccaagauauuugggccuacaacgcugaacuucuggugcuccuggagaaucagaaaacacuugacgaacacgaugccaacguuaauaaccuguacaauaaggugaaacgggcccucggaucuaacgcugucgaggacggcaagggguguuuugaucuguaucauaagugcgacaaucaguguauggaaacgaucagaaacggcaccuacaaucgccggauguaucaggaggagagcagacuggaacgccagaaaauugagggagugaagcucgaauccgagggcacauacaaaauccugaccauuuauagcacagucgcgucuucccuugugaucgccaugggguucgcugccuuucuguucugggccaugagcaacggaucuugccggugcaauaucuguauuuga

SEQ ID NO: 202377 - RNA, 1683 nt, Artificial Sequence
  derived and/or modified CDS sequence (opt5) from hemagglutinin__InfluenzaA__AGQ81159
auggaggccgcuaccaucauuacaauccugcucgugauuacgggcagcaacgccgacaagaucugcauuggguaccaguccaccaauucuacagaaaccgucgauacacugaccgagaacaauguucccgugacacacgcgaaagaacuucugcauaccgagcacaacggaaugcucugugcuacgaaucugggcagaccucuuauccuggauaccugcacaaucgaagggcucauuuauggaaacccgagcugugaccugccccuggagggccgggacugguccuacaucguggagcgcccuucugccgucaauggggugugcuaucccggaaacguugaaaaucucgaggaacugagaagccuuuucuccucugccagcuccuaccaaaagauucagaucuuuccugauagcauuuggaacgugucuuaugacggcaucuccaaagccuguagcaauucuuucuaccgguccaugcgcuggcugaccaagaaaaacaauagcuaucccguccaggaugcucaguacacaaacaauauuggcaagaacauccucuuuaugugggggaucaaccauccuccgaccaauacgacacaaaccgaccuguacacaagaaccgauaccacaacgucuguggcuaccgaggacauucaccggacauucaagccccuuaucggaccucggcccccuguuaacggccugcucgggagaauugauuauuacugggccgugcugaaacccggacagacccugcggguccgcuccaauggcaaccucaucgcgccgugguaugggcauauucugcuuggagagagccacggcagaauccugaagacagaccucaaauccggcaauugcguggugcagugucagaccgaacgcgggggacugaacacgacacuuccuuuucacaaugucucuaaguacgccuucggcaacugccccaaauauaucgggguuaagagccugaagcucgcugugggacugcgcaaugugccugccagauccagccggggccuguuuggggcuauugccggauucaucgagggcggcuggucugggcucgucgcgggaugguacggcuuucaacauuccaacgaucaggggaccggaauggccgcugaccgcgacagcacccagaaagccauugauaagaucacaucuaaagugaauaacauuguugacaagaugaauaaacaguaugaaaucaucgaucacgaguucagcgaaauugagaccagacugaacaugaucaaugacaagauugaugaccaaauccaggauauuugggcuuacaacgccgagcuucuggugcuccuggaaaaccagaaaacacuugacgagcaugaugccaaugucaacaaucuguacaacaaggugaagcgggcucucggcuccaaugcgguugaagacgggaaaggcuguuuugaucuguaucacaagugcgacaaccaauguauggagacgaucagaaauggaaccuacaaccgccggaaauaucaggaagagucuagacuggagcgccagaagauugaaggcgugaaacucgagagcgaagggacauacaagauccugaccaucuauuccacagucgccagcucucuugugauugcuaugggauucgccgccuuucuguucugggcuauguccaauggcagcugccggugcaacaucuguauuuga

SEQ ID NO: 202378 - RNA, 1683 nt, Artificial Sequence
  derived and/or modified CDS sequence (opt5) from hemagglutinin__InfluenzaA__AGQ81161
auggagaccgugagccugaucacaauucuccuggucgccacgguuuccaacgcugacaagaucugcauuggcuaccagucuaccaauagcacagaaaccguggauacacuuaccgagaacaaugugcccgucacacacgccaaagaacugcuccauaccgagcacaacgggaugcugugugcgacgucccuuggacaaccucugauccucgauaccugcacaauugaaggccugaucuaugggaauccgucuugugacccccugcucgagggaagagaguggagcuacaucguggaacggccuuccgcuguuaacggccugugcuaucccgggaauguggagaaccuugaggaacugcgcucucucuucagcuccgccagaagcuaccagcggauucagaucuuuccugacaccauuuggaaugucucuuaugauggaacauccaaggccuguagcggcucuuucuaccgcaacaugagauggcugacccagaaaaauuccgacuaucccauccaagaugcucaguacacgaacaaucagggcaagaacauucuuuuuaugugggggaucaaucauccuccgacagacaccacacagcgggaucuguacacccgcaccgacacaacgaccagcguggccacagaggaaauuaacagaaucuucaaaccccucaucggaccucggccccugguuaacggccugauggggcgcauugauuauuacuggucugugcucaagccuggacaaacccugagaaucaaguccgacggcaaucuuauugcucccugguaugggcacauccugagcggagagucccauggccggauucucaaaacagaucugaagaaaggcucuugcaccguccagugucagacggaaaaagggggacuuaacacaacccugccguuucagaaugugagcaaguacgccuucggcaacugcuccaaguauaucgggaucaagagccucaaacuggcggugggacugcgcaaugucccuucuagauccagccggggccucuuuggggccauugcuggauucaucgagggcggcuggucugggcugguugccggaugguacggcuuucaacacagcaacgaccagggggugggaauggcugccgaccgcgauuccacccagaaggcgauugacaaaaucacaucuaaggugaauaacauugucgauaaaaugaauaagcaauaugaaaucaucgaccacgaguucagcgagguggaaaccagacuuaacaugauuaauaacaaaaucgaugaccagauucaggauaucugggccuacaaugcugagcugcucguucugcuugaaaaccagaagacacuggacgagcaugaugccaaugugaacaaccucuacaauaaggucaaacgggcucugggcuccaacgccguggaagacgggaagggcuguuuugagcuguaucacaaaugcgaugaccaauguauggagacgauuagaaauggaaccuacaaccgccggaaguaucaggaagagagcaaacucgaaagacagaagaucgagggcguuaagcuggaaucugaggggacauacaaaauucuuaccaucuauuccacaguggccagcucucuggucaucgcuaugggauucgcggccuuucucuucugggcuauguccaauggcagcugccgcugcaacauuuguaucuga

SEQ ID NO: 202379 - RNA, 1683 nt, Artificial Sequence
  derived and/or modified CDS sequence (opt5) from hemagglutinin__InfluenzaA__AGQ81162
auggagaccgugagccugaucacaauucuccuggucgccacgguuuccaacgcugacaagaucugcauuggcuaccagucuaccaauagcacagaaaccguggauacacuuaccgagaacaaugugcccgucacacacgccaaagaacugcuccauaccgagcacaacgggaugcugugugcgacgucccuuggacaaccucugauccucgauaccugcacaauugaaggccugaucuaugggaauccgucuugugaccugcuccuggagggaagagaguggagcuacaucguggaacggcccuccgcuguuaacggccuuugcuauccugggaauguggagaaccuggaggaacuccgcucucuguucagcuccgccagaagcuaccagcggauucagaucuuucccgacaccauuuggaaugucucuuaugauggaacauccaaggccuguagcggcucuuucuaccgcuccaugagauggcuuacccagaaaaacagcgacuauccuauccaagaugcucaguacacgaauaaccagggcaagaauauucuguuuaugugggggaucaaccaucccccuacagacaccacacagcgggaucucuacacccgcaccgacacaacgaccucuguggccacagaggaaauuaauagaaucuucaaaccgcugaucggaccccggccucugguuaacggccucauggggcgcauugauuauuacugguccgugcugaagcccggacaaacccuuagaaucaagagcgacggcaaccugauugcuccuugguaugggcacauccucuccggagagucucauggccggauucugaaaacagaucuuaagaaaggcagcugcaccguccagugucagacggaaaaagggggacugaauacaacccuccccuuucagaacguguccaaguacgccuucggcaauugcagcaaguauaucgggaucaagucucugaaacuggcggugggacuccgcaacgucccguccagaagcucucggggccuguuuggggccauugcuggauucaucgagggcggcuggagcgggcuuguugccggaugguacggcuuucaacacuccaaugaccagggggugggaauggcugccgaccgcgauucuacccagaaggcgauugacaaaaucacaagcaaggugaacaauauugucgauaaaaugaacaagcaauaugaaaucaucgaccacgaguucuccgagguggaaaccagacugaauaugauuaacaauaaaaucgaugaccagauucaggauaucugggccuacaacgcugagcuccugguucuucuggaaaaucagaagacacucgacgagcaugaugccaacgugaauaaccuguacaacaaggucaaacgggcucugggcagcaaugccguggaagacgggaagggcuguuuugagcucuaucacaaaugcgaugaccaauguauggagacgauuagaaacggaaccuacaaucgcaagaaauaucaggaagagucuaagcuggaacggcagaagaucgagggcguuaaacuugaauccgaggggacauacaagauucugaccaucuauagcacaguggccucuucccucgucaucgcuaugggauucgcggccuuucuguucugggcuaugagcaacggcuccugcagaugcaauauuuguaucuga

SEQ ID NO: 202380 - RNA, 1683 nt, Artificial Sequence
  derived and/or modified CDS sequence (opt5) from hemagglutinin__InfluenzaA__AGQ81164
auggagaccgugagccugaucacaauucuccuggucgccacgguuuccaacgcugacaagaucugcauuggcuaccagucuaccaauagcacagaaaccguggauacacuuaccgagaacaaugugcccgucacacacgccaaagaacugcuccauaccgagcacaacgggaugcugugugcgacgucccuuggacaaccucugauccucgauaccugcacaauugaaggccugaucuaugggaauccgucuugugaccugcuccuggagggaagagaguggagcuacaucguggaacggcccuccgcuguuaacggccuuugcuauccugggaauguggagaaccuggaggaacuccgcucucuguucagcuccgccagaagcuaccagcggauucagaucuuucccgacaccauuuggaaugucucuuaugauggaacauccaaggccuguagcggcucuuucuaccgcuccaugagauggcuuacccagaaaaacagcgacuauccuauccaagaugcucaguacacgaauaaccagggcaagaauauucuguuuaugugggggaucaaccaucccccuacagacaccacacagcgggaucucuacacccgcaccgacacaacgaccucuguggccacagaggaaauuaauagaaucuucaaaccgcugaucggaccccggccucugguuaacggccucauggggcgcauugauuauuacugguccgugcugaagcccggacaaacccuuagaaucaagagcgacggcaaccugauugcuccuugguaugggcacauccucuccggagagucucauggccggauucugaaaacagaucuuaagaaaggcagcugcaccguccagugucagacggaaaaagggggacugaauacaacccuccccuuucagaacguguccaaguacgccuucggcaauugcagcaaguauaucgggaucaagucucugaaacuggcggugggacuccgcaacgucccguccagaagcucucggggccuguuuggggccauugcuggauucaucgagggcggcuggagcgggcuuguugccggaugguacggcuuucaacacuccaaugaccagggggugggaauggcugccgaccgcgauucuacccagaaggcgauugacaaaaucacaagcaaggugaacaauauugucgauaaaaugaacaagcaauaugaaaucaucgaccacgaguucuccgagguggaaaccagacugaauaugauuaacaauaaaaucgaugaccagauucaggauaucugggccuacaacgcugagcuccugguucuucuggaaaaucagaagacacucgacgagcaugaugccaacgugaauaaccuguacaacaaggucaaacgggcucugggcagcaaugccguggaagacgggaagggcuguuuugagcucuaucacaaaugcgaugaccaauguauggagacgauuagaaacggaaccuacaaucgccggaaguaucaggaagagucuaaacuggaaagacagaagaucgagggcguuaaacuugaauccgaggggacauacaagauucugaccaucuauagcacaguggccucuucccucgucaucgcuaugggauucgcggccuuucuguucugggcuaugagcaacggcuccugccgcugcaauauuuguaucuga

SEQ ID NO: 202381 - RNA, 1683 nt, Artificial Sequence
  derived and/or modified CDS sequence (opt5) from hemagglutinin__InfluenzaA__AGQ81167
auggagaccgugagccugaucacaauucuccuggucgccacgguuuccaacgcugacaagaucugcauuggcuaccagucuaccaauagcacagaaaccguggauacacuuaccgagaacaaugugcccgucacacacgccaaagaacugcuccauaccgagcacaacgggaugcugugugcgacgucccuuggacaaccucugauccucgauaccugcacaauugaaggccugaucuaugggaauccgucuugugaccugcuccuggagggaagagaguggagcuacaucguggaacggcccuccgcuguuaacggccuuugcuauccugggaauguggagaaccuggaggaacuccgcucucuguucagcuccgccagaagcuaccagcggauucagaucuuucccgacaccauuuggaaugucucuuauaacggaacauccaaggccuguagcggcucuuucuaccgcuccaugagauggcuuacccagaaaaauagcaacuauccuauccaagaugcucaguacacgaauaaccagggcaagaauauucuguuuaugugggggaucaaccaucccccuacagacaccacacagcgggaucucuacacccgcaccgacacaacgaccucuguggccacagaggaaauuaacagaaucuucaaaccgcugaucggaccccggccucugguuaauggccucauggggcgcauugauuauuacugguccgugcugaagcccggacaaacccuuagaaucaagagcgacggcaaccugauugcuccuugguaugggcacauccucuccggagagucucauggccggauucugaaaacagaucuuaagaaaggcagcugcaccguccagugucagacggaaaaagggggacugaauacaacccuccccuuucagaacguguccaaguacgccuucggcaauugcagcaaguauaucgggaucaagucucugaaacuggcggugggacuccgcaacgucccguccagaagcucucggggccuguuuggggccauugcuggauucaucgagggcggcuggagcgggcuuguugccggaugguacggcuuucaacacuccaaugaccagggggugggaauggcugccgaucgcgacucuacccagaaggcgauugacaaaaucacaagcaaggugaacaauauugucgauaaaaugaacaagcaauaugaaaucaucgaccacgaguucuccgagguggaaaccagacugaauaugauuaacaauaaaaucgaugaccagauucaggauaucugggccuacaacgcugagcuccugguucuucuggaaaaucagaagacacucgacgagcaugaugccaacgugaacaaucuguacaacaaggucaaacgggcucugggcagcaaugccguggaagacgggaagggcuguuuugagcucuaucacaaaugcgaugaccaauguauggagacgauuagaaacggaaccuacaaucgccggaaguaucaggaagagucuaaacuggaaagacagaagaucgagggcguuaaacuugaauccgaggggacauacaagauucugaccaucuauagcacaguggccucuucccucgucaucgcuaugggauucgcggccuuucuguucugggcuaugagcaacggcuccugccgcugcaauauuuguaucuga

SEQ ID NO: 202382 - RNA, 1683 nt, Artificial Sequence
  derived and/or modified CDS sequence (opt5) from hemagglutinin__InfluenzaA__AGQ81168
auggagaccgugagccugaucacaauucuccuggucguuacgguguccaacgccgacaagaucugcauuggcuaccagucuaccaauagcacagaaaccguggauacacuuaccgagaacaauguccccgugacacacgcuagagaacugcuccauaccgagcacaacgggaugcugugugccacgucccuuggacauccucugauccucgauaccugcacaauugaaggccugaucuaugggaauccgucuugugaccugcuccugggaggccgggaguggagcuacaucguugagcgccccuccgcggugaacgggcuuugcuauccuggaaaugucgaaaaccuggaggaacucagaucucuguucagcuccgcucggagcuaccaacgcauucagaucuuucccgacaccauuuggaaugugucuuauuccggcacaagcaaagccuguucugauuccuucuacagaagcaugcgguggcuuacccagaagggcaacgccuauccuauccaggacgcucaauacacgaauaaccaggggaaaaauauucuguuuauguggggaaucaaccaucccccuacagauaccgcccagacaaaucucuacacccgcaccgacacaacgaccucuguugcuacagaggagauuaacagaaccuucaagccgcugaucggcccccggccucuggugaacgggcucaugggacgcaucaauuauuacugguccguccugaaacccggccagacacuuagaauuaagagcaacgggaaucugaucgccccuugguauggacacauucucuccggcgaaucucacggccggauccugaagaccgaucuuaaacgcgggagcugcacggugcaaugucagacagagaagggaggccugaacaccacccuccccuuucagaauguguccaaauacgcguucgggaacugcagcaaguauauuggaaugaaaucucugaagcuggccgucggccucagaaauguuccgucccggagcucucgcgggcuguuuggagcuaucgccggcuucaucgaaggcggguggagcggacuuguggcuggcugguacggguuucagcacuccaacgaccaaggagugggcauggccgcggauagagacucuacacagaaggccauugauaaaaucaccagcaaggucaauaacauuguggacaaaaugaauaagcaguaugagaucauugaccaugaguucuccgaaguugagacacggcugaacaugaucaauaacaaaaucgaugaccaaauucaggauaucugggcuuacaaugccgaacuccuggugcuucuggagaaccagaagacgcucgacgaacacgaugcuaacgucaauaaccuguacaauaaagugaagagagcccuggggagcaacgccguugaggacggcaagggauguuuugaacucuaucauaaaugcgaugaccaguguauggagaccauucgcaauggcacauacaaccggagaaaguaucaagaggaaucuaaacuggagcgccagaagaucgaaggggugaaacuugaguccgaaggaaccuacaagauucugacaaucuauagcaccgucgcuucuucccucgugauugcgaugggcuucgccgcuuuucuguucugggccaugagcaauggguccugccggugcaacaucuguaucuga

SEQ ID NO: 202383 - RNA, 1683 nt, Artificial Sequence
  derived and/or modified CDS sequence (opt5) from hemagglutinin__InfluenzaA__AGQ81169
auggagaccgugagccugaucacaauucuccuggucguuacgguguccaacgccgacaagaucugcauuggcuaccagucuaccaauagcacagaaaccguggauacacuuaccgagaacaauguccccgugacacacgcuagagaacugcuccauaccgagcacaacgggaugcugugugccacgucccuuggacauccucugauccucgauaccugcacaauugaaggccugaucuaugggaauccgucuugugaccugcuccugggaggccgggaguggagcuacaucguugagcgccccuccgcggugaacgggcuuugcuauccuggaaaugucgaaaaccuggaggaacucagaucucuguucagcuccgcucggagcuaccaacgcauucagaucuuucccgacaccauuuggaaugugucuuauuccggcacaagcaaagccuguucugauuccuucuacagaagcaugcgguggcuuacccagaaggacaacgccuauccuauccaggaugcucaauacacgaauaaccaggagaaaaauauucuguuuauguggggcaucaaccaucccccuacagacaccguucagacaaaucucuacacccgcaccgauacaacgaccucuguggccacagaggaaauuaacagaaccuucaagccgcugaucgggccccggccucuggucaacggacucaugggccgcaucaauuauuacugguccgugcugaaacccgggcagacacuuagaauuaagagcaacggaaaucugaucgcuccuugguauggccacauucucuccggggagucucacggacggauccugaagaccgaccuuaaacgcggcagcugcacggugcaaugucagacagaaaagggcgggcugaacaccacccuccccuuucagaaugucuccaaauacgccuucggaaacugcagcaaguauauuggcaugaaaucucugaagcuggcgguugggcucagaaaugugccgucccggagcucucgcggacuguuuggcgccaucgcuggguucaucgagggaggcuggagcggccuuguggccgggugguacggauuucagcacuccaacgaucaaggcgucgggauggcugccgacagagauucuacacagaaggcgauugacaaaaucaccagcaaggugaauaacauuguugacaaaaugaauaagcaguaugaaaucauugaucaugaguucuccgagguggaaacacggcugaacaugaucaauaacaaaaucgacgaucaaauucaggacaucugggccuacaaugcugagcuccugguccuucuggaaaaccagaagacgcucgaugagcacgacgccaacgugaauaaccuguacaauaaaguuaagagagcucugggaagcaacgccguggaagauggcaagggguguuuugagcucuaucauaaaugcgacgaucaguguauggagaccauucgcaauggcacauacaaccggagaaaguaucaagaagagucuaaacuggaacgccagaagaucgagggagucaaacuugaauccgagggcaccuacaagauucugacaaucuauagcaccguggccucuucccucgucauugcuaugggguucgcggccuuucuguucugggcuaugagcaauggauccugccggugcaacaucuguaucuga

SEQ ID NO: 202384 - RNA, 1683 nt, Artificial Sequence
  derived and/or modified CDS sequence (opt5) from hemagglutinin__InfluenzaA__AGQ81170
auggagaccgugagccugaucacaauucuccuggucguuacgguguccaacgccgacaagaucugcauuggcuaccagucuaccaauagcacagaaaccguggauacacuuaccgagaacaauguccccgugacacacgcuagagaacugcuccauaccgagcacaacgggaugcugugugccacgucccuuggacauccucugauccucgauaccugcacaauugaaggccugaucuaugggaauccgucuugugaccugcuccugggaggccgggaguggagcuacaucguugagcgccccuccgcggugaacgggcuuugcuauccuggaaaugucgaaaaccuggaggaacucagaucucuguucagcuccgcucggagcuaccaacgcauucagaucuuucccgacaccauuuggaaugugucuuauuccggcacaagcaaagccuguucugauuccuucuacagaagcaugcgguggcuuacccagaaggacaacgccuauccuauccaggaugcucaauacacgaauaaccagggcaaaaauauucuguuuaugugggggaucaaccaucccccuacagacaccgcccagacaaaucucuacacccgcaccgauacaacgaccucuguugcuacagaggagauuaacagaaccuucaagccgcugaucggaccccggccucuggugaacggccucauggggcgcaucaauuauuacugguccguccugaaacccggacagacacuuagaauuaagagcaacggcaaucugaucgccccuugguaugggcacauucucuccggagaaucucacggccggauccugaagaccgaccuuaaacgcggcagcugcacggugcaaugucagacagagaaagggggacugaacaccacccuccccuuucagaauguguccaaguacgcguucggcaacugcagcaaguauauugggaugaaaucucugaagcuggccgucggacucagaaauguuccgucccggagcucucgcggccuguuuggggcuaucgccggauucaucgaaggcggcuggagcgggcuuguggcuggaugguacggcuuucagcacuccaacgaucaaggggugggaauggccgcggacagagauucuacacagaaggccauugacaaaaucaccagcaaggucaauaacauuguggacaaaaugaauaagcaguaugagaucauugaucaugaguucuccgaaguugagacacggcugaacaugaucaauaacaaaaucgacgaucaaauucaggacaucugggcuuacaaugccgaacuccuggugcuucuggagaaccagaagacgcucgaugaacacgacgcuaacgucaauaaccuguacaauaaagugaagagagcccugggcagcaacgccguugaggaugggaagggcuguuuugaacucuaucauaaaugcgacgaucaguguauggagaccauucgcaauggaacauacaaccggagaaaguaucaagaggaaucuaaacuggagcgccagaagaucgaaggcgugaaacuugaguccgaagggaccuacaagauucugacaaucuauagcaccgucgcuucuucccucgugauugcgaugggauucgccgcuuuucuguucugggccaugagcaauggcuccugccggugcaacaucuguaucuga

SEQ ID NO: 202385 - RNA, 1683 nt, Artificial Sequence; identical to SEQ ID NO: 202384
  derived and/or modified CDS sequence (opt5) from hemagglutinin__InfluenzaA__AGQ81171

SEQ ID NO: 202386 - RNA, 1683 nt, Artificial Sequence; identical to SEQ ID NO: 202384
  derived and/or modified CDS sequence (opt5) from hemagglutinin__InfluenzaA__AGQ81172

SEQ ID NO: 202387 - RNA, 1683 nt, Artificial Sequence
  derived and/or modified CDS sequence (opt5) from hemagglutinin__InfluenzaA__AGQ81173
auggagaccgccagccugaucacaauucuccugguggucacgguuuccaacgcugacaagaucugcauuggcuaccagucuaccaauagcacagaaaccguggauacacuuaccgagaacaaugugcccgucacacacgccaaggaacugcuccauaccgagcacaacgggaugcugugugcgacgucccuuggaaauccucugauccucgauaccugcacaauugaaggccugaucuaugggaacccgucuugugaccugcuccugggaggcagagaguggagcuacaucguggagcggcccuccgcuguuaaugggcuuugcuauccuggaaacguggaaaaucuggaggaacuccgcucucuguucagcuccgccagaagcuaccaacggauucagaucuuucccgacaccauuuggaacgucucuuauuccggcacaagcaaggccuguucugauuccuucuaccgcagcaugagauggcuuacccagaaagacaaugcuuauccuauccaggaugcccaauacacgaacaaucagggcaagaacauucuguuuaugugggggaucaaucaucccccuacagacaccgcucagacaaaccucuacacccggaccgauacaacgaccucuguggccacagaggagauuaaccgcaccuucaaaccgcugaucggacccagaccucugguuaauggccucauggggcggaucaacuauuacugguccgugcugaagcccggacagacacuucgcauuaagagcaauggcaaccugaucgcgccuugguaugggcacauucucuccggagaaucucauggcagaauccugaaaaccgaccuuaagcggggcagcugcacgguccaaugucagacagagaaagggggacugaauaccacccuccccuuucagaacguguccaaguacgccuucggcaauugcagcaaauauauugggaugaagucucugaagcuggcugugggacuccgcaacgucccguccagaagcucucggggccuguuuggggccaucgcuggauucaucgaaggcggcuggagcgggcuuguugccggaugguacggcuuucagcacuccaaugaucaaggggugggaauggcggccgaccgcgauucuacacagaaagcuauugacaagaucaccagcaaagugaacaauauugucgacaagaugaacaaacaguaugagaucauugaucacgaguucuccgaaguggagacaagacugaauaugaucaacaauaagaucgacgaucaaauucaggacaucugggccuacaacgcugaacuccugguucuucuggagaaccagaaaacgcucgaugaacaugacgccaaugugaacaaucuguacaacaaggucaagcgggcccugggcagcaaugcuguggaggaugggaaaggcuguuuugaacucuaucacaagugcgacgaucaguguauggagaccauuagaaacggaacauacaaucgccggaaauaucaagaggaaucuaagcuggagagacagaaaaucgaaggcguuaaacuugaguccgaagggaccuacaagauucugacaaucuauagcaccguggcgucuucccucgucauugccaugggauucgcugccuuucuguucugggccaugagcaacggcuccugccgcugcaauaucuguaucuga

SEQ ID NO: 202388 - RNA, 1683 nt, Artificial Sequence; identical to SEQ ID NO: 202384
  derived and/or modified CDS sequence (opt5) from hemagglutinin__InfluenzaA__AGQ81175

SEQ ID NO: 202389 - RNA, 1683 nt, Artificial Sequence
  derived and/or modified CDS sequence (opt5) from hemagglutinin__InfluenzaA__AGQ81177
auggagaccgugagccugaucacaauucuccuggucgccacgguuuccaacgcugacaagaucugcauuggcuaccagucuaccaauagcacagaaaccguggauacacuuaccgagaacaaugugcccgucacacacgccaaggaacugcuccauaccgagcacaacgggaugcugugugcgacgucccuuggacaaccucugauccucgauaccugcacaauugaaggccugaucuaugggaauccgucuugugaccugcuccuggagggaagagaguggagcuacaucguggaacggcccuccgcuguuaacggccuuugcuauccugggaauguggagaaccuggaggaacuccgcucucuguucagcuccgccagaagcuaccagcggauucagaucuuucccgacaccauuuggaaugucucuuauaacggaacauccaaggccuguagcggcucuuucuaccgcuccaugagauggcuuacccggaaaaauggcgauuauccuauccaggacgcucaauacacgaacaaucaggggaagaacauucuguuuauguggggaaucaaucaucccccuacagauaccacacagcgcgaccucuacaccagaaccgauacaacgaccagcguggccacagaggaaauuaaccggaucuucaaaccgcugaucggcccccgcccucugguuaacgggcucaugggaagaauugacuauuacuggucugugcugaagcccggccagacccuucggaucaaguccgaugggaaucugauugcuccuugguauggacacauccucagcggcgagucccauggccgcauucugaaaacagaccuuaagagagggucuugcaccguccaaugucagacggaaaaaggaggccugaacacaacccuccccuuucagaaugugagcaaguacgccuucgggaacugcuccaaauauaucggaaucaagagccugaagcuggcggugggccuccggaaugucccgucucgcuccagcagagggcuguuuggagccauugcuggcuucaucgagggcggguggucuggacuuguugccggcugguacggguuucagcacagcaacgaucaaggagugggcauggcugccgaccgggacuccacccagaaagcgauugauaagaucacaucuaaagugaauaacauugucgacaagaugaauaaacaguaugaaaucaucgaucacgaguucagcgagguggaaaccagacugaacaugauuaauaacaagaucgacgaucaaauucaggacaucugggccuacaaugcugagcuccugguucuucuggaaaaccagaaaacacucgaugagcaugacgccaaugugaacaaccuguacaauaaggucaagcgcgcucugggguccaacgccguggaagauggcaaaggauguuuugagcucuaucacaagugcgacgaucaguguauggagacgauucggaauggcaccuacaacagacgcaaauaucaagaagagagcaagcuggaacggcagaaaaucgaggggguuaaacuugaaucugagggaacauacaagauucugaccaucuauuccacaguggccagcucucucgucaucgcuaugggcuucgcggccuuucuguucugggcuauguccaaugggagcugcagaugcaacauuuguaucuga

SEQ ID NO: 202390 - RNA, 1683 nt, Artificial Sequence; identical to SEQ ID NO: 202389
  derived and/or modified CDS sequence (opt5) from hemagglutinin__InfluenzaA__AGQ81178

SEQ ID NO: 202391 - RNA, 1683 nt, Artificial Sequence; identical to SEQ ID NO: 202381
  derived and/or modified CDS sequence (opt5) from hemagglutinin__InfluenzaA__AGQ81181

SEQ ID NO: 202392 - RNA, 1683 nt, Artificial Sequence; identical to SEQ ID NO: 202381
  derived and/or modified CDS sequence (opt5) from hemagglutinin__InfluenzaA__AGQ81183

SEQ ID NO: 202393 - RNA, 1683 nt, Artificial Sequence; identical to SEQ ID NO: 202380
  derived and/or modified CDS sequence (opt5) from hemagglutinin__InfluenzaA__AGQ81184

SEQ ID NO: 202394 - RNA, 1683 nt, Artificial Sequence
  derived and/or modified CDS sequence (opt5) from hemagglutinin__InfluenzaA__AGQ81185
auggagaccgccagccugaucacaauucuccugguggcuacggucuccaacgccgacaagaucugcauuggcuaccagucuaccaauagcacagaaaccguugauacacuuaccgagaacaaugugcccgugacacacgcgaaggaacugcuccauaccgagcacaacgggaugcugugugcuacgucccuuggacaaccucugauccucgauaccugcacaauugaaggccugaucuaugggaauccgucuugugaccugcuccuggagggaagagaguggagcuacaucgucgaacggcccuccgccgugaacggccuuugcuauccugggaauguugagaaccuggaggaacuccgcucucuguucagcuccgccagaagcuaccagcggauucagaucuuucccgacaccacauggaaugugucuuauaacggaaccuccaaggcuuguagcggcucuuucuaccgcuccaugagauggcuuacgcagaaaaauagcaacuauccuauucaagaugcccaguacacaaauaaccagggcaagaauauccuguuuaugugggggauuaaccaucccccuaccgacacaacccagcgggaucucuacacccgcacagacacgaccacaucugucgcuaccgaggaaaucaacagaauuuucaaaccgcugaucggaccccggccucuggugaauggccucauggggcgcaucgauuauuacugguccguucugaagcccggacaaacacuuagaauuaagagcgacggcaaccugaucgccccuugguaugggcacauucucuccggagagucucauggccggauccugaaaaccgaucuuaagcgcggcagcugcacggugcagugucagacagaaaaagggggacugaauaccacccuccccuuucagaacgucuccaaguacgcguucggcaauugcagcaaauauauugggaucaagucucugaagcuggccgugggacucagaaacgugccgucccggagcucucgcggccuguuuggggcuaucgccggauucauugagggcggcuggagcgggcuugucgcuggaugguacggcuuucaacacuccaaugaccaggggguuggaauggccgcggauagagacucuacacagaaagccaucgacaagauuaccagcaaagugaacaauaucguggauaagaugaacaaacaauaugaaauuaucgaccacgaguucuccgaggucgaaacacggcugaauaugaucaacaauaagauugaugaccagauccaggauauuugggcuuacaacgccgagcuccuggugcuucuggaaaaucagaaaacgcucgacgagcaugaugcuaacguuaacaaucuguacaacaaggugaagagagcccugggcagcaaugccgucgaagacgggaaaggcuguuuugagcucuaucacaagugcgauaaccaauguauggagaccauccgcaauggaacauacaaccggagaaaauaucaggaagagucuaagcuggaacgccagaaaauugagggcgugaaacuugaauccgaggggaccuacaagauccugacaauuuauagcaccguugcuucuucccucgugaucgcgaugggauucgccgcuuuucuguucugggccaugagcaauggcuccugccggugcaacaucuguauuuga

SEQ ID NO: 202395 - RNA, 1683 nt, Artificial Sequence
  derived and/or modified CDS sequence (opt5) from hemagglutinin__InfluenzaA__AGQ81186
auggagaccgugagccugaucacaauucuccuggucgccacgguuuccaacgcugacaagaucugcauuggcuaccagucuaccaauagcacagaaaccguggauacacuuaccgagaacaaugugcccgucacacacgccaaagaacugcuccauaccgagcacaacgggaugcugugugcgacgucccuuggacaaccucugauccucgauaccugcacaauugaaggccugaucuaugggaauccgucuugugaccugcuccuggagggaagagaguggagcuacaucguggaacggcccuccgcuguuaacggccuuugcuauccugggaauguggagaaccuggaggaacuccgcucucuguucagcuccgccagaagcuaccagcggauucagaucuuucccgacaccauuuggaaugucucuuaugauggaacauccaaggccuguagcggcucuuucuaccgcuccaugagauggcuuacccagaaaaacagcgacuauccuauccaagaugcucaguacacgaauaaccagggcaagaauauucuguuuaugugggggaucaaccaucccccuacagacaccacacagcgggaucucuacacccgcaccgacacaacgaccucuguggccacagaggaaauuaauagaaucuucaaaccgcugaucggaccccggccucugguuaacggccucauggggcgcauugauuauuacugguccgugcugaagcccggacaaacccuuagaaucaagagcgacggcaaccugauugcuccuugguaugggcacauccucuccggagagucucauggccggauucugaaaacagaucuuaagaaaggcagcugcaccguccagugucagacggaaaaagggggacugaauacaacccuccccuuucagaacguguccaaguacgccuucggcaauugcagcaaguauaucgggaucaagucucugaaacuggcgauuggacuccgcaacgugccguccagaagcucucggggccuguuuggggccaucgcuggauucauugagggcggcuggagcgggcuugucgccggaugguacggcuuucaacacuccaaugaccaggggguuggaauggcugccgaccgcgauucuacccagaaggcgaucgacaaaauuacaagcaaggugaacaauaucguggauaaaaugaacaagcaauaugaaaucauugaccacgaguucuccgaggucgaaaccagacugaauaugaucaacaauaaaauugaugaccagauccaggauauuugggccuacaacgcugagcuccuggugcuucuggaaaaucagaagacacucgacgagcaugaugccaacguuaauaaccuguacaacaaggugaaacgggcucugggcagcaaugccgucgaagacgggaagggcuguuuugagcucuaucacaaaugcgaugaccaauguauggagacgaucagaaacggaaccuacaaucgcaagaaauaucaggaagagucuaagcuggaacggcagaagauugagggcgugaaacuugaauccgaggggacauacaagauccugaccaucuauagcacaguugccucuucccucgugauugcuaugggauucgcggccuuucuguucugggcuaugagcaacggcuccugcagaugcaauaucuguauuuga

SEQ ID NO: 202396 - RNA, 1683 nt, Artificial Sequence; identical to SEQ ID NO: 202384
  derived and/or modified CDS sequence (opt5) from hemagglutinin__InfluenzaA__AGQ81190

SEQ ID NO: 202397 - RNA, 1683 nt, Artificial Sequence; identical to SEQ ID NO: 202384
  derived and/or modified CDS sequence (opt5) from hemagglutinin__InfluenzaA__AGQ81191

SEQ ID NO: 202398 - RNA, 1683 nt, Artificial Sequence; identical to SEQ ID NO: 202389
  derived and/or modified CDS sequence (opt5) from hemagglutinin__InfluenzaA__AGQ81192

SEQ ID NO: 202399 - RNA, 1683 nt, Artificial Sequence
  derived and/or modified CDS sequence (opt5) from hemagglutinin__InfluenzaA__AGQ81193
auggagaccgugagccugaucacaauucuccuggucgccacgguuuccaacgcugacaagaucugcauuggcuaccagucuaccaauagcacagaaaccguggauacacuuaccgagaacaaugugcccgucacacacgccaaggaacugcuccauaccgagcacaacgggaugcugugugcgacgucccuuggacaaccucugauccucgauaccugcacaauugaaggccugaucuaugggaauccgucuugugaccugcuccuggagggaagagaguggagcuacaucguggaacggcccuccgcuguuaacggccuuugcuauccugggaauguggagaaccuggaggaacuccgcucucuguucagcuccgccagaagcuaccagcggauucagaucuuucccgacaccauuuggaaugucucuuauacaggaaccuccaaggccuguagcggcucuuucuaccgcuccaugagauggcuuacgcagaaaaacggcgauuauccuauccaagacgcucaguacacaaauaaccaggggaagaauauucuguuuauguggggaaucaaccaucccccuaccgauacaacccagcgggaccucuacacccgcacagauacgaccacaagcguggccaccgaggaaauuaauagaaucuucaaaccgcugaucggcccccggccucugguuaacgggcucaugggacgcauugacuauuacuggucugugcugaagcccggccaaacacuuagaaucaaguccgaugggaaccugauugcuccuugguauggacacguccucagcggcgagucccauggccggauccugaaaaccgaccuuaagcgcgggucuugcacggugcagugucagacagaaaaaggaggccugaauaccacccuccccuuucagaacgugagcaaguacgccuucgggaauugcuccaaauauauuggaaucaagagccugaagcuggcggucggccucagaaacguuccgucucgguccagccgcgggcuguuuggagccaucgcuggcuucauugagggcggguggucuggacuuguggccggcugguacggguuucaacacagcaaugaucagggagugggcauggcugccgacagagacuccacacagaaagcgaucgauaagauuaccucuaaagucaacaauaucguggacaagaugaacaaacaauaugaaauuaucgaucacgaguucagcgagguugaaacacggcugaauaugaucaacaauaagauugacgaucagauccaggacauuugggccuacaacgcugagcuccuggugcuucuggaaaaucagaaaacgcucgaugagcaugacgccaacgucaauaaccuguacaacaaggugaagagagcucugggguccaaugccguugaagauggcaaaggauguuuugagcucuaucacaagugcgacgaucaauguauggagaccauccgcaacggcacauacaaucggagaaaauaucaggaagagagcaagcuggaacgccagaaaauugagggggugaaacuugaaucugagggaaccuacaagauccugacaauuuauuccaccgucgccagcucucucgugaucgcuaugggcuucgcggccuuucuguucugggcuauguccaacgggagcugccggugcaauaucuguauuuga

SEQ ID NO: 202400 - RNA, 1683 nt, Artificial Sequence; identical to SEQ ID NO: 202384
  derived and/or modified CDS sequence (opt5) from hemagglutinin__InfluenzaA__AGQ81194

SEQ ID NO: 202401 - RNA, 1686 nt, Artificial Sequence
  derived and/or modified CDS sequence (opt5) from hemagglutinin__InfluenzaA__AGQ81195
auguacaagaucguggucauuaucacccugcucggcacaguuaaagggcuggacaagauuugccuuggacaccaugccguggcuaacggcacgaucgugaaaacccugacaaaugagcaggaagaggucaccaacgccacagaaaccguggaggggaaaagccucaauagacuguguaugaaaggacggaaccacaaggaucuuggcaauugccaucccauugggaugcugaucggaaccccugcgugugaccuccaccugacaggcacgugggauacccugaucgaacgcgagaacgcuauugccuauugcuacccgggcgccacaaucaaugaggaagcucucagacaaaagauuauggaguccgggggaaucucuaaaauuagcaccggcuucacauauggguccucuaucaacagcgccggaaccacgcgggcuuguaugcgcaauggcgggaacuccuuuuacgccgaacugaaguggcuuguuucuaaaagcaagggacagaauuucccccagacaaccaacacauauagaaauaccgacaccuccgagcaucugauuauguggggcauccaccacccuagcucuacacaggagaaaaacgaucucuacggcacgcaaucccugagcaucucugugggguccagcaccuaucagaauaacuuuguccccgugguuggagcgcggccucaggugaacggccagucugggcgcauugacuuccauuggacacuuguccaacccggagauaauaucaccuuuucccacaacggcgggcugauugccccuagcagaguguccaagcucaucggacggggccugggcauucagucugacgcuagcaucgauaauaacugcgaauccaaguguuucuggcgcgggggaagcaucaauacaagacugccguuucagaaccucucuccccggaccgugggccagugcccuaaauacgucaauaagcgcucccugaugcuugccacggggaugagaaacguucccgagauuaugcaaggacggggccuguucggggcuaucgccggcuuuauugaaaauggaugggagggcaugguggacgggugguacggauuccgccaucagaacgcgcagggcacagggcaagccgcugauuauaaaagcacccaggccgcuaucgaccagauuaccggaaagcucaauagacugaucgaaaagacaaacaccgaguuugagucuaucgaaagcgaguucuccgaaauugagcaccagaucggcaaugugauuaacuggacaaaggauucuaucacggacauuuggaccuaccaagccgaacuucuggucgccauggagaaucagcacacaaucgacauggcugauagcgagaugcucaaccuguaugaacgggugagaaaacagcugcgccagaacgcggaggaagacgggaagggcuguuuugagauuuaccaugccugcgaugacuccuguauggaaagcauccggaauaacaccuaugaucacucucaauacagagaggaggcucuccugaaucgccuuaacaucaauccuguuacacuguccagcggauauaaggacauuauccucugguucucuuucggcgccuccugcuuugugcugcuugccgucgugauggggcugguuuucuuuugccucaaaaacggaaauaugcgguguaccauuugcaucuga

SEQ ID NO: 202402 - RNA, 1686 nt, Artificial Sequence
  derived and/or modified CDS sequence (opt5) from hemagglutinin__InfluenzaA__AGQ81196
auguacaagaucguggucauuaucgcccugcucggcgcuguuaaagggcuggacaagauuugccuuggacaccaugccguggcgaacggcaccaucgugaaaacacugacgaaugagcaggaagaggucaccaacgcuacagaaaccguggagagcgccucccucaauagacuguguaugaaggggcggucucacaaagaucuuggaaacugccaucccauuggcaugcugaucgggaccccugccugugaccuccaccugacaggaacaugggauacccugaucgaacgcgagaaugcuauugccuauugcuacccgggcgcuacgguuaacgaggaagcccucagacaaaagaucauggagagcggcgggauuuccaagaucucuaccggauucacauauggcagcuccauuaauucugcggggaccacaaaagccuguaugcggaaccgcggaaauagcuuuuacgcugaacugaaguggcuuguguccaaaagcaagggccagaacuucccccagaccacgaauacauauagaaacaccgacacagccgagcaucugaucaugugggggauucaccacccuucuuccacccaggagaaaaaugaucucuacggaacccaaagccugucuaucuccgucggcagcucuacauaucagaacaauuuugugcccguugugggcgcucggccucaggucaacgggcaguccggacgcaucgacuuccauuggacgcuugugcaacccggcgauaacauuaccuuuagccacaaugggggacugaucgccccuuccagagugucuaagcucgucggccgggggcugggcauucagagcgacgcgccgaucgauaacaauugcgaauccaaguguuucuggcgcggaggcagcauuaacacaagacugcccuuucagaaucucucuccucggaccguugggcagugccccaaauacgugaacaagcgcucccugaugcuugccacaggaaugagaaaugugccugagaucaugcaaggccgggggcuguucggagcuaucgccggcuuuauugaaaacgggugggagggcauggucgacggaugguacggcuuccgccaucagaaugcucaggggaccggacaagccgccgauuauaaaagcacgcagacagcuaucgaccagauuaccggcaagcucaacagacugaucgagaaaaccaauacagaauuugagucuauugaaagcgaguucuccgaaaucgagcaccagaucgggaacgugauuaauuggaccaaggauucuaucacagacauuuggacguaccaagcggaacuucugguugccauggagaaccagcacaccaucgacauggcugauagcgagaugcucaaucuguaugaacgggugagaaaacagcugcgccagaacgccgaggaagacggaaagggcuguuuugagauuuaccaugccugcgaugacuccuguauggaaagcauccggaacaauacauaugaucacucucaauacagagaggaggcucuccugaaccgccuuaauauuaaccccgucaagcuguccagcggguauaaagacaucauccucugguucucuuucggcgccuccugcuuugugcugcuugcgguugugaugggacuggucuucuuuugccucaagaauggcaacaugcgguguaccauuugcaucuga

SEQ ID NO: 202403 - RNA, 1686 nt, Artificial Sequence
  derived and/or modified CDS sequence (opt5) from hemagglutinin__InfluenzaA__AGQ81198
auguacaagaucguggucauuaucgcccugcucggcgcuguuaaagggcuggacaagauuugccuuggacaccaugccguggcgaacggcaccaucgugaaaacacugacgaaugagcaggaagaggucaccaacgcuacagaaaccguggagagcacaucccucaauagacuguguaugaaggggcggaaccacaaagaucuuggaaauugccaucccauuggcaugcugaucgggaccccugccugugaccuccaccugacaggaaccugggauacgcugaucgaacgcgagaacgccauugcuuauugcuacccgggcgccaccaucaaugaggaagcucucagacaaaagauuauggagucuggcgggaucagcaagauuuccacaggauucaccuauggcucuagcaucaacuccgccgggaauacaaaagcguguaugcggaacggaggcaauucuuuuuacgccgaacugcgcuggcuuguuagcaagaacaaagggcagaauuucccccagaccacgaacacauauagaaauaccgacacagcugagcaucugauuaucuggggaauccaccacccuuccagcaccaaggagaaaaacgaucucuacggcacccagucucuguccauuagcguggggucuuccacauaucaaaacaauuuuguccccgugguuggcgcccggccucaggugaacggacagagcggccgcaucgacuuccauuggacgcuuguccagcccggggauaauauuaccuuuucucacaacggaggccugaucgcuccuuccagagugagcaagcucauugggcggggacugggcauccaauccgacgccccgaucgauaauaacugcgaaucuaaguguuucuggcgcggcgggagcauuaauacaagacugcccuuucagaaccucuccccucggaccgugggacagugccccaaauacgucaauaagaaaagccugaugcuugcgacaggcaugcgcaacguuccugagaucaugcaggggagaggacuguucggcgccauugcuggguuuaucgaaaauggcugggagggaaugguggacggcugguacggguuccggcaucaaaacgcccagggaaccggccaggcugccgauuauaagucuacgcaagccgcuauugaccagaucacagggaaacucaaucgccugaucgaaaagaccaacaccgaguuugaguccauugaaagcgaguucucugaaaucgagcaccagauuggaaaugugaucaacuggacaaaagauagcauuaccgacaucuggacauaccaggcggaacuucuggucgccauggagaaccaacacacgauugacauggcugauuccgagaugcucaaucuguaugaaagagugcggaagcagcugagacagaacgccgaggaagacggcaagggguguuuugagaucuaccaugccugcgaugacucuuguauggaaagcauccgcaauaacaccuaugaucacucccaguaccgggaggaggcucuccugaauagacuuaacauuaaucccguuacacugagcucuggcuauaaagacaucauucucugguucuccuucggagccagcugcuuugugcugcuugcggucgugaugggccugguuuucuuuugccucaagaacgggaauaugcgcuguaccaucugcauuuga

SEQ ID NO: 202404 - RNA, 1686 nt, Artificial Sequence
  derived and/or modified CDS sequence (opt5) from hemagglutinin__InfluenzaA__AGQ81199
auguacaagaucguggucauuaucgcccugcucggcgcuguuaaagggcuggacaagauuugccuuggacaccaugccguggcgaacggcaccaucgugaaaacacugacgaaugagcaggaagaggucaccaacgcuacagaaaccguggagagcgccucccucaauagacuguguaugaaggggcggucucacaaagaucuuggaaacugccaucccauuggcaugcugaucgggaccccugccugugaccuccaccugacaggaacaugggauacccugaucgaacgcgagaaugcuauugccuauugcuacccgggcgcuacgguuaacgaggaagcccucagacaaaagaucauggagagcggcgggauuuccaagaucucuaccggauucacauauggcagcuccauuaauucugcggggaccacaaaagccuguaugcggaacggaggcaauagcuuuuacgcugaacugaaguggcuuguguccaaaagcaaggggcagaacuucccccagaccacgaauacauaucgcaacaccgacacagccgagcaucugaucauguggggcauucaccacccuucuuccacccaggagaaaaaugaucucuacggaacccaaagccugucuaucuccgucggcagcucuacauaucagaacaauuuugugcccguugugggggcuagaccucaggucaacggacaguccggccggaucgacuuccauuggacgcuugugcaacccggggauaacauuaccuuuagccacaauggaggccugaucgccccuucccgcgugucuaagcucgucgggagaggacugggcauucagagcgacgcgccgaucgauaacaauugcgaauccaaguguuucuggcggggcgggagcauuaacacacgccugcccuuucagaaucucucuccuagaaccguuggacagugccccaaauacgugaacaagcggucccugaugcuugccacaggcaugcgcaaugugccugagaucaugcaagggagaggacuguucggcgcuaucgccggguuuauugaaaacggcugggagggaauggucgacggcugguacggguuccggcaucagaaugcucagggaaccggccaagccgccgauuauaaaagcacgcagacagcuaucgaccagauuaccgggaagcucaaccgccugaucgagaaaaccaauacagaauuugagucuauugaaagcgaguucuccgaaaucgagcaccagaucggaaacgugauuaauuggaccaaggauucuaucacagacauuuggacguaccaagcggaacuucugguugccauggagaaccagcacaccaucgacauggcugauagcgagaugcucaaucuguaugaaagagugcggaaacagcugagacagaacgccgaggaagacggcaagggguguuuugagauuuaccaugccugcgaugacuccuguauggaaagcauccgcaacaauacauaugaucacucucaauaccgggaggaggcucuccugaacagacuuaauauuaaccccgucaagcuguccagcggcuauaaagacaucauccucugguucucuuucggagccuccugcuuugugcugcuugcgguugugaugggccuggucuucuuuugccucaagaaugggaacaugcgcuguaccauuugcaucuga

SEQ ID NO: 202405 - RNA, 1698 nt, Artificial Sequence
  derived and/or modified CDS sequence (opt5) from hemagglutinin__InfluenzaA__AGQ81200
augaagaaaacccugcucuuugccgcuaucuuucuguacgugaaggccgacgagauuugcaucggcuaucuuagcaacaauuccacagauaaagucgacacgauuaucgaaaacaauguuaccgugacaucuagcguggagcuggucgaaaccgagcacacaggguccuucuguucuauuaacggaaagcagcccaucggccucggggauugcagcuuugcgggauggauccugggcaauccuaugugugacgaucuuauugggaaaaccuccuggucuuacaucguggaaaagccgaaccccgcuaauggaauuugcuauccuggcacacuggagaacgaggaagaacucagacugaaguucagcggcguucuggaauuuuccaaauucgaggccuuuaccagcacgggguggggagccgucaauucuggcgcuggggugaccgccgcuuguaaguucggauccagcaacucuuucuuccggaauaugguguggcucauccaucaauccggcacauaccccguuauuaaacgcaccuuuaacaauacaaaggggagagacgugcuggucguguggggaauccaccauccugccacccuuaaagagcaccaggaucuguauaagaaggacagcucuuacguggcggucggcuccgaaacguauaaccggcgcuucauucccgagaucagcacaagaccuaaaguuaauggccaggccgggcggaugaccuuuuacuggacaaucgugaagccgggagaauccauuaccuucgagucuaacggcgcuuuccucgcuccccgcuacgccuuugaaaucgugagcgucgggaacggaaaacuguucagauccgagcuuaauauugagagcugcucuaccaagugucagacagaaaucggcgggauuaacacgaauaaauccuuucauagcgugcaccggaacaccaucggagauugcccuaaguauguuaaugugaaaucucugaagcucgccacaggccugcgcaacguccccgcgaucgccagcagaggccuguucggggcuauugccggauuuaucgagggcggguggccuggacucauuaauggcugguacggguuccaacaccggaacgaagagggcaccggaaucgcugccgacaaggaauccacacagaaagccauugaucagaucaccucuaaggugaauaacaucguugacaaaaugaauacgaacuuugagagcgugcagcaugaguucuccgaaauugaggaacgcaucaaucaacugagcaagcacgucgaugacucuguggucgacauuugguccuauaacgcucagcuucuggugcuccuggagaaugagaaaacacuugaucugcaugacagcaacguuagaaaccuccacgagaaggugcggcgcaugcugaaggauaaugcgaaagacgagggcaacggguguuuuaccuucuaccacaagugcgauaaugaauguaucgagagaguccggaacggaaccuaugaccauaaagaauuugaggaggaaucuaagauuaauagacaggagaucgaaggcgugaaacuggauuccagcgggaacguuuacaagauucucuccaucuauucuugcaucgccagcucccuggugcuugcugcccugauuaugggauucauccucugggccugcucuaauggcagcugucgcugcacaauuuguaucuga

SEQ ID NO: 202406 - RNA, 1698 nt, Artificial Sequence
  derived and/or modified CDS sequence (opt5) from hemagglutinin__InfluenzaA__AGQ81202
augaagaaaacccuccuguucgccgcuaucuuucuguacgugaaggccgacgagauuugcaucggcuaucuuagcaacaauuccacagauaaagucgacacgauuaucgaaaacaauguuaccgugacaucuagcguggagcuggucgaaaccgagcacacaggguccuucuguucuauuaacggaaagcagcccaucagccucggcgauugcuccuuugcgggguggauccugggaaauccuaugugugacgaucuuauuggcaaaaccucuuggagcuacaucguggaaaagccgaaccccgcuaaugggauuugcuauccuggaacacuggagaacgaggaggaacucagacugaaguucuccggcguucuggaauuuagcaaauucgaggccuuuaccucuaauggcuggggagccgugaacuccggggcuggcgucacggccgcuuguaaguucgggagcucuaauuccuuuuuccggaacaccguguggcucauccaucaaagcggaacauaccccguuauuaaacgcaccuuuaauaacacaaagggcagagacgugcuggucguguggggagugcaccauccugccacccuuaaagagcaccaggaucuguauaagaaggacucuuccuacgucgcgguugggagcgaaacguauaaucggcgcuucauccccgagauuuccacaagaccuaaagugaacggccaggccggccggaugaccuuuuacuggacaaucgugaagccgggggaaucuaucaccuucgagagcaacggagcuuuccucgcuccccgcuacgccuuugaaauugucuccgugggcaaugggaaacuguucagaagcgagcuuaacaucgagucuugcuccaccaagugucagacagaaauuggaggcaucaauacgaacaagagcuuucauucuguucaccggaauaccauuggggauugcccuaaauaugugaacgucaaaagccugaagcucgccacaggacugcgcaaugugcccgcgaucgccuccagaggccuguucggcgcuaucgccggguuuauugagggaggcuggccugggcucaucaacggaugguacggcuuccaacaccggaaugaagaggggaccggcauugcugccgacaaggaaucuacacagaaagccaucgaucagauuaccagcaagguuaacaauaucguggaccgcaugaacacgaauuuugaguccguccagcaugagagcucugaaaucgaggaaagaauuaaccaacuguccaaacacguggaugacagcauggucgacaucuggucuuauaaugcucagcuucuggugcuccuggagaacgaaaagacacuugaucugcaugacuccaacguucggaaucuccacgagaaagugcgcagaaugcugaaggauaacgcgaaggacgagggaaauggcuguuucaccuuuuaccacaaaugcgauaacaaguguauugaacgggucagaaaugggaccuaugaccauaaagaguucgaagaggagagcaagaucaaccgccaggaaauugagggagugaaacuggauuccucuggcaauguuuacaagauccucagcauuuauuccugcaucgccucuagccuggugcuugcugcccugaucaugggguuuauucucugggccugcuccaacggaagcugucggugcacaaucuguauuuga

SEQ ID NO: 202407 - RNA, 1698 nt, Artificial Sequence
  derived and/or modified CDS sequence (opt5) from hemagglutinin__InfluenzaA__AGQ81203
augaagaaaacccugcucuuugccgcuaucuuucuguacgugaaggccgacgagauuugcaucggcuaucuuagcaacaauuccacagauaaagucgacacgauuaucgaaaacaauguuaccgugacaucuagcguggagcuggucgaaaccgagcacacaggguccuucuguucuauuaacggaaagcagcccaucagccucggcgauugcuccuuugcgggguggauccugggaaauccuaugugugacgaucuuauuggcaaaaccucuuggagcuacaucguggaaaagccgaaccccgcuaaugggauuugcuauccuggaacacuggagaacgaggaggaacucagacugaaguucuccggcguucuggaauuuaauaaauucgaggccuuuaccagcaacggcuggggagccgucaauucuggggcuggcgugacggccgcuuguaaguucggguccagcaacucuuucuuccggaauaugguguggcucauccaucaauccggaaccuaccccguuauuaaacgcacauuuaacaauaccaagggcagagacgugcuggucgugugggggauccaccauccugccacacuuaaagagcaccaggaucuguauaagaaggacagcucuuacguggcggucggauccgaaaccuauaaccggcgcuucauucccgagaucagcacgagaccuaaaguuaacggccaggccggccggaugacauuuuacuggaccaucgugaagccgggggaauccauuacauucgagucuaauggagcuuuccucgcuccccgcuacgccuuugaaaucgugagcgucggcaacgggaaacuguucagauccgagcuuaauauugagagcugcucuaccaagugucagaccgaaaucggaggcauuaacacaaauaaauccuuucauagcgugcaccggaacacgaucggggauugcccuaaguauguuaaugugaaaucucugaagcucgccaccggacugcgcaacguccccgcgaucgccagcagaggccuguucggcgcuauugccggguuuaucgagggaggcuggccugggcucauuaauggaugguacggcuuccaacaccggaacgaagaggggacaggcaucgcugccgacaaggaauccacccagaaagccauugaucagaucacaucuaaggugaauaacaucguugaccgcaugaauaccaacuuugagagcgugcagcaugaguucuccgaaauugaggaaagaaucaaucaacugagcaaacacgucgaugacucuguggucgacauuugguccuauaacgcucagcuucuggugcuccuggagaacgaaaagacgcuugaucugcaugacagcaauguucggaaccuccacgagaaagugcgcagaaugcugaaggauaaugcgaaggacgagggaaacggcuguuuuacauucuaccacaaaugcgauaaugaauguaucgagcgggucagaaacgggaccuaugaccauaaggaauuugaggaggaaucuaaaauuaaucgccaggagaucgaaggagugaagcuggauuccagcggcaacguuuacaaaauucucuccaucuauucuugcaucgccagcucccuggugcuugcugcccugauuaugggguucauccucugggccugcucuaauggaagcugucggugcaccauuuguaucuga

SEQ ID NO: 202408 - RNA, 1698 nt, Artificial Sequence
  derived and/or modified CDS sequence (opt5) from hemagglutinin__InfluenzaA__AGQ81204
augaagaaaacccugcucuuugccgcuaucuuucuguacgugaaggccgacgagauuugcaucggcuaucuuagcaacaauuccacagauaaagucgacacgauuaucgaaaacaauguuaccgugacaucuagcguggagcuggucgaaaccgagcacacaggguccuucuguucuauuaacggaaagcagcccaucagccucggcgauugcuccuuugcgggguggauccugggaaauccuaugugugacgaucuuauuggcaaaaccucuuggagcuacaucguggaaaagccgaaccccgcuaaugggauuugcuauccuggaacacuggagaacgaggaggaacucagacugaaguucuccggcguucuggaauuuaauaaauucgaggccuuuaccagcaacggcuggggagccgucaauucuggggcuggcgugacggccgcuuguaaguucggguccagcaacucuuucuuccggaauaugguguggcucauccaucaauccggaaccuaccccguuauuaaacgcacauuuaacaauaccaagggcagagacgugcuggucgugugggggauccaccauccugccacacuuaaagagcaccaggaucuguauaagaaggacagcucuuacguggcggucggauccgaaaccuauaaccggcgcuucauucccgagaucagcacgagaccuaaaguuaacggccaggccggccggaugacauuuuacuggaccaucgugaagccgggggaauccauuacauucgagucuaauggagcuuuccucgcuccccgcuacgccuuugaaaucgugagcgucggcaacgggaaacuguucagauccgagcuuaauauugagagcugcucuaccaagugucagaccgaaaucggaggcauuaacacaaauaaauccuuucauagcgugcaccggaacacgaucggggauugcccuaaguauguuaaugugaaaucucugaagcucgccaccggacugcgcaacguccccgcgaucgccagcagaggccuguucggcgcuauugccggguuuaucgagggaggcuggccugggcucauuaauggaugguacggcuuccaacaccggaacgaagaggggacaggcaucgcugccgacaaggaauccacccagaaagccauugaucagaucacaucuaaggugaauaacaucguugaccgcaugaauaccaacuuuggaagcgugcagcaugaguucuccgagauugaagagagaaucaaucaacugagcaaacacgucgaugacucuguggucgacauuugguccuauaacgcucagcuucuggugcuccuggaaaacgagaagacgcuugaucugcaugacagcaauguucggaaccuccacgaaaaagugcgcagaaugcugaaggauaaugcgaaggacgagggcaacggguguuuuacauucuaccacaaaugcgauaaugaguguaucgaacgggucagaaacggaaccuaugaccauaaggaguuugaagaggagucuaaaauuaaucgccaggaaaucgagggcgugaagcuggauuccagcgggaacguuuacaaaauucucuccaucuauucuugcaucgccagcucccuggugcuugcugcccugauuaugggauucauccucugggccugcucuaauggcagcugucggugcaccauuuguaucuga

SEQ ID NO: 202409 - RNA, 1698 nt, Artificial Sequence
  derived and/or modified CDS sequence (opt5) from hemagglutinin__InfluenzaA__AGQ81205
augaagaaaacccugcucuuugccgcuaucuuucuguacgugaaggccgacgagauuugcaucggcuaucuuagcaacaauuccacagauaaagucgacacgauuaucgaaaacaauguuaccgugacaucuagcguggagcuggucgaaaccgagcacacaggguccuucuguucuauuaacggaaagcagcccaucagccucggcgauugcuccuuugcgggguggauccugggaaauccuaugugugacgaucuuauuggcaaaaccucuuggagcuacaucguggaaaagccgaaccccgcuaaugggauuugcuauccuggaacacuggagaacgaggaggaacucagacugaaguucuccggcguucuggaauuuaauaaauucgaggccuuuaccagcaacggcuggggagccgucaauucuggggcuggcgugacggccaccuguaaguucggguccagcaacucuuucuuccggaauaugguguggcucauccaucaauccggaacauaccccguuauuaaacgcaccuuuaacaauacaaagggcagagacgugcuggucgugugggggauccaccauccugcuacccuuaaagagcaccaggaucuguauaagaaggacagcucuuacguggccgucggauccgaaacguauaaccggcgcuucauucccgagaucagcacaagaccuaaaguuaacggccaggcgggccggaugaccuuuuacuggacaaucgugaagccgggggaauccauuaccuucgagucuaauggagccuuccucgcuccccgcuacgccuuugaaaucgugagcgucggcaacgggaaacuguucagauccgagcuuaauauugagagcugcucuaccaagugucagacagaaaucggaggcauuaacacgaauaaauccuuucauagcgugcaccggaacaccaucggggauugcccuaaguauguuaaugugaaaucucugaagcucgcuacaggacugcgcaacguccccgccaucgcgagcagaggccuguucggcgccauugcuggguuuaucgagggaggcuggccugggcucauuaauggaugguacggcuuccaacaccggaacgaagaggggaccggcaucgccgcugacaaggaauccacacagaaagccauugaucagaucaccucuaaggugaauaacaucguugaccgcaugaauacgaacuuugagagcgugcaguaugaguucuccgaaauugaggaaagaaucaaucaacugagcaaacaugucgaugacucuguggucgacauuugguccuacaacgcccagcuucuggugcuccuggagaacgaaaagacacuugaucugcacgacagcaauguucggaaccuccaugagaaagugcgcagaaugcugaaggauaaugcuaaggacgagggaaacggcuguuuuaccuucuaucacaaaugcgauaaugaauguaucgagcgggucagaaacgggaccuacgaccacaaggaauuugaggaggaaucuaaaauuaaucgccaggagaucgaaggagugaagcuggauuccagcggcaacguuuauaaaauucucuccaucuacucuugcaucgcgagcucccuggugcuugccgcucugauuaugggguucauccucugggccugcucuaauggaagcugucggugcacaauuuguaucuga

SEQ ID NO: 202410 - RNA, 1698 nt, Artificial Sequence
  derived and/or modified CDS sequence (opt5) from hemagglutinin__InfluenzaA__AGQ81206
augaagaaaacccuccuguucgccgcuaucuuucuguacgccaaggcggacgagauuugcaucggcuaucuuagcaacaauuccacagauaaaguggacacgauuaucgaaaacaaugucaccguuacaucuagcguggagcugguggaaaccgagcacacaggguccuucuguucuauuaacggaaagcagcccaucagccucggcgauugcuccuuugcuggguggauccugggaaauccuaugugugacgaucuuauuggcaaaaccucuuggagcuacaucgucgaaaagccgaaccccgccaaugggauuugcuauccuggaacacuggagaacgaggaagaacucagauccaaguucagcggcgugcuggaauuuucuaaauucgaggccuuuaccuccaauggcuggggagcuguuaacagcggggccggcgugacggcugccuguaaguucgggucuuccaauagcuuuuuccggaacauggucuggcugauccaucaaucuggaaccuaccccgugauuaaacgcacauuuaauaacaccaagggcagagacguucucguggucugggggauccaccauccugcgacacugaaagagcaccaggaucuuuauaagaaggacuccagcuacguggccgugggauccgaaaccuauaaucggcgcuucauucccgagaucucuacgagaccuaaagucaacggccaggcuggccggaugacauuuuacuggaccaucguuaagccggaagagagcauuacauucgaauccaacggggccuuccuggcuccccgcuacgccuuugagaucgugagcgugggaaauggcaaacucuucagaucugagcugaacauugaauccugcagcaccaagugucagaccgagaucgggggaauuaauacaaacaaaucuuuucauagcguccaccggaauacgaucggcgauugcccuaaguaugugaacguuaaaucccuuaagcuggcgaccgggcuccgcaaugugcccgccaucgcuucuagaggacuguucggcgccauugcuggcuuuaucgaagggggauggccuggccugauuaacgggugguacggauuccaacaccggaaugaggaaggcacagggaucgccgccgacaaggagagcacccagaaagcuauugaucagaucacauccaaggucaacaauaucguggaccgcaugaacaccaauuuugagagcguucagcaugaguucucugagauugaagagagaaucaaccaacucuccaaacacguggaugacagcgucguggacauuuggucuuauaaugcgcagcugcuuguccugcucgaaaacgagaagacgcuggaucuucaugacuccaacgugcggaaucugcacgagaaaguucgcagaaugcucaaggauaacgccaaggacgaaggcaauggauguuuuacauucuaccacaaaugcgauaacgaguguaucgaacgggugagaaauggcaccuaugaccauaaggaguuugaggaagagagcaaaauuaaccgccaggaaaucgagggggucaagcuggauuccucuggaaauguguacaaaauucugagcaucuauuccugcaucgcuucuagccucauucuggccgcccuuaucaugggcuucauucugugggcuugcuccaacgggagcugucggugcaccaucuguauuuga

SEQ ID NO: 202411 - RNA, 1698 nt, Artificial Sequence
  derived and/or modified CDS sequence (opt5) from hemagglutinin__InfluenzaA__AGQ81209
augaagaaaacccuccuguucgccgcuaucuuucuguacgugaaggccgacgagauuugcaucggcuaucuuagcaacaauuccacagauaaagucgacacgauuaucgaaaacaauguuaccgugacaucuagcguggagcuggucgaaaccgagcacacaggguccuucuguucuauuaacggaaagcagcccaucagccucggcgauugcuccuuugcgggguggauccugggaaauccuaugugugacgaucuuauuggcaaaaccucuuggagcuacaucguggaaaagccgaaccccgcuaaugggauuugcuauccuggaacacuggagaacgaggaggaacucagacugaaguucuccggcauccuggaauuuagcaaauucgaggccuuuaccucuaauggcuggggagccguuaacuccggggcuggcgugacggccgcuuguaaguucgggagcucuaauuccuuuuuccggaacauggucuggcucauucaucaaagcggaaccuaccccgugaucaaacgcacauuuaauaacaccaagggcagagacguucugauugugugggggauccaccauccugccacacuuaaagagcaccaggaucuguauaagaaggacucuuccuacgucgcggugggaagcgaaaccuauaaucggcgcuucauccccgagauuuccacgagaccuaaagugaacggccaggccggccggaugacauuuuacuggaccaucgucaagccgggggaaucuauuacauucgagagcaacggagcuuuccucgcuccccgcuacgccuuugaaaucguuuccgugggcaaugggaaacuguucagaagcgagcuuaacauugagucuugcuccaccaagugucagaccgaaaucggaggcaucaauacaaacaagagcuuucauucugugcaccggaauacgauuggggauugcccuaaauaugucaacgugaaaagccugaagcucgccaccggacugcgcaauguucccgcgaucgccuccagaggccuguucggcgcuauugccggguuuaucgagggaggcuggccugggcucauuaacggaugguacggcuuccaacaccggaaugaagaggggacaggcaucgcugccgacaaggaaucuacccagaaagccaucgaucagauuacaagcaaggugaacaauaucgucgaccgcaugaacaccaauuuugaguccgugcagcaugaguucagcgaaauugaggaaagaaucaaccaacugucuaaacacguugaugacuccguggucgacauuuggagcuauaaugcucagcuucuggugcuccuggagaacgaaaagacgcuugaucugcaugacucuaacguccggaaucuccacgagaaagugcgcagaaugcugaaggauaacgcgaaggacgagggaaauggcuguuuuacauucuaccacaaaugcgauaacgaauguaucgagcggguuagaaaugggaccuaugaccauaaggaauuugaggaggaauccaaaauuaaccgccaggagaucgaaggagugaagcuggauagcuccggcaaugucuaccggauccucucuauuuauagcugcaucgccuccucucuggugcuugcugcccugauuaugggguucauccucugggccugcagcaacggauccuguagaugcaccauuuguaucuga

SEQ ID NO: 202412 - RNA, 1698 nt, Artificial Sequence
  derived and/or modified CDS sequence (opt5) from hemagglutinin__InfluenzaA__AGQ81211
augaagaaaacccuccuguucgccgcuaucuuucuguacgugaaggccgacgagauuugcaucggcuaucuuagcaacaauuccacagauaaagucgacacgauuaucgaaaacaauguuaccgugacaucuagcguggagcuggucgaaaccgagcacacaggguccuucuguucuauuaacggaaagcagcccaucagccucggcgauugcuccuuugcgggguggauccugggaaauccuaugugugacgaucuuauuggcaaaaccucuuggagcuacaucguggaaaagccgaaccccgcuaaugggauuugcuauccuggaacacuggagaacgaggaagaacucagacugaaguucuccggcguucuggaauuuagcaaauucgaggccuuuaccucuaauggcuggggagccgugaacuccggggcuggcgucacggccgcuuguaaguucgggagcucuaauuccuuuuuccggaacaugguguggcucauccaucaaagcggaaccuaccccguuauuaaacgcacauuuaauaacaccaagggcagagacgugcugaucgucugggggauucaccauccugccacacuuaaagagcaccaggaucuguauaagaaggacucuuccuacguggcggugggaagcgaaaccuauaaucggcgcuucauccccgagaucuccacgagaccuaaagucaacggccaggccggccggaugacauuuuacuggaccauuguuaagccgggggaaucuaucacauucgagagcaacggagcuuuccucgcuccccgcuacgccuuugaaauuguguccgugggcaaugggaaacuguucagaagcgagcuuaacaucgagucuugcuccaccaagugucagaccgaaauuggaggcaucaauacaaacaagagcuuucauucuguccaccggaauacgaucggggauugcccuaaauaugugaacguuaaaagccugaagcucgccaccggacugcgcaaugugcccgcgauugccuccagaggccuguucggcgcuaucgccggguuuauugagggaggcuggccugggcucaucaacggaugguacggcuuccaacaccggaaugaagaggggacaggcauugcugccgacaaggaaucuacccagaaagccaucgaucagaucacaagcaaggucaacaauauuguggaccgcaugaacaccaauuuugaguccguucagcaugaguucagcgaaaucgaggaaagaauuaaccaacugucuaaacacguggaugacuccgucguggacaucuggagcuauaaugcucagcuucugguccuccuggagaacgaaaagacgcuugaucugcaugacuuuaacgugcggaaucuccacgagaaaguucgcagaaugcugaaggauaacgcgaaggacgagggaaauggcuguuucacauuuuaccacaaaugcgauaacgaauguauugagcgggugagaaaugggaccuaugaccauaaggaguucgaggaggaaucuaaaaucaaccgccaggagauugaaggagucaagcuggauuccagcggcaauguguaccggauccucuccaucuauucuugcauugccagcucccugguucuugcugcccugaucaugggguuuauucucugggccugcucuaacggaagcuguagaugcaccaucuguauuuga

SEQ ID NO: 202413 - RNA, 1698 nt, Artificial Sequence
  derived and/or modified CDS sequence (opt5) from hemagglutinin__InfluenzaA__AGQ81213
augaagaaaacccuccuguucgccgcuaucuuucuguacgugagagccgacgagauuugcaucggcuaucuuagcaacaauuccacagauaaggucgacacgauuaucgaaaacaauguuaccgugacaucuagcguggagcuggucgaaaccgagcacacaggguccuucuguucuauuaacggaaaacagcccaucagccucggcgauugcuccuuugcgggguggauccugggaaauccuaugugugacggccuuauugggaagaccucuuggagcuacaucguggaaaaaccgaaccccgcuaauggaauuugcuauccuggcacacuggagaacgaggaggaacuccggcugaaguucucccgcguucuggaauuuagcaaguucgaggccuuuaccucuaauggcuggggagccgugaacuccggggcuggcgucacggccgcuuguaaauucgggagcucuaauuccuuuuucagaaacaugguguggcucauccaucaaagcggaaccuaccccguuauuaagcggacauuuaauaacaccaaaggccgcgaugugcuggucgugugggggauccaccauccugccacacuuaaggagcaccaggaccuguauaaaaaggauucuuccuacguggcggucggaagcgaaaccuauaauagacgguucauucccgagaucuccacgcgcccuacaguuaacggccaggccggcagaaugaccuuuuacuggacaaucgugaagccgggggaaucuauuaccuucgagagcaacggagcuuuccucgcuccccgguacgccuuugaaaucguguccgucggcaaugggaaacuguuccgcagcgagcuuaacauugagucuugcuccaccaagugucagacagaaaucggaggcauuaauacgaacaagagcuuucauucugugcacagaaauaccaucggggacugcccuaaauauguuaacgugaaaagccugaagcucgccacaggacugcggaauguccccgcgaucgccucccgcggccuguucggcgcuauugccggguuuaucgagggaggcuggccugggcucauuaacggaugguacggcuuccaacacagaaaugaagaggggaccggcaucgcugccgauaaagaaucuacacagaaggccauugaccagaucaccagcaaggugaacaauaucguugaucggaugaacacgaauuuugaguccgugcagcaugaguucagcgaaauugaggaacgcaucaaccaacugucuaaacacgucgacgauuccguggucgacauuuggagcuauaaugcucagcuucuggugcuccuggagaacgaaaagacacuugaccugcaugauucuaacguuagaaaucuccacgagaaagugcggagaaugcugaaggacaacgcgaaagaugagggaaauggcuguuuuaccuucuaccacaagugcgacaacgaauguaucgagcgcguccggaaugggaccuaugaucauaaggaauuugaggaggaauccaaaauuaacagacaggagaucgaaggagugaagcuggacagcuccggcaauguuuacaaaauucucucuaucuauagcugcaucgccuccucucuggugcuugcugcccugauuaugggguucauccucugggccugcagcaacggauccugucgcugcacaauuuguaucuga

SEQ ID NO: 202414 - RNA, 1698 nt, Artificial Sequence
  derived and/or modified CDS sequence (opt5) from hemagglutinin__InfluenzaA__AGQ81214
augaagaaaacccuccuguucgccgcuaucuuucuguacgugaaggccgacgagauuugcaucggcuaucuuagcaacaauuccacagauaaagucgacacgauuaucgaaaacaauguuaccgugacaucuagcguggagcuggucgaaaccgagcacacaggguccuucuguucuauuaacggaaagcagcccaucagccucggcgauugcuccuuugcgggguggauccugggaaauccuaugugugacgaucuuauuggcaaaaccucuuggagcuacaucguggaaaagccgaaccccgcuaaugggauuugcuauccuggaacacuggagaacgaggaggaacucagacugaaguucuccggcguucuggaauuuagcaaauucgaggccuuuaccucuaauggcuggggagccgugaacuccggggcuggcgucacggccgcuuguaaguucgggagcucuaauuccuuuuuccggaacaugguguggcucauccaucaaagcggaaccuaccccguuauuaaacgcacauuuaauaacaccaagggcagagacgugcugaucgucugggggauucaccauccugccacacuuaaagagcaccaggaucuguauaagaaggacucuuccuacguggcggugggaagcgaaaccuauaaucggcgcuucauccccgagaucuccacgagaccuaaagucaacggccaggccggccggaugacauuuuacuggaccauuguuaagccgggggaaucuaucacauucgagagcaacggagcuuuccucgcuccccgcuacgccuuugaaauuguguccgugggcaaugggaaacuguucagaagcgagcuuaacaucgagucuugcuccaccaagugucagaccgaaauuggaggcaucaauacaaacaagagcuuucauucuguccaccggaauacgaucggggauugcccuaaauaugugaacguuaaaagccugaagcucgccaccggacugcgcaaugugcccgcgauuacauccagaggccuguucggcgccaucgcuggguuuauugagggaggcuggccugggcucaucaacggaugguacggcuuccaacaccggaaugaagaggggaccggcauugccgcugacaaggaaucuacacagaaagccaucgaucagaucaccagcaaggucaacaauauuguggaccgcaugaacacgaauuuugaguccguucagcaugaguucagcgaaaucgagggaagaauuaaccaacugucuaaacacguggaugacuccgucguggacaucuggagcuauaaugcccagcuucugguccuccuggaaaacgagaagacacuugaucugcaugacucuaacgugcggaaucuccacgaaaaaguucgcagaaugcugaaggauaacgcuaaggacgagggcaauggguguuuuaccuucuaccacaaaugcgauaacgaguguauugaacgggugagaaauggaaccuaugaccauaaggaguuugaagaggaguccaaaaucaaccgccaggaaauugagggcgucaagcuggauagcuccgggaauguguacaaaauccucucuaucuauagcugcauugcguccucucugguucuugccgcucugaucaugggauucauucucugggccugcagcaacggcuccugucggugcacaaucuguauuuga

SEQ ID NO: 202415 - RNA, 1698 nt, Artificial Sequence
  derived and/or modified CDS sequence (opt5) from hemagglutinin__InfluenzaA__AGQ81215
augaagaaaacccuccuguucgccgcuaucuuucuguacgugaaggccgacgagauuugcaucggcuaucuuagcaacaauuccacagauaaagucgacacgauuaucgaaaacaauguuaccgugacaucuagcguggagcuggucgaaaccgagcacacaggguccuucuguucuauuaacggaaagcagcccaucagccucggcgauugcuccuuugcgggguggauccugggaaauccuaugugugacggccuuauugggaaaaccucuuggagcuacaucguggaaaagccgaaccccgcuaauggaauuugcuauccuggcacacuggagaacgaggaggaacucagacugaaguucuccggcauccuggaauuuagcaaauucgaggccuuuaccucuaauggguggggagccguuaacuccggcgcuggggugacggccgcuuguaaguucggaagcucuaauuccuuuuuccggcauauggucuggcucauucaccaaagcggcaccuaccccgugaucaaacgcacauuuaacaauaccaaggggagagauguucugguggucuggggcauucaucacccugccacacuuaaagagcagcaggaccuguauaagaaggauucuuccuacguggcggugggaagcgaaaccuauaaccggcgcuucauccccgagaucuccacgagaccuaaagucaauggccaggccgggcggaugacauuuuacuggaccauuguuaagccgggagaaucuaucacauucgagagcaacggcgcuuuccucgcuccccgcuacgccuuugaaauuguguccguggggaacggaaaacuguucagaagcgagcuuaauaucgagucuugcuccaccaagugucaaaccgaaauuggcgggaucaacacaaauaagagcuuucauucuguccaccggaacacgaucggagacugcccuaaauaugugaauguuaaaagccugaagcucgccaccggccugcgcaacgugcccgcgauugccuccagaggccuguucggggcuaucgccggauuuauugagggcggguggccuggacucaucaauggcugguacggguuccagcaccggaacgaagagggcacaggaauugcugccgauaaggaaucuacccagaaagccaucgaccagaucacaagcaaggucaauaacauuguggaucgcaugaauaccaacuuugaguccguucaacaugaguucagcgaaaucgaggaaagaauuaaucagcugucuaaacacguggacgauuccgucguggacaucuggagcuauaacgcucagcuucugguccuccuggagaaugaaaagacgcuugaccugcaugauucuaacgugcggaaccuccacgagaaaguucgcagaaugcugaaggacaaugcgaaggaugagggcaacggguguuuuacauucuaccacaaaugcgacaaugaauguauugagcgggugagaaacggaaccuaugaucauaaggaauuugaggaggaauccaaaaucaaucgccaggagauugaaggcgucaagcuggacagcuccgggaacguguacaaaauccucucuaucuauagcugcauugccuccucucugguucuugcugcccugaucaugggauucauucucugggccugcagcaauggcuccugucggugcaccaucuguauuuga

SEQ ID NO: 202416 - RNA, 1698 nt, Artificial Sequence
  derived and/or modified CDS sequence (opt5) from hemagglutinin__InfluenzaA__AGQ81216
augaagaaaacccuccuguucgccgcuaucuuucuguacgugaaggccgacgagauuugcaucggcuaucuuagcaacaauuccacagauaaagucgacacgauuaucgaaaacaauguuaccgugacaucuagcguggagcuggucgaaaccgagcacacaggguccuucuguucuauuaacggaaagcagcccaucagccucggcgauugcuccuuugcgggguggauccugggaaauccuaugugugacgaucuuauuggcaaaaccucuuggagcuacaucguggaaaagccgaaccccgcuaaugggauuugcuauccuggaacacuggagaacgaggaagaacucagacugaaguucuccggcguucuggaauuuagcaaauucgaggccuuuaccucuaauggcuggggagccgugaacuccggggcuggcgucacggccgcuuguaaguucgggagcucuaauuccuuuuuccggaacaugguguggcucauccaucaaagcggaaccuaccccguuacaaaacgcaccuuuaauaacacaaagggcagagacgugcuggucgugugggggauucaccauccugccacccuuaaagagcaccaggaucuguauaagaaggacucuuccuacguggcggucggaagcgaaacguauaaucggcgcuucacacccgagaucuccaccagaccuaaaguuaacggccaggccggccggaugacauuuuacuggaccauugugaagccgggggaaucuaucaccuucgagagcaacggagcuuuccucgcuccccgcuacgccuuugaaaucguguccgucggcaaugggaaacuguucagaagcgagcuuaacauugagucuugcuccacaaagugucagacggaaaucggaggcauuaauaccaacaagagcuuucauucugugcaccggaauacaaucggggauugcccuaaauauguuaacgugaaaagccugaagcucgccaccggacugcgcaauguccccgcgauugccuccaagggccuguucggcgcuaucgccggguuuaucgagggaggcuggccugggcucauuaacggaugguacggcuuccaacacagaaaugaagaggggacaggcaucgcugccgacaaagaaucuacccagaaggccauugaucagaucacgagcaaagugaacaauauuguugaccggaugaacacaaauuuugaguccgugcgccaugaguucagcgaaaucgaggaaagaaucaaccagcugucuaagcacgucgaugacuccguggucgacauuuggagcuauaaugcucaacuucuggugcuccuggagaacgagaaaacccuugaucugcaugacucuaacguucggaaucuccacgagcgcgugagacggaugcugaaggauaacgcgaaggacgagggaaauggcuguuuuaccuucuaccacaaaugcgauaacgaauguaucgagagaguccgcaaugggacauaugaccauaaggaauuugaggaggaauccaaaauuaaccggcaggagaucgaaggagugaagcuggauagcuccggcaauguuuacaaaauucucucuaucuauagcugcauugccuccucucuggugcuugcugcccugaucaugggguucauccucugggccugcggaaacggcagcuguagaugcaccauuuguaucuga

SEQ ID NO: 202417 - RNA, 1698 nt, Artificial Sequence
  derived and/or modified CDS sequence (opt5) from hemagglutinin__InfluenzaA__AGQ81217
augaagaaaacccuccuguucgccgcuaucuuucuguacgccaaggcggacgagauuugcaucggcuaucuuagcaacaauuccacagauaaaguggacacgauuaucgaaaacaaugucaccguuacaucuagcguggagcugguggaaaccgagcacacaggguccuucuguucuauuaacggaaagcagcccaucagccucggcgauugcuccuuugcuggguggauccugggaaauccuaugugugacgaucuuauuggcaaaaccucuuggagcuacaucgucgaaaagccgaaccccgccaaugggauuugcuauccuggaacacuggagaacgaggaagaacucagacugaaguucuccggcgugcuggaauuuagccgguucgaggccuuuaccucuaauggcuggggagcuguuaacuccggggccggcgugacggcugccuguaaauucgggagcucuaauuccuuuuuccgcaacauggucuggcucauccaucaaagcggaaccuaccccgugauuaagagaacauuuaauaacaccaaaggccgggacguucugguggucugggggauccaccauccugcgacacuuaaggagcaccaggaucuguauaaaaaggacucuuccuacguggccgugggaagcgaaaccuauaaucgcagauucauucccgagaucuccacgcggccuaaggucaacggccaggcuggccgcaugacauuuuacuggaccaucguuaaaccggaagagucuauuacauucgaaagcaacggggccuuccucgcucccagauacgccuuugagaucguguccgugggaaauggcaagcuguuccggagcgagcuuaacauugaaucuugcuccaccaaaugucagaccgagaucgggggaauuaauacaaacaagagcuuucauucuguccaccgcaauacgaucggcgauugcccuaaauaugugaacguuaagagccugaaacucgcgaccgggcugagaaaugugcccgccaucgcuucccggggacuguucggcgccauugcuggcuuuaucgaagggggauggccuggccucauuaacgggugguacggauuccaacaccgcaaugaggaaggcacagggaucgccgccgacaaggagucuacccagaaggcuauugaucagaucacaagcaaagucaacaauaucguggacagaaugaacaccaauuuugaguccguucagcaugaguucagcgagauugaggaacggaucaaccaacugucuaagcacguggaugacuccgucguggacauuuggagcuauaaugcgcagcuucugguccuccuggaaaacgagaaaacgcuugaucugcaugacucuaacgugcgcaaucuccacgagaagguuagacggaugcugaaagauaacgccaaggacgaaggcaauggauguuuuacauucuaccacaagugcgauaacgaguguaucgaaagagugcgcaauggcaccuaugaccauaaagaguuugaggaagaguccaagauuaaccggcaggaaaucgagggggucaaacuggauagcuccggaaauguguacaagauucucucuaucuauagcugcaucgcuuccucucugauucuugccgcccugaucaugggcuucauucucugggcuugcagcaacggguccuguagaugcaccaucuguauuuga

SEQ ID NO: 202418 - RNA, 1704 nt, Artificial Sequence
  derived and/or modified CDS sequence (opt5) from hemagglutinin__InfluenzaA__AGQ88499
auggagaagaucgugcuccuguucgccaccauuagccuggucaaauccgaccacaucugcauuggcuaccaugcuaacaauucuacagaacagguugauacgaucauggagaagaacgugaccgugacacacgcccaagacauucuugaaaagacccauaaugggaagcugugugaucucaacggagucaaaccccugauccuuaaggacugcagcguggcgggcuggcugcucgggaauccuaugugugaugaguuuaucaacguuccggaaugguccuauauuguggagaaggcuaaucccgccaacgaccugugcuacccuggaaauuucaacgauuaugaggaacugaaacaccuccugucuagaaucaaucauuuugagaagauucagaucauucccaaagacagcuggacagaucacgaagccucccuuggcgucucugcugccuguccuuaccaggggaacagcuccuucuuucggaaugugguuuggcugaucaagaaagacaacgcuuaucccaccauuaagaagggauacaauaacacaaaccaggaggaucuccuggugcuuuggggcauccaccauccuaauaacgaggccgaacaaacccgccuguaucagaauccgacgaccuacaucagcauuggcacaucuacccucaaccagagacugguccccaaaaucgcgacacgguccaagauuaaugggcagagcggacgcaucgacuucuuuuggaccauucugaaaccuaacgaugccauccacuucgagucuaauggcaacuuuaucgcucccgaauacgccuauaagauugugaaaaagggggacuccacgaucaugaaaagcgagguggaauacggaaauugcaacacaagaugucaaaccccuauuggcgcuaucaauucuuccaugcccuuccauaacauucacccgcucacaaucggggagugcccuaaguaugucaagagcaauaaacugguucuugccaccggacugcggaacucuccccagcgcgagagacggcgcaagagaggccucuuuggcgcgaucgccggguucauugaaggaggcuggcaggggaugguggacggaugguacggcuaucaccauuccaaugagcaggggagcggauacgcugccgauaaagaauccacccaaaaggcuaucgacggcgugacaaacaaagucaacagcauuaucgauaagaugaauacgcaguuugaggccgugggccgggaguucaacaaucuggaacgcagaauugagaaccuuaauaagaaaauggaagacggguuccuggauguuuggaccuauaacgccgagcuccuggugcugauggaaaaugagcggacacucgacuaccacgauucuaacguccgcaaucuguacgacaaggugagacuucagcugaaagauaacgcuaaggaacucggaaauggcuguuuugaguucuaucauaaaugcaacaaugaguguauggaauccguucggaacgggaccuacgacuauccucaauacagcgaggaagcgagacugaagcgcgaggagaucucuggagugaaacuugaaagcauuggcaucuaucagauccuguccauuuacucuacagucgccagcucccucgugcuggcuaucaugauggccgggcugagccucuggaugugcucuaauggcucccugcagugccggauuuguaucuga

SEQ ID NO: 202419 - RNA, 1683 nt, Artificial Sequence; identical to SEQ ID NO: 202309
  derived and/or modified CDS sequence (opt5) from hemagglutinin__InfluenzaA__AGR33888

SEQ ID NO: 202420 - RNA, 1683 nt, Artificial Sequence; identical to SEQ ID NO: 202309
  derived and/or modified CDS sequence (opt5) from hemagglutinin__InfluenzaA__AGR33889

SEQ ID NO: 202421 - RNA, 1683 nt, Artificial Sequence
  derived and/or modified CDS sequence (opt5) from hemagglutinin__InfluenzaA__AGR33890
augaacacccagauccugguguucgcccucauugcuaucacacccacgaauagcgacaagauuugccugggccaccaugccgucuccaacgggaccaaaguuaauacacuuaccgagagaggaguggaaguggucaacgcgacagagaccguggaacggacaucuaucccucgcauuuguagcaagggcaaaagaaccguugaucuggggcaaugcggacuccugggcacgaucaccgggccgccccagugugaccaguuucuugaguucuccgcugaucugaucauugaacggcgcgagggaucugacgugugcuacccuggcaaguuugucaaugaggaagcccucagacagauccugcgggagagcggcgggauugauaaagaagccaugggauucacauauuccggcauccgcaccaacggggcuacaucugccuguagacggagcggauccagcuuuuacgcugagaugaaguggcugcucucuaauaccgacaacgccgcguuucccccuaugacgaaguccuauaaaaauacacgcaaggcccccgcucugauuaucuggggcauucaccauagcgugucuaccgccgagcaaacaaaacuuuacggguccggaaacaagcugguuaccgugagaagcucuaauuaucagcaguccuucgucccuagcccgggcgcuggcccccaggugaacgggcaauccggacggaucgauuuccacuggcucaugcugaauccuaacgacaccgugacauuuucuuucaauggcgccuuuaucgcgcccgaucgcgccagcuuccuuagagggaaauccaugggcauucagagcggaguccagguugacgcuaacugcgaaggggauuguuaccauucuggaggcacgaucauuuccaaccugccuuuucagaauaucgacagccggguggugggcaagugcccccgcuaugucaagcaaaaaucucuccugcuggccaccgggaugaagaacgugccggagauuccuaaaggaagaggccucuucggggcuaucgccggauucaucgaaaauggcugggaggggcugauugauggcugguacggauuucggcaccagaacgcccagggcgaagggacagcugcggacuacaagagcacccaauccgccaucaaucagaugacaggaaaacuuaacagacugauugagaagaccaaucagcaguucgagcucaucgacaacgaauuuacggagguugaaaaacaaauuggcaaugugaucaacuggacacgcgauucuaucaccgaggucuggagcuauaaugcugaacugcuuguggccauggagaaccagcacaccauugaccuggccgauuccgagaugaauaagcucuacgaacggguuaagagacagcugcgcgagaacgcugaagaggacgggacaggauguuucgaaaucuuucauaaaugcgaugacgauuguauggccagcauucggaauaacaccuaugaccacucuaaguacagagaggaggcgaugcagaaccgcauccaaauugaucccgugaaacuguccagcggcuauaaggacgucauccucugguucucuuuuggggcuuccugcuucauucugcuugccaucgccaugggccugguguuuaucugcgucaaaaauggaaacaugcgguguacaauuugcaucuga

SEQ ID NO: 202422 - RNA, 1683 nt, Artificial Sequence
  derived and/or modified CDS sequence (opt5) from hemagglutinin__InfluenzaA__AGR33892
augaacacccagauccugguguucgcccucauugcuaucauucccacaaaugccgacaagaucugccugggccaccaugcggucagcaacgggacgaaaguuaauacccuuacagagagaggaguggaaguggucaacgcuaccgagacaguggaacggaccuccauuccucgcaucuguucuaagggcaaaagaacaguugaucuggggcaaugcggacuccugggcaccaucacggggccgccccagugugaccaguuucuugaguucagcgccgaucugauuaucgaacggcgcgagggauccgacgugugcuacccuggcaaguuugucaaugaggaagcccucagacagauucugcgggagucuggcgggaucaacaaagaagcuaugggauucaccuauagcggcauucgcacaaauggggccaccuccgcuuguagacggucuggaagcuccuuuuacgccgagaugaaguggcugcucagcaacacagauaaugcggccuuucccccuaugaccaagucuuauaaaaacacgcgcaaggcucccgcccugaucauuuggggcauccaccauuccgggagcacagcugagcaaaccaaacuuuacggaucuggcaauaagauggugacaguuagauccagcaacuaucagcagucuuucgugccuuccccgggcgccgggccccaggucaauggacaaagcggccggaucgacuuccacuggcugaugcucaacccuaaugauaccgugaccuuuuccuucaacggggcguuuauugcccccgaccgcgcuucuuuccugagaggaaaaagcaugggcauccaguccggggugcaggucgaugccaacugcgaaggagacuguuaccauagcggcggcacaauuaucucuaaucuuccuuuucagaacauugauucccggguuguggggaagugcccccgcuaugugaagcagaaaagccugcuccuggcuacgggaaugaagaaugucccggagaucccuaaaggcagagggcuguucggagccaucgccggcuucauugaaaacgggugggagggccucaucgacggaugguacggcuuucggcaccaaaaugcucagggggaaggaaccgcggccgauuacaagucuacacaaagcgcuauuaaccagaugaccggcaaacugaauagacuuaucgagaagacaaaccagcaguucgagcugauugacaaugaauuuaccgagguggaaaaacaaaucgggaacguuaucaauuggacgcgcgacuccauuacagagguguggucuuauaacgccgaacuccuggucgccauggagaaucagcacaccaucgaucuugcugacagcgagaugaacaagcuguacgaacgggugaagagacagcuccgcgagaaugccgaagaggauggaaccggcuguuucgaaauuuuucauaaaugcgacgaugacuguauggcguccauccggaacaacacauaugaucacagcaaguacagagaggaggcuaugcagaaucgcauucaaaucgaccccguuaaacugucuuccggguauaaggaugugauucugugguucagcuuuggcgccucuugcuucauccuccuggccaucgcuaugggacuugucuuuauuugcguggaaaacggcaauaugcgguguaccaucugcauuuga

SEQ ID NO: 202423 - RNA, 1683 nt, Artificial Sequence; identical to SEQ ID NO: 202301
  derived and/or modified CDS sequence (opt5) from hemagglutinin__InfluenzaA__AGR33895

SEQ ID NO: 202424 - RNA, 1683 nt, Artificial Sequence; identical to SEQ ID NO: 202380
  derived and/or modified CDS sequence (opt5) from hemagglutinin__InfluenzaA__AGR33897

SEQ ID NO: 202425 - RNA, 1683 nt, Artificial Sequence
  derived and/or modified CDS sequence (opt5) from hemagglutinin__InfluenzaA__AGR33899
auggagaccgugagccugaucacaauucuccuggucgccacgguuuccaacgcugacaagaucugcauuggcuaccagucuaccaauagcacagaaaccguggauacacuuaccgagaacaaugugcccgucacacacgccaaagaacugcuccauaccgagcacaacgggaugcugugugcgacgucccuuggacaaccucugauccucgauaccugcacaauugaaggccugaucuaugggaauccgucuugugaccugcuccuggagggaagagaguggagcuacaucguggaacggcccuccgcuguuaacggccuuugcuauccugggaauguggagaaccuggaggaacuccgcucucuguucagcuccgccagaagcuaccagcggauucagaucuuucccgacaccauuuggaaugucucuuauaacggaacauccaaggccuguagcggcucuuucuaccgcuccaugagauggcuuacccagaaaaauagcaacuauccuauccaagaugcucaguacacgaauaaccagggcaagaauauucuguuuaugugggggaucaaccaucccccuacagacaccacacagcgggaucucuacacccgcaccgacacaacgaccucuguggccacagaggaaauuaacagaaucuucaaaccgcugaucggaccccggccucugguuaauggccucauggggcgcauugauuauuacugguccgugcugaagcccggacaaacccuuagaaucaagagcgacggcaaccugauugcuccuugguaugggcacauccucuccggagagucucauggccggauucugaaaacagaucuuaagaaaggcagcugcaccguccagugucagacggaaaaagggggacugaauacaacccuccccuuucagaacguguccaaguacgccuucggcaauugcagcaaguauaucgggaucaagucucugaaacuggcggugggacuccgcaacgucccguccagaagcucucggggccuguuuggggccauugcuggauucaucgagggcggcuggagcgggcuuguugccggaugguacggcuuucaacacuccaaugaccagggggugggaauggcugccgaucgcgacucuacccagaaggcgauugacaaaaucacaagcaaggugaacaauauugucgauaaaaugaacaagcaauaugaaaucaucgaccacgaguucuccgagguggaaaccagacugaauaugauuaacaauaaaaucgaugaccagauucaggauaucugggccuacaacgcugagcuccugguucuucuggaaaaucagaagacacucgacgagcaugaugccaacgugaacaaucuguacaacaaggucaaacgggcucugggcagcaaugccguggaagacgggaagggcuguuuugagcucuaucacaaaugcgaugaccaauguauggagacgauuagaaacggaaccuacaaucgcucuaaguaucaggaagaguccaaacuggaacggcagaagaucgagggcguuaaacuugaaagcgaggggacauacaagauucugaccaucuauucuacaguggccuccagccucgucaucgcuaugggauucgcggccuuucuguucugggcuauguccaacggcucuugcagaugcaauauuuguaucuga

SEQ ID NO: 202426 - RNA, 1683 nt, Artificial Sequence
  derived and/or modified CDS sequence (opt5) from hemagglutinin__InfluenzaA__AGR33900
auggagaccgugagccugaucacaauucuccuggucgccacgguuuccaacgcugacaagaucugcauuggcuaccagucuaccaauagcacagaaaccguggauacacuuaccgagaacaaugugcccgucacacacgccaaagaacugcuccauaccgagcacaacgggaugcugugugcgacgucccuuggacaaccucugauccucgauaccugcacaauugaaggccugaucuaugggaauccgucuugugaccugcuccuggagggaagagaguggagcuacaucguggaacggcccuccgcuguuaacggccuuugcuauccugggaauguggagaaccuggaggaacuccgcucucuguucagcuccgccagaagcuaccagcggauucagaucuuucccgacaccauuuggaaugucucuuauaacggaacauccaaggccuguagcggcucuuucuaccgcuccaugagauggcuuacccagaaaaauagcgauuauccuauccaagacgcucaguacacgaacaaucagggcaagaacauucuguuuaugugggggaucaaucaucccccuacagauaccacacagcgggaccucuacacccgcaccgauacaacgaccucuguggccacagaggaaauuaacagaaucuucaaaccgcugaucggaccccggccucugguuaacggccucauggggcgcauugacuauuacugguccgugcugaagcccggacaaacccuuagaaucaagagcgauggcaaucugauugcuccuugguaugggcacauccucuccggagagucucauggccggauucugaaaacagaccuuaagaaaggcagcugcaccguccagugucagacggaaaaagggggacugaacacaacccuccccuuucagaauguguccaaguacgccuucggcaacugcagcaaguauaucgggaucaagucucugaaacuggcggugggacuccgcaaugucccguccagaagcucucggggccuguuuggggccauugcuggauucaucgagggcggcuggagcgggcuuguugccggaugguacggcuuucaacacuccaacgaucagggggugggaauggcugccgaccgcgacucuacccagaaggcgauugauaaaaucacaagcaaggugaauaacauugucgacaaaaugaauaagcaauaugaaaucaucgaucacgaguucuccgagguggaaaccagacugaacaugauuaauaacaaaaucgacgaucagauucaggacaucugggccuacaaugcugagcuccugguucuucuggaaaaccagaagacacucgaugagcaugacgccaaugugaacaaccuguacaauaaggucaaacgggcucugggcagcaacgccguggaagaugggaagggcuguuuugaccucuaucacaaaugcgaugaccaauguauggagacgauuagaaauggaaccuacaaccgccggaaguaucaggaggaaucuaaacuggagagacagaagaucgaaggcguuaaacuugaguccgaagggacauacaagauucugaccaucuauagcacaguggccucuucccucgucaucgcuaugggauucgcggccuuucuguucugggcuaugagcaauggcuccugccgcugcaacauuuguaucuga

SEQ ID NO: 202427 - RNA, 1683 nt, Artificial Sequence
  derived and/or modified CDS sequence (opt5) from hemagglutinin__InfluenzaA__AGR33902
auggagaccgccagccugaucacaauucuccugguggcuacggucuccaacgccgacaagaucugcauuggcuaccagucuaccaauagcacagaaaccguugauacacuuaccgagaacaaugugcccgugacacacgcgaaggaacugcuccauaccgagcacaacgggaugcugugugcuacgucccuuggacaaccucugauccucgauaccugcacaauugaaggccugaucuaugggaauccgucuugugaccugcuccuggagggaagagaguggagcuacaucgucgaacggcccuccgccgugaacggccuuugcuauccugggaauguugagaaccuggaggaacuccgcucucuguucagcuccgccagaagcuaccagcggauucagaucuuucccgacaccacauggaaugugucuuauaacggaauuuccaaggcuuguagcggcucuuucuaccgcuccaugagauggcuuacccagaaaaauagcaacuauccuauccaagaugcccaguacacgaauaaccagggcaagaauauucuguuuaugugggggaucaaccaucccccuacagacaccacacagcgggaucucuacacccgcaccgacacaacgaccucugucgcuacagaggaaauuaacagaaucuucaaaccgcugaucggaccccggccucuggugaauggccucauggggcgcauugauuauuacugguccguucugaagcccggacaaacccuuagaaucaagagcgacggcaaccugauugccccuugguaugggcacauccucuccggagagucucauggccggauucugaaaacagaucuuaagcgcggcagcugcaccgugcagugucagacggaaaaagggggacugaauacaacccuccccuuucagaacgucuccaaguacgcguucggcaauugcagcaaauauaucgggaucaagucucugaagcuggccgugggacucagaaacgugccgucccggagcucucgcggccuguuuggggcuauugccggauucaucgagggcggcuggagcgggcuugucgcuggaugguacggcuuucaacacuccaaugaccaggggguuggaauggccgcggauagagacucuacccagaaagccauugacaagaucacaagcaaagugaacaauauuguggauaagaugaacaaacaauaugaaaucaucgaccacgaguucuccgaggucgaaacccggcugaauaugauuaacaauaagaucgaugaccagauucaggauaucugggcuuacaacgccgagcuccuggugcuucuggaaaaucagaaaacacucgacgagcaugaugcuaacguuaacaaucuguacaacaaggugaagagagcccugggcagcaaugccgucgaagacgggaaaggcuguuuugagcucuaucacaagugcgauaaccaauguauggagacgauucgcaauggaaccuacaaccggagaaaauaucaggaagagucuaagcuggaacgccagaaaaucgagggcgugaaacuugaauccgaggggacauacaagauucugaccaucuauagcacaguugcuucuucccucgugaucgcgaugggauucgccgcuuuucuguucugggccaugagcaauggcuccugccggugcaacauuuguaucuga

SEQ ID NO: 202428 - RNA, 1698 nt, Artificial Sequence; identical to SEQ ID NO: 197585
  derived and/or modified CDS sequence (opt5) from hemagglutinin__InfluenzaA__AGR49817

SEQ ID NO: 202429 - RNA, 1698 nt, Artificial Sequence
  derived and/or modified CDS sequence (opt5) from hemagglutinin__InfluenzaA__AGR49841
augaaggugaaacugcucguccugcuuugcaccuucacagccacguacgcugacaccaucuguauuggcuaucacgccaacaauagcacagauaccguugacacagugcuggagaagaacgugaccgucacacauuccgugaaucuccuggaaaacucucacaaugggaaacuuugccugcucaagggaaucgcgccccugcagcugggcaacuguagcguugcuggguggauucucggaaauccugagugcgaacugcuuaucuccaaagagucuuggagcuacauuguggaaaagccgaaccccgagaauggcaccuguuauccugggcauuuugccgauuacgaggaacugagagagcaacucuccucugucagcuccuucgaacgguuugagaucuuccccaaggagagcucuuggccuaaccacacggugaccggaguuuccgccagcugcucucauaauggcgaauccagcuuuuaucgcaaccugcuuuggcugacaggcaaaaaugggcucuaccccaaccugucuaaguccuaugcuaauaacaaagagaaggaagugcugguccucuggggagugcaccacccuccgaacaucguggaccagaaaacccuguacagaacagagaaugccuacgucagcguuguguccucucauuauagccggaaguucacccccgaaauugcuaagcgcccuaaagugagagaucaggagggccggaucaacuacuauuggacgcuucuggagccccgcgacacaauuaucuuugaagccaaugggaaccucauugcgccuagauacgccuucgcucugucccggggauuuggcagcgggaucauuaauucuaacgcccccaugggaaagugugaugcuaaaugccagaccccgcaaggcgccaucaauuccagccuuccuuuccagaacguccaccccgugacaaucggcgaguguccuaaguauguucgcucugcgaaacugagaauggugaccgggcuccggaauauucccagcauccagucccgcggacuguuuggcgccauugcuggguucaucgaaggaggcuggaccgggauggucgacggaugguacggcuaucaucaccagaacgagcaaggcucuggguacgccgcugaucaaaagagcacacagaaugccauuaacggaaucacgaauaaagugaacuccguuaucgaaaagaugaauacccaguuuacagccgugggcaaggaguucaacaaacuggagagacggauggaaaaccucaauaagaaagucgacgauggguucauugacaucuggaccuacaacgcugagcugcuugugcugcucgaaaaugagcgcacacuggauuuucacgacagcaacgucaagaaucuuuaugaaaaagugaagucucagcugaagaacaaugcgaaagagauuggaaacggcugcuucgaguuuuaccauaaguguaaugacgaaugcauggaguccguuaaaaacgggaccuaugauuaccccaaguauagcgaagagucuaaacucaauagagagaagaucgacggcgugaagcuggaauccauuggagucuaccagauccuggccaucuauagcacgguggcuuccucucucguucugcuugugagccugggcgccauuuccuucuggaugugcucuaacgggagccuccagugucggaucugcauuuga

SEQ ID NO: 202430 - RNA, 1698 nt, Artificial Sequence; identical to SEQ ID NO: 197585
  derived and/or modified CDS sequence (opt5) from hemagglutinin__InfluenzaA__AGR49853

SEQ ID NO: 202431 - RNA, 1698 nt, Artificial Sequence
  derived and/or modified CDS sequence (opt5) from hemagglutinin__InfluenzaA__AGR49865
augaaggugaaacugcucguccugcuuugcaccuucacagccacguacgcugacaccaucuguauuggcuaucacgccaacaauagcacagauaccguugacacagugcuggagaagaacgugaccgucacacauuccgugaaucuccuggaaaacaaucacaacgggaaacuuugccugcucaagggaaucgcgccccugcagcugggcaauuguucuguugcuggguggauucucggaaacccugagugcgaacugcuuaucagcaaagaguccuggucuuacauuguggaaaagccgaaucccgagaacggcaccuguuauccugggcauuuugccgauuacgaggaacugagagagcaacucagcuccgucucuagcuucgaacgguuugagaucuuccccaaggaguccagcuggccuaaucacacggugaccggaguuucugccuccugcagccauaacggcgaaucuuccuuuuaucgcaaucugcuuuggcugacaggcaaaaacgggcucuaccccaaucugagcaagucuuaugcuaacaacaaagagaaggaagugcugguccucuggggagugcaccacccuccgaauaucgugaaccagaaaacccuguacagaacagagaaugccuacgucuccguugugagcucccauuauucucggaaguucacccccgaaauugcuaagcgcccuaaagugagagaccaggagggccggaucaacuacuauuggacgcuucuggagcccggggauacaauuaucuuugaagccaauggaaaccucauugcgccucgcuacgccuucgcucugaauagaggcuuugggagcggaaucauuaacuccaaugcccccauggacaagugugaugcuaaaugccagaccccgcaaggcgccaucaacagcucucuuccuuuccagaauguccaccccgugacaaucggcgaguguccuaaguauguucgguccgcgaaacugcgcauggugaccgggcucagaaacauucccagcauccagucucggggacuguuuggcgccauugcuggguucaucgaaggaggcuggaccgggauggucgacggaugguacggcuaucaucaccagaaugagcaaggcagcggguacgccgcugaucagaaguccacacagaacgccauuaauggaaucacgaacaaagugaacucuguuaucgaaaagaugaauacccaguuuacagccgugggcaaggaguucaacaaacuggagcgcagaauggaaaaucucaacaagaaagucgacgauggguucauugacguguggaccuacaaugcugagcugcuuguccugcucgaaaacgagcggacacuggauuuucacgacagcaaugugaagaaccuuuaugaaaaaguuaagucccaacugaagaauaacgcgaaagagaucggaaauggcugcuucgaguuuuaccauaaguguaacgacgaaugcauggagagcgugaaaaaugggaccuaugauuaccccaaguauucugaagaguccaaacucaaccgcgagaagauugacggcgucaagcuggaaagcaugggaguguaccagauccuggccauuuauucuacgguugcuuccagccucgugcugcuugucucccugggcgccaucucuuucuggaugugcagcaaugggucccuccaguguagaaucugcauuuga

SEQ ID NO: 202432 - RNA, 1701 nt, Artificial Sequence; identical to SEQ ID NO: 194728
  derived and/or modified CDS sequence (opt5) from hemagglutinin__InfluenzaA__AGR49877

SEQ ID NO: 202433 - RNA, 1701 nt, Artificial Sequence; identical to SEQ ID NO: 194506
  derived and/or modified CDS sequence (opt5) from hemagglutinin__InfluenzaA__AGR49888

SEQ ID NO: 202434 - RNA, 1701 nt, Artificial Sequence
  derived and/or modified CDS sequence (opt5) from hemagglutinin__InfluenzaA__AGR49900
augaagaccaucauugcccugagcuacauccucugccugguguucgcucagaaacuucccggcaacgacaauuccacagccacgcugugucucgggcaccaugcggucccuaacggaaccauuguuaagacaaucaccaaugaucaaauugaggugacaaacgcuaccgaacuggugcagucuagcuccacaggcgagaucugcgacucuccgcaccagauccuugauggggaaaauuguacccugauugacgcccuccugggagauccccagugcgacggcuuucaaaacaaaaagugggaucuguucgucgagagaagcaaagccuauuccaaguguuacccuuaugacgugcccgauuacgcuucucuccggagccugguugccuccagcgggacgcuugaauuuaauaacgagucuuucaauuggaccggagugacacagaacggcaccuccagcgcuugcauccgcagaucuaauaacuccuuuuucagccggcugaauuggcucacacaucugaaguuuaaauauccugcccuuaacgucaccaugcccaauaacgagaaguucgacaaacuguacauuuggggcgugcaccauccugggacggauaacgaccagaucuuucucuaugcgcaggccucuggacgcauuacaguuuccaccaagagaagccaacagacagugaucccgaauauuggcucccggccccgcgucagaaacaucccuucucggaucagcauuuacuggaccaucgugaaacccggggauauucugcugaucaauuccaccggaaaccucauugcuccucgcggcuacuucaagaucagaagcgggaagucuuccaucaugcggagcgacgcccccauuggaaaauguaauucugaaugcaucacaccgaacggcagcauuccuaaugacaagcccuuucagaacgugaaucgcaucacguauggcgcuuguccuagauacgucaaacagaacacccugaaacuugccacagggaugcggaauguucccgagaagcaaacccgcggaauuuucggcgcgaucgccggguuuaucgaaaacggaugggagggcaugguggaugggugguauggauucagacaccaaaauuccgagggcauuggccaggcugccgaccugaagucuacacaggcugccaucgaucagauuaacgggaaacucaaucggcugaucggaaagaccaacgaaaaguuccaccagauugagaaagaauuuagcgagguggaaggcagaauccaggaccuugagaaguacgucgaggauacgaaaauugaccugugguccuauaacgccgaacuccugguggcucuggagaaucaacauacaaucgaucucaccgacagcgaaaugaacaagcuguucgagaaaaccaagaagcagcuucgcgaaaaugcggaggauauggggaacggaugcuuuaaaaucuaccacaagugugacaaugccugcauuggcucuauccggaacgggacauaugaucaugacguuuacagagacgaggcucugaauaaccgcuuccagauuaaaggcguggaacucaaguccggauacaaagauuggauccuguggauuagcuuugccaucucuugcuuccuucugugugucgcccuccugggcuuuaucaugugggcuugccagaaggggaauauucgguguaacaucugcauuuga

SEQ ID NO: 202435 - RNA, 1701 nt, Artificial Sequence
  derived and/or modified CDS sequence (opt5) from hemagglutinin__InfluenzaA__AGR49912
augaagaccaucauugcccugagcuacauccucugccugguguccgcucagaaacuucccggcaacgacaauucuacagccacgcugugucucgggcaccaugcggucccuaacggaaccauuguuaagacaaucaccaaugaucaaauugaggugacaaacgcuaccgaacuggugcagagcuccucuacaggcgagaucugcgacagcccgcaccagauccuugauggggaaaauuguacccugauugacgcccuccugggagauccccagugcgacggcuuccaaaacaaaaagugggaucuguuugucgagagauccaaagccuauucuaauuguuacccuuaugacgugcccgauuacgcuagccuccggucccugguugccagcucugggacgcuugaguucaacaaugaauccuuuaacuggaccggagugacacagaauggcaccagcucugcuugcauccgcagauccaacaauagcuucuuuucucggcugaacuggcucacacaucugaaguucaaguauccugcccuuaaugucaccaugcccaacaacgaggaauuugacaaacuguacauuuggggcgugcaccauccugggacggauaaugaccagaucuuccucuaugcgcaggccuccggacgcauuacaguuagcaccaagagaucccaacagacagugaucccgaacauuggcucucggccccgcgucagaaauaucccuagccggaucuccauuuacuggaccaucgugaaacccggggauauucugcugaucaacagcaccggaaaucucauugcuccucgcggcuacuuuaagaucagaucugggaaauccagcaucaugcggucugacgcccccauuggaaaguguaacagcaagugcaucacaccgaauggcuccauuccuaacgacaaacccuuccagaaugugaaccgcaucacguauggcgcuuguccuagauacgucaagcagaauacccugaaacuugccacagggaugcggaacguucccgagaagcaaacccgcggaauuuuuggcgcgaucgccggguucaucgaaaauggaugggagggcaugguggaugggugguauggauuuagacaccagaacucugagggcauuggccaggcugccgaccugaaaagcacacaagcugccaucgaucagauuaaugggaagcucaaccggcugaucggaaaaaccaacgaaaaguuccaccagauugagaaggaguucuccgaaguggaaggcagaauccaggaccuugagaaauacgucgaggauacgaagauugaccuguggagcuauaaugccgaacuccugguggcucuggagaaccaacauacaaucgaucucaccgacucugaaaugaauaaacuguuugagaagaccaaaaagcagcuucgcgaaaacgcggaggauauggggaauggaugcuucaagaucuaccacaaaugugacaacgccugcauuggcuccauccggaaugggacauaugaucaugacguuuacagagacgaggcucugaacaaucgcuuucagauuaagggcguggaacucaaaagcggauacaaggauuggauccuguggauuucuuucgccaucuccugcuuucuucugugugucgcccuccugggcuucaucaugugggcuugccagaaagggaacauucgguguaauaucugcauuuga

SEQ ID NO: 202436 - RNA, 1701 nt, Artificial Sequence
  derived and/or modified CDS sequence (opt5) from hemagglutinin__InfluenzaA__AGR49924
augaagaccaucauugcccugagcuacauccucugccugguguccgcucagaaacuucccggcaacgacaauucuacagccacgcugugucucgggcaccaugcggucccuaacggaaccauuguuaagacaaucaccaaugaucaaauugaggugacaaacgcuaccgaacuggugcagagcuccucuacaggcgagaucugcgacagcccgcaccagauccuugauggggaaaauuguacccugauugacgcccuccugggagauccccagugcgacggcuuccaaaacaaaaagugggaucuguuugucgagagauccaaagccuauucuaauuguuacccuuaugacgugcccgauuacgcuagccuccggucccugguugccagcucugggacgcuugaguucaacaaugaauccuuuaacuggaccggagugacacagaauggcaccagcucugcuugcauccgcagauccaacaauagcuucuuuucucggcugaacuggcucacacaucugaaguucaaguauccugcccuuaaugucaccaugcccaacaacgaggaauuugacaaacuguacauuuggggcgugcaccauccugggacggauaaugaccagaucuuccucuaugcgcaggccuccggacgcauuacaguuagcaccaagagaucccaacagacagugaucccgaacauuggcucucggccccgcgucagaaauaucccuagccggaucuccauuuacuggaccaucgugaaacccggggauauucugcugaucaacagcaccggaaaucucauugcuccucgcggcuacuuuaagaucagaucugggaaauccagcaucaugcggucugacgcccccauuggaaaguguaacagcaagugcaucacaccgaauggcuccauuccuaacgacaaacccuuccagaaugugaaccgcaucacguauggcgcuuguccuagauacgucaagcagaauacccugaaacuugccacagggaugcggaacguucccgagaagcaaacccgcggaauuuuuggcgcgaucgccggguucaucgaaaauggaugggagggcaugguggaugggugguauggauuuagacaccagaacucugagggcauuggccaggcugccgaccugaaaagcacacaagcugccguggaucagaucaaugggaagcucaaccggcugauuggaaaaaccaacgaaaaguuccaccagaucgagaaggaguucuccgaagucgaaggccgcauucaggaccuugagaaauacguggaggauacgaagaucgaccuguggagcuauaaugccgaacuccugguugcucuggagaaccaacauacaauugaucucaccgacucugaaaugaauaaacuguuugagaagaccaaaaagcagcuuagagaaaacgcggaggauauggggaauggaugcuucaagaucuaccacaaaugugacaacgccugcaucggcuccauucggaaugggacauaugaucaugacguguacagagacgaggcucugaacaaucgcuuucagaucaagggcgucgaacucaaaagcggauacaaggauuggauucuguggaucucuuucgccauuuccugcuuucuucuguguguggcccuccugggcuucaucaugugggcuugccagaaagggaacauccgguguaauauuugcaucuga

SEQ ID NO: 202437 - RNA, 1701 nt, Artificial Sequence
  derived and/or modified CDS sequence (opt5) from hemagglutinin__InfluenzaA__AGR49936
augaagaccaucauugcccugagcuacauccucugccugauuuccgcucagaaauuccccggcaacgacaauucuacagccacgcuuugucuggggcaccaugcggugccuaacggaaccaucgucaagacaauuaccaaugaucaaaucgagguuacaaacgcuaccgaacucgugcagagcuccucuacaggcgagaucugcgacagcccgcaccagauucuggauggggaaaauuguacccuuaucgacgcccugcucggagauccccagugcgacggcuuucaaaacaaaaagugggaucuguucguggagagauccaaagccuauucuaauuguuacccuuaugacguccccggguacgcuagccugcggucccucguggccagcucuggaacgcuggaauuuaacaaugaguccuucaacuggaccggcguuacacagaauggcaccagcucugcuugcauucgcagauccaacaauagcuuuuucucucggcuuaacuggcugacacaucucaaguuuaaguauccugcccugaaugugaccaugcccaacaacgaggaguucgauaaacuuuacaucuggggaguccaccauccugggacggacaaugaucagauuuuucuguaugcgcaggccuccggccgcaucacagugagcaccaagagaucccaacagacaguuauuccgaacaucgggucucggccccgcgugagaaauaucccuagccggauuuccaucuacuggaccauugucaaacccggagacauccuccugauuaacagcaccggcaaucugaucgcuccucgcggguacuucaagaucagaucuggaaaauccagcauuaugcggucugaugcccccaucggcaaguguaacagcgaaugcauuacaccgaauggcuccaucccuaacgacaagcccuuucagaaugugaaccgcauuacguauggggcuuguccuagauacgugaaacagaauacccucaagcuggccacaggaaugcggaacguccccgaaaaacaaacccgcggcaucuucggggcgaucgccggauuuauugagaauggcugggaggggaugguugacggaugguauggcuucagacaccagaacucugaaggcaucgggcaggcugccgaucuuaagagcacacaagcugccauugaccagaucaauggaaaacugaaccggcucauuggcaagaccaacgagaaauuccaccagaucgaaaaggaguuuuccgaaguggaggggcgcauucaggaucuggagaaguacguggaagacacgaaaaucgaucuuuggagcuauaaugccgagcugcucgucgcucuggaaaaccaacauacaaucgaccugaccgauucugagaugaauaaacucuucgaaaagaccaagaaacagcugagagagaacgcggaggacaugggaaauggcugcuuuaagauuuaccacaagugugauaacgccugcaucggguccauucggaauggcacauaugaccaugauguguacagagacgaagcucuuaacaaucgcuuccagaucaaaggaguugagcucaagagcggcuacaaagacuggauucuguggaucucuuuugccaucuccugcuuccugcuuuguguggcccugcucggguuuauuaugugggcuugccagaagggaaacauccgguguaauauuugcaucuga

SEQ ID NO: 202438 - RNA, 1701 nt, Artificial Sequence; identical to SEQ ID NO: 199766
  derived and/or modified CDS sequence (opt5) from hemagglutinin__InfluenzaA__AGR49948

SEQ ID NO: 202439 - RNA, 1701 nt, Artificial Sequence; identical to SEQ ID NO: 194599
  derived and/or modified CDS sequence (opt5) from hemagglutinin__InfluenzaA__AGR49960

SEQ ID NO: 202440 - RNA, 1701 nt, Artificial Sequence
  derived and/or modified CDS sequence (opt5) from hemagglutinin__InfluenzaA__AGR49972
augaaggccauccuggugguccuccuguacaccuucgcuacagccaacgcggacacgcuuugcauuggcuaucacgcuaauaacagcaccgauacaguugacaccgugcuggagaaaaaugugacagucacccauuccgugaaccuccuggaagauaagcacaaugggaaacuuuguaagcugagaggaguugcuccccuccaucugggcaaaugcaacaucgccggguggauucugggaaauccugagugugaaucucucagcacagccuccucuuggagcuacaucguggagaccuccucuagcgacaacggcacgugcuauccgggggauuuuauugacuacgaagaacugcgggagcagcuuuccagcgucucuuccuucgaacgcuuugagaucuuccccaagaccagcucuuggccuaaucacgauuccaacaagggagugacagccgcuuguccccaugccggcgcgaaaucuuuuuauaagaaucugaucuggcucguuaaaaagggcaacagcuacccuaaacuguccaagagcuauauuaaugacaaggggaaagaagugcuuguccuguggggaauccaccaccccuccaccucugccgaucaacagagccucuaccagaacgcugacgccuacguguucgugggcuccagcagauauucuaagaaauuuaagccugagauugcuauccggccgaaaguccgcgaucaggaggggagaaugaauuacuauuggacaauuguugaacccggagacaagaucaccuucgaggccacgggcaaccugguggugccucgguacgcguuugccauggaacgcaacgcuggguccggaauuaucaucagcgauacacccguccaugacugcaauaccacaugucaaaccccuaaaggcgccauuaacaccucucugcccuuccagaauauccacccgauuacaaucggcaagugcccuaaguaugugaaaagcacgaagcucagacuggcuaccgggcuucggaacguucccuccauucagucucgcggacuguuuggcgccaucgccggguucaucgagggaggcuggacagggaugguggacggaugguacggcuaucaucaccagaaugaacaaggcagcggguacgcugcggaucucaaauccacccagaacgccauugacgagaucacaaauaaggucaacagcgugauugagaaaaugaauacccaguuuacggcuguuggaaaggaguucaaccaccuggagaagagaaucgaaaaucuuaacaaaaagguggaugacggcuuccuggauauuuggacauacaaugccgagcuccugguccugcucgaaaacgagcggacccuggacuaucaugauucuaaugugaaaaaccuuuacgagaagguccgcucccagcugaaaaacaaugccaaggaaaucgggaacggauguuuugaguucuaucacaagugcgacaauaccuguauggaaagcgugaaaaacggcacauacgauuauccuaaguacucugaggaagcuaaacucaauagagaggagaucgacgggguuaagcuggaauccacccggauuuaucaaauccuugccauuuacagcacaguggcguccucucugguccucgugguuagccugggcgcuaucuccuuuuggaugugcucuaacggaagccugcagugccgcauuuguaucuga

SEQ ID NO: 202441 - RNA, 1698 nt, Artificial Sequence; identical to SEQ ID NO: 198770
  derived and/or modified CDS sequence (opt5) from hemagglutinin__InfluenzaA__AGR49983

SEQ ID NO: 202442 - RNA, 1698 nt, Artificial Sequence; identical to SEQ ID NO: 198770
  derived and/or modified CDS sequence (opt5) from hemagglutinin__InfluenzaA__AGR49995

SEQ ID NO: 202443 - RNA, 1701 nt, Artificial Sequence; identical to SEQ ID NO: 194728
  derived and/or modified CDS sequence (opt5) from hemagglutinin__InfluenzaA__AGR50007

SEQ ID NO: 202444 - RNA, 1701 nt, Artificial Sequence; identical to SEQ ID NO: 194728
  derived and/or modified CDS sequence (opt5) from hemagglutinin__InfluenzaA__AGR50018

SEQ ID NO: 202445 - RNA, 1701 nt, Artificial Sequence; identical to SEQ ID NO: 194728
  derived and/or modified CDS sequence (opt5) from hemagglutinin__InfluenzaA__AGR50029

SEQ ID NO: 202446 - RNA, 1701 nt, Artificial Sequence
  derived and/or modified CDS sequence (opt5) from hemagglutinin__InfluenzaA__AGR50040
augaagaccaucauugcccugagcuacauccucugccugguguucgcucagaaacuucccggcaacgacaauuccacagccacgcugugucucgggcaccaugcggucccuaacggaaccauuguuaagacaaucaccaaugaucaaauugaggugacaaacgcuaccgaacuggugcagucuagcuccacaggcgagaucugcgacucuccgcaccagauccuugauggggaaaauuguacccugauugacgcccuccugggagauccccagugcgacggcuuucaaaacaaaaagugggaucuguucgucgagagaagcaaagccuauuccaauuguuacccuuaugacgugcccgauuacgcuucucuccggagccugguugccuccagcgggacgcuugaauuuaacaaugagucuuucaacuggaccggagugacacagaauggcaccuccagcgcuugcauccgcagaucuaacaauuccuuuuucagccggcugaacuggcucacacaucugaaguuuaaguauccugcccuuaaugucaccaugcccaacaacgagcaguucgacaaacuguacauuuggggcgugcaccauccugggacggauaaugaccagaucuuucucuaugcgcaagccucuggacgcauuacaguuuccaccaagagaagccagcagacagugaucccgaacauuggcucccggccccgcgucagaaauaucccuucucggaucagcauuuacuggaccaucgugaaacccggggauauucugcugaucaacuccaccggaaaucucauugcuccucgcggcuacuucaagaucagaagcgggaaaucuuccaucaugcggagcgacgcccccauuggaaaguguaacucugaaugcaucacaccgaauggcagcauuccuaacgacaagcccuuucagaaugugaaccgcaucacguauggcgcuuguccuagauacgucaaacaaaauacccugaaacuugccacagggaugcggaacguucccgagaagcagacccgcggaauuuucggcgcgaucgccggguuuaucgaaaauggaugggagggcaugguggaugggugguauggauucagacaccagaacuccgagggccggggccaagcugccgaccugaagucuacacaggcugccauugaucagaucaaugggaaacucaacagacugauuggaaagaccaacgaaaaauuccaccagaucgagaaggaauuuagcgagguggaaggccgcauucaagaccuugagaaguacgucgaggauacgaaaaucgaccugugguccuauaaugccgaacuccugguggcucuggagaaccagcauacaauugaucucaccgacagcgaaaugaauaagcuguucgagaaaaccaagaaacagcuucgggaaaacgcggaggauauggggaauggaugcuuuaagaucuaccacaagugugacaacgccugcaugggcucuaucagaaaugggacauaugaucaugacguuuaccgcgacgaggcucugaacaaucgguuccagauuaaaggcguggaacucaaguccggauacaaagauuggauccuguggauuagcuuugccaucucuugcuuccuucugugugucgcccuccugggcuuuauuaugugggcuugccaaaaggggaacaucagauguaauaucugcauuuga

SEQ ID NO: 202447 - RNA, 1701 nt, Artificial Sequence; identical to SEQ ID NO: 194728
  derived and/or modified CDS sequence (opt5) from hemagglutinin__InfluenzaA__AGR50052

SEQ ID NO: 202448 - RNA, 1701 nt, Artificial Sequence; identical to SEQ ID NO: 194728
  derived and/or modified CDS sequence (opt5) from hemagglutinin__InfluenzaA__AGR50063

SEQ ID NO: 202449 - RNA, 1701 nt, Artificial Sequence
  derived and/or modified CDS sequence (opt5) from hemagglutinin__InfluenzaA__AGR50074
augaaggccauccuggugguccuccuguacaccuucgcuacagccaacgcggacacgcuuugcauuggcuaucacgcuaauaacagcaccgauacaguugacaccgugcuggagaagaaugugacagucacccauuccgugaaccuccuggaagauaagcacaaugggaaacuuuguaagcugagaggaguugcuccccuccaucugggcaaaugcaacaucgccggguggauucugggaaauccugagugugaaucucucagcacagccuccucuuggagcuacaucguggagaccuccucuagcgacaacggcacgugcuauccgggggauuuuauugacuacgaagaacugcgggagcagcuuuccagcgucucuuccuucgaacgcuuugagaucuuccccaagaccagcucuuggccuaaucacgauuccaacaagggagugacagccgcuuguccccaugccggcgcgaaaucuuuuuauaagaaucugaucuggcucguuaaaaagggcaacagcuacccuaaacuguccaagagcuauauuaaugacaaggggaaagaagugcuuguccuguggggaauccaccaccccuccaccucugccgaucaacagagccucuaccagaacgcugacgccuacguguucgugggcuccagcagauauucuaagaaauuuaagccugagauugcuauccggccgaaaguccgcaaucaggaggggagaaugaacuacuauuggacacugguugaacccggagauaagauuaccuucgaggccacgggcaaccugguggugccucgguacgcguuugccauggaacgcaaugcuggguccggaaucauuaucagcgacacacccguccaugauugcaacaccacaugucaaaccccuaaaggcgccaucaauaccucucuccccuuccagaacauucacccgaucacaauuggcaagugcccuaaguaugugaaaagcacgaagcugagacuugcuaccgggcugcggaauguucccuccauccagucucgcggacucuuuggcgccauugccggguucaucgagggaggcuggacagggaugguggacggaugguacggcuaucaucaccagaacgaacaaggcagcggguacgcugcggaccugaaauccacccagaaugccaucgaugagauuacaaacaaggucaauagcgugaucgagaaaaugaacacccaguuuacggcuguuggaaaggaguucaaucaccuugagaagagaauugaaaaccugaauaaaaagguggacgauggcuuccucgacaucuggacauacaacgccgagcugcugguccuccuggaaaaugagcggacccuugauuaucaugacucuaacgugaaaaaccuguacgagaagguccgcucccagcucaaaaauaacgccaaggaaauugggaauggauguuuugaguucuaucacaagugcgauaacaccuguauggaaagcgugaaaaauggcacauacgacuauccuaaguacucugaggaagcuaaacugaacagagaggagaucgaugggguuaaacuugaauccacccggaucuaucaaauucuggccaucuacagcacaguggcguccucucucguccuggugguuagccugggcgcuauuuccuuuuggaugugcucuaauggaagccuccagugccgcaucuguauuuga

SEQ ID NO: 202450 - RNA, 1701 nt, Artificial Sequence; identical to SEQ ID NO: 194728
  derived and/or modified CDS sequence (opt5) from hemagglutinin__InfluenzaA__AGR50085

SEQ ID NO: 202451 - RNA, 1701 nt, Artificial Sequence; identical to SEQ ID NO: 194728
  derived and/or modified CDS sequence (opt5) from hemagglutinin__InfluenzaA__AGR50096

SEQ ID NO: 202452 - RNA, 1701 nt, Artificial Sequence; identical to SEQ ID NO: 194728
  derived and/or modified CDS sequence (opt5) from hemagglutinin__InfluenzaA__AGR50107

SEQ ID NO: 202453 - RNA, 1701 nt, Artificial Sequence; identical to SEQ ID NO: 194921
  derived and/or modified CDS sequence (opt5) from hemagglutinin__InfluenzaA__AGR50118

SEQ ID NO: 202454 - RNA, 1701 nt, Artificial Sequence
  derived and/or modified CDS sequence (opt5) from hemagglutinin__InfluenzaA__AGR50129
augaaggccauccuggugguccuccuguacaccuucgcuacagccaacgcggacacgcuuugcauuggcuaucacgcuaauaacagcaccgauacaguugacaccgugcuggagaaaaaugugacagucacccauuccgugaaccuccuggaagauaagcacaaugggaaacuuuguaagcugagaggaguugcuccccuccaucugggcaaaugcaacaucgccggguggauucugggaaauccugagugugaaucucucagcacagccuccucuuggagcuacaucguggagaccuccucuagcgacaacggcacgugcuauccgggggauuuuauugacuacgaagaacugcgggagcagcuuuccagcgucucuuccuucgaacgcuuugagaucuuccccaagaccagcucuuggccuaaucacgauuccaacaagggagugacagccgcuuguccccaugccggcgcgaaaucuuuuuauaagaaucugaucuggcucguuaaaaagggcaacagcuacccuaaacuguccaagagcuauauuaaugacaaggggaaagaagugcuuguccuguggggaauccaccaccccuccaccucugccgaucaacagagccucuaccagaacgcugacgccuacguguucgugggcuccagcagauauucuaagaaauuuaagccugagauugcuauccggccgaaaguccgcgaucaggaggggagaaugaauuacuauuggacacugguugaacccggagacaagauuaccuucgaggccacgggcaaccugguggugccucgguacgcguuugccauggaacgcaacgcuggguccggaaucauuaucagcgauacacccguccaugacugcaauaccacaugucaaaccccuaaaggcgccaucaacaccucucuccccuuccagaauauucacccgaucacaauuggccagugcccuaaguauguuaagagcacgaaacugagacuugcuaccgggcugcggaacgugcccuccauccagucucgcggacucuuuggcgccauugccggguucaucgagggaggcuggacagggaugguggacggaugguacggcuaucaucaccaaaaugaacagggcagcggguacgcugcggaucugaaguccacccagaacgccaucgacgagauuacaaauaaagucaacagcgugaucgagaagaugaauacccaguuuacggcuguuggaaaagaguucaaccaccuugagaagagaauugaaaaucugaacaagaaaguggaugacggcuuccucgauaucuggacauacaaugccgagcugcugguccuccuggaaaacgagcggacccuugacuaucaugauucuaaugugaagaaccuguacgagaaaguccgcucccaacucaagaacaaugccaaagaaauugggaacggauguuuugaguucuaucacaagugcgacaauaccuguauggaaagcgugaagaacggcacauacgauuauccuaaauacucugaggaagcuaagcugaauagagaggagaucgacgggguuaaacuugaauccacccggaucuaucagauucuggccaucuacagcacaguggcguccucucucguccuggugguuagccugggcgcuauuuccuuuuggaugugcucuaacggaagccuccagugccgcaucuguauuuga

SEQ ID NO: 202455 - RNA, 1701 nt, Artificial Sequence; identical to SEQ ID NO: 194728
  derived and/or modified CDS sequence (opt5) from hemagglutinin__InfluenzaA__AGR50140

SEQ ID NO: 202456 - RNA, 1701 nt, Artificial Sequence; identical to SEQ ID NO: 194923
  derived and/or modified CDS sequence (opt5) from hemagglutinin__InfluenzaA__AGR50151

SEQ ID NO: 202457 - RNA, 1698 nt, Artificial Sequence; identical to SEQ ID NO: 198770
  derived and/or modified CDS sequence (opt5) from hemagglutinin__InfluenzaA__AGR50162

SEQ ID NO: 202458 - RNA, 1701 nt, Artificial Sequence; identical to SEQ ID NO: 194728
  derived and/or modified CDS sequence (opt5) from hemagglutinin__InfluenzaA__AGR50174

SEQ ID NO: 202459 - RNA, 1701 nt, Artificial Sequence; identical to SEQ ID NO: 194767
  derived and/or modified CDS sequence (opt5) from hemagglutinin__InfluenzaA__AGR50185

SEQ ID NO: 202460 - RNA, 1701 nt, Artificial Sequence; identical to SEQ ID NO: 194728
  derived and/or modified CDS sequence (opt5) from hemagglutinin__InfluenzaA__AGR50196

SEQ ID NO: 202461 - RNA, 1701 nt, Artificial Sequence
  derived and/or modified CDS sequence (opt5) from hemagglutinin__InfluenzaA__AGR50207
augaaggccauccuggugguccuccuguacaccuucgcuacagccaacgcggacacgcuuugcauuggcuaucacgcuaauaacagcaccgauacaguugacaccgugcuggagaaaaaugugacagucacccauuccgugaaccuccuggaagauaagcacaaugggaaacuuuguaagcugagaggaguugcuccccuccaucugggcaaaugcaacaucgccggguggauucugggaaauccugagugugaaucucucagcacagccuccucuuggagcuacaucguggagaccuccucuagcgacaacggcacgugcuauccgggggauuuuauugacuacgaagaacugcgggagcagcuuuccagcgucucuuccuucgaacgcuuugagaucuuccccaagaccagcucuuggccuaaucacgauuccaacaagggagugacagccgcuuguccccaugccggcgcgaaaucuuuuuauaagaaucugaucuggcucguuaaaaagggcaaaagcuacccuaagcuguccaagagcuauauuaacgacaaagggaaggaagugcuuguccuguggggaauccaccaccccuccaccucugccgaucaacagagccucuaccagaaugcugacgccuacguguucgugggcuccagcagauauucuaaaaaguuuaaaccugagauugcuauccggccgaagguccgcgaucaggaggggagaaugaacuacuauuggacacugguugaacccggagacaaaauuaccuucgaggccacgggcaaucugguggugccucgguacgcguuugccauggaacgcaacgcuggguccggaaucauuaucagcgauacacccguccaugacugcaacaccacaugucaaaccccuaagggcgccaucaauaccucucuccccuuccagaacauucacccgaucacaauuggcaagugcccuaaauauguuaagagcacgaaacugagacuugcuaccgggcugcggaaugugcccuccauccagucucgcggacucuuuggcgccauugccggguucaucgagggaggcuggacagggaugguggacggaugguacggcuaucaucaccagaacgaacaaggcagcggguacgcugcggaucugaaguccacccagaaugccaucgacgagauuacaaacaaagucaauagcgugaucgagaagaugaacacccaguuuacggcuguuggaaaggaguucaaucaccuugagaaaagaauugaaaaccugaauaagaaaguggaugacggcuuccucgauaucuggacauacaacgccgagcugcugguccuccuggaaaaugagcggacccuugacuaucaugauucuaacgugaagaaucuguacgagaaaguccgcucccagcucaagaacaacgccaaggaaauugggaauggauguuuugaguucuaucacaaaugcgacaacaccuguauggaaagcgugaagaauggcacauacgauuauccuaaauacucugaggaagcuaagcugaacagagaggagaucgacgggguuaaacuugaauccacccggaucuaucaaauucuggccaucuacagcacaguggcguccucucucguccuggugguuagccugggcgcuauuuccuuuuggaugugcucuaauggaagccuccagugccgcaucuguauuuga

SEQ ID NO: 202462 - RNA, 1701 nt, Artificial Sequence; identical to SEQ ID NO: 194728
  derived and/or modified CDS sequence (opt5) from hemagglutinin__InfluenzaA__AGR50218

SEQ ID NO: 202463 - RNA, 1701 nt, Artificial Sequence; identical to SEQ ID NO: 194728
  derived and/or modified CDS sequence (opt5) from hemagglutinin__InfluenzaA__AGR50229

SEQ ID NO: 202464 - RNA, 1701 nt, Artificial Sequence; identical to SEQ ID NO: 194923
  derived and/or modified CDS sequence (opt5) from hemagglutinin__InfluenzaA__AGR50240

SEQ ID NO: 202465 - RNA, 1701 nt, Artificial Sequence; identical to SEQ ID NO: 194781
  derived and/or modified CDS sequence (opt5) from hemagglutinin__InfluenzaA__AGR50251

SEQ ID NO: 202466 - RNA, 1701 nt, Artificial Sequence
  derived and/or modified CDS sequence (opt5) from hemagglutinin__InfluenzaA__AGR50262
augaaggccauccuggugguccuccuguacaccuucgcuacagccaacgcggacacgcuuugcauuggcuaucacgcuaauaacagcaccgauacaguugacaccgugcuggagaaaaaugugacagucacccauuccgugaaccuccuggaagauaagcacaaugggaaacuuuguaagcugagaggaguugcuccccuccaucugggcaaaugcaacaucgccggguggauucugggaaauccugagugugaaucucucagcacagccuccucuuggagcuacaucguggagaccuccucuagcgacaacggcacgugcuauccgggggauuuuauugacuacgaagaacugcgggagcagcuuuccagcgucucuuccuucgaacgcuuugagaucuuccccaagaccagcucuuggccuaaucacgauuccaacaagggagugacagccgcuuguccccaugccggcgcgaaaucuuuuuauaagaaucugaucuggcucguuaaaaagggcaacagcuacccuaaacuguccaagagcuauauuaaugacaaggggaaagaagugcuuguccuguggggaauccaccaccccuccaccucugccgaucaacagagccucuaccagaacgcugacgccuacguguucgugggcuccagcagauauucuaagaaauuuaagccugagauugcuauccggccgaaaguccgcgaucaggaggggagaaugaauuacuauuggacacugguugaacccggagacaagauuaccuucgaggccacgggcaaccugguggugccucgguacgcguuugccauggaacgcaacgcuggguccggaaucauuaucagcgauacacccguccaugacugcaauaccacaugucaaaccccuaaaggcgccaucaacaccucucuccccuuccagaauauucacccgaucacaauuggcaagugcccuaaguaugugaaaagcacgaagcugagacuugcuaccgggcugcggaacguucccuccauccagucucgcggacucuuuggcgccauugccggguucaucgagggaggcuggacagggaugguggacggaugguacggcuaucaucaccagaaugaacaaggcagcggguacgcugcggaucugaaauccacccagaacgccaucgacgagauuacaaauaaggucaacagcgugaucgagaaaaugaauacccaguuuacggcuguuggaaaggaguucaaccaccuugagaagagaauugaaaaucugaacaaaaagguggaugacggcuuccucgauaucuggacauacaaugccgagcugcugguccuccuggaaaacgagaaaacccuugacuaucaugauucuaaugugaagaaccuguacgagaaaguccggucccagcucaagaacaaugccaaggaaauugggaacggauguuuugaguucuaucacaaaugcgacaauaccuguauggaaagcgugaagaacggcacauacgauuauccuaaauacucugaggaagcuaagcugaaucgcgaggagaucgacgggguuaaacuugaauccaccagaaucuaucaaauucuggccaucuacagcacaguggcguccucucucguccuggugguuagccugggcgcuauuuccuuuuggaugugcucuaacggaagccuccagugccggaucuguauuuga

SEQ ID NO: 202467 - RNA, 1701 nt, Artificial Sequence; identical to SEQ ID NO: 194728
  derived and/or modified CDS sequence (opt5) from hemagglutinin__InfluenzaA__AGR50273

SEQ ID NO: 202468 - RNA, 1701 nt, Artificial Sequence
  derived and/or modified CDS sequence (opt5) from hemagglutinin__InfluenzaA__AGR50284
augaaggccauccuggugguccuccuguacaccuucgcuacagccaacgcggacacgcuuugcauuggcuaucacgcuaauaacagcaccgauacaguugacaccgugcuggagaagaaugugacagucacccauuccgugaaccuccuggaagauaagcacaaugggaaacuuuguaagcugagaggaguugcuccccuccaucugggcaaaugcaacaucgccggguggauucugggaaauccugagugugaaucucucagcacagccuccucuuggagcuacaucguggagaccuccucuagcgacaacggcacgugcuauccgggggauuuuauugacuacgaagaacugcgggagcagcuuuccagcgucucuuccuucgaacgcuuugagaucuuccccaagaccagcucuuggccuaaucacgauuccaacaagggagugacagccgcuuguccccaugccggcgcgaaaucuuuuuauaagaaucugaucuggcucguuaaaaagggcaacagcuacccuaaacuguccaagagcuauauuaaugacaaggggaaagaagugcuuguccuguggggaauccaccaccccuccaccucugccgaucaacagagccucuaccagaacgcugacgccuacguguucgugggcuccagcagauauucuaagaaauuuaagccugagauugcuauccggccgaaaguccgcgaucaggaggggagaaugaauuacuauuggacacugguugaacccggagacaagauuaccuucgaggccacgggcaaccugguggugccucgguacgcguuugccauggaacgcaacgcuggguccggaaucauuaucagcgauucucccguccaugacugcaauacaaccugucaaacaccuaaaggcgccaucaacaccagccuccccuuccagaauauucacccgaucaccauuggcaagugcccuaaguaugugaaauccacaaagcugagacuugcuacggggcugcggaacguucccucuauccagagccgcggacucuuuggcgccauugccggguucaucgagggaggcuggaccgggaugguggacggaugguacggcuaucaucaccagaaugaacaaggcuccggguacgcugcggaucugaaaagcacacagaacgccaucgacgagauuaccaauaaggucaacucugugaucgagaaaaugaauacacaguuuaccgcuguuggaaaggaguucaaccaccuugagaagagaauugaaaaucugaacaaaaagguggaugacggcuuccucgauaucuggacguacaaugccgagcugcugguccuccuggaaaacgagcggacacuugacuaucaugauuccaaugugaaaaaccuguacgagaagguccgcagccagcucaaaaacaaugccaaggaaauugggaacggauguuuugaguucuaucacaagugcgacaauaccuguauggaaucugugaaaaacggcaccuacgauuauccuaaguacuccgaggaagcuaaacugaauagagaggagaucgacgggguuaaacuugaaagcacacggaucuaucaaauucuggccaucuacuccaccguggcgucuagccucguccuggugguuucccugggcgcuauuucuuuuuggaugugcagcaacggaucccuccagugccgcaucuguauuuga

SEQ ID NO: 202469 - RNA, 1701 nt, Artificial Sequence; identical to SEQ ID NO: 195471
  derived and/or modified CDS sequence (opt5) from hemagglutinin__InfluenzaA__AGR50295

SEQ ID NO: 202470 - RNA, 1701 nt, Artificial Sequence; identical to SEQ ID NO: 194728
  derived and/or modified CDS sequence (opt5) from hemagglutinin__InfluenzaA__AGR50306

SEQ ID NO: 202471 - RNA, 1701 nt, Artificial Sequence; identical to SEQ ID NO: 194728
  derived and/or modified CDS sequence (opt5) from hemagglutinin__InfluenzaA__AGR50317

SEQ ID NO: 202472 - RNA, 1701 nt, Artificial Sequence; identical to SEQ ID NO: 202461
  derived and/or modified CDS sequence (opt5) from hemagglutinin__InfluenzaA__AGR50328

SEQ ID NO: 202473 - RNA, 1701 nt, Artificial Sequence
  derived and/or modified CDS sequence (opt5) from hemagglutinin__InfluenzaA__AGR50339
augaaggccauccuggugguccuccuguacaccuucgcuacagccaacgcggacacgcuuugcauuggcuaucacgcuaauaacagcaccgauacaguugacaccgugcuggagaagaaugugacagucacccauuccgugaaccuccuggaagauaagcacaaugggaaacuuuguaagcugagaggaguugcuccccuccaucugggcaaaugcaacaucgccggguggauucugggaaauccugagugugaaucucucagcacagccuccucuuggagcuacaucguggagaccuccucuagcgacaacggcacgugcuauccgggggauuuuauugacuacgaagaacugcgggagcagcuuuccagcgucucuuccuucgaacgcuuugagaucuuccccaagaccagcucuuggccuaaucacgauuccaacaagggagugacagccgcuuguccccaugccggcgcgaaaucuuuuuauaagaaucugaucuggcucguuaaaaagggcaacagcuacccuaaacuguccaagagcuauauuaaugacaaggggaaagaagugcuuguccuguggggaauccaccaccccuccaccucugccgaucaacagagccucuaccagaacgcugacgccuacguguucgugggcuccagcagauauucuaagaaauuuaagccugagauugcuauccggccgaaaguccgcgaucaggaggggagaaugaauuacuauuggacacugguugaacccggagacaagauuaccuucgaggccacgggcaaccugguggugccucgguacgcguuugccauggaacgcaacgcuggguccggaaucauuaucagcgauacacccguccaugacugcaauaccacaugucaaaccucuaaaggcgccaucaacaccagccucccuuuccagaauauucaccccaucacaauuggcaagugcccgaaguaugugaaauccacgaagcugagacuugcuaccgggcugcggaacguuccuucuauccagagccgcggacucuuuggcgccauugccggguucaucgagggaggcuggacagggaugguggacggaugguacggcuaucaucaccagaaugaacaaggcuccggguacgcugcggaucugaaaagcacccagaacgccaucgacgagauuacaaauaaggucaacucugugaucgagaaaaugaauacccaguuuacggcuguuggaaaggaguucaaccaccuugagaagagaauugaaaaucugaacaaaaagguggaugacggcuuccucgauaucuggacauacaaugccgagcugcugguccuccuggaaaacgagcggacccuugacuaucaugauuccaaugugaaaaaccuguacgagaagguccgcagccagcucaaaaacaaugccaaggaaauugggaacggauguuuugaguucuaucacaagugcgacaauaccuguauggaaucugugaaaaacggcacauacgauuaucccaaguacuccgaggaagcuaaacugaauagagaggagaucgacgggguuaaacuugaaagcacccggaucuaucaaauucuggccaucuacuccacaguggcgucuagccucguccuggugguuucccugggcgcuauuucuuuuuggaugugcagcaacggaucccuccagugccgcaucuguauuuga

SEQ ID NO: 202474 - RNA, 1701 nt, Artificial Sequence
  derived and/or modified CDS sequence (opt5) from hemagglutinin__InfluenzaA__AGR50350
augaaggccauccuggugguccuccuguacaccuucgcuacagccaacgcggacacgcuuugcauuggcuaucacgcuaauaacagcaccgauacaguugacaccgugcuggagaaaaaugugacagucacccauuccgugaaccuccuggaagauaagcacaaugggaaacuuuguaagcugagaggaguugcuccccuccaucugggcaaaugcaacaucgccggguggauuaugggaaauccugagugugaaucucugagcacagccuccucuuggagcuacaucguggagaccuccucuagcgacaacggcacgugcuauccgggggauuuuauugacuacgaagaacuccgggagcagcuguccagcgucucuuccuucgaacgcuuugagaucuuccccaagaccagcucuuggccuaaucacgauuccaacaagggagugacagccgcuuguccccaugccggcgcgaaaucuuuuuauaagaaucuuaucuggcugguuaaaaagggcaacagcuacccuaaacucuccaagagcuauauuaaugacaaggggaaagaagugcugguccuuuggggaauccaccaccccuccaccucugccgaucaacagagccuguaccagaacgcugacgccuacguguucgugggcuccagcagauauucuaagaaauuuaagccugagauugcuauccggccgaaaguccgcgaucaggaggggagaaugaauuacuauuggacacucguugaacccggagacaagauuaccuucgaggccacgggcaaccugguggugccucgguacgcguuugccauggaacgcaacgcuggguccggaaucauuaucagcgauacacccguccaugacugcaauaccacaugucaaaccccuaaaggcgccaucaacaccucucugcccuuccagaauauucacccgaucacaauuggcaagugcccuaaguaugugaaaagcacgaagcucagacuggcuaccgggcuucggaacguucccuccauccagucucgcggacuguuuggcgccauugccggguucaucgagggaggcuggacagggaugguggacggaugguacggcuaucaucaccagaaugaacaaggcagcggguacgcugcggaucucaaauccacccagaacgccaucgacgagauuacaaauaaggucaacagcgugaucgagaaaaugaauacccaguuuacggcuguuggaaaggaguucaaccaccuggagaagagaauugaaaaucuuaacaaaaagguggaugacggcuuccuggauaucuggacauacaaugccgagcuccugguccugcucgaaaacgagcggacccuggacuaucaugauucuaaugugaaaaaccuuuacgagaagguccgcucccagcugaaaaacaaugccaaggaaauugggaacggauguuuugaguucuaucacaagugcgacaauaccuguauggaaagcgugaaaaacggcacauacgauuauccuaaguacucugaggaagcuaaacucaauagagaggagaucgacgggguuaagcuggaauccacccggaucuaucaaauucuugccaucuacagcacaguggcguccucucugguccucgugguuagccugggcgcuauuuccuuuuggaugugcucuaacggaagccugcagugccgcaucuguauuuga

SEQ ID NO: 202475 - RNA, 1698 nt, Artificial Sequence
  derived and/or modified CDS sequence (opt5) from hemagglutinin__InfluenzaA__AGR50361
augaaggugcagcugcucguccugcuuugcaccuucacagccacguacgcugacaccaucuguauuggcuaucacgccaacaauagcacagauaccguugacacagugcuggagaaaaacgugaccgucacacauuccgugaaucuccuggaaaacucucacaaugggaaacuuugccugcucaaaggaaucgcgccccugcaacugggcaacuguagcguugcuggguggauucucggaaauccugagugcgaacugcuuaucuccaaggagucuuggagcuacauuguggaaaaaccgaaccccgagaauggcaccuguuauccugggcauuuugccgauuacgaggaacugagagagcagcucuccucugucagcuccuucgaacgguuugagaucuuccccaaggagagcucuuggccuaaccacacggugaccggaguuuccgccagcugcucucauaauggcgaauccagcuuuuaucgcaaccugcuuuggcugacaggcaagaaugggcucuaccccaaccugucuaaauccuaugcuaauaacaaggagaaagaagugcugguccucuggggagugcaccacccuccgaacaucguggaccagaagacccuguacagaacagagaaugccuacgucagcguuguguccucucauuauagccggaaauucacccccgaaauugcuaagcgcccuaaggugagagaucaggagggccggaucaacuacuauuggacgcuucuggagcccggggacacaauuaucuuugaagccaauggaaaccucauugcgccucgcuacgccuucgcucuguccagaggcuuugggagcggaaucauuaauucuaacgcccccaugggcaaaugugaugcuaagugccaaaccccgcagggcgccaucaauuccagccuuccuuuccagaacguccaccccgugacaaucggggaguguccuaaauauguucggucugcgaagcugcgcauggugaccggacucagaaauauucccagcauccagucccggggccuguuuggggccauugcuggauucaucgaaggcggguggaccggaauggucgacggcugguacggcuaucaucaccaaaacgagcaggggucuggauacgccgcugaucagaaaagcacacagaaugccauuaacggcaucacgaauaaggugaacuccguuaucgaaaagaugaauacccaauuuacagccguggggaaggaguucaacaagcuggagcgcagaauggaaaaccucaauaaaaaggucgacgauggauucauugacaucuggaccuacaacgcugagcugcuugugcugcucgaaaaugagcggacacuggauuuucacgacagcaacgucaaaaaucuuuaugaaaaggugaaaucucagcugaagaacaaugcgaaggagauuggcaacgggugcuucgaguuuuaccauaaauguaaugacgaaugcauggaguccguuaagaacggcaccuaugauuaccccaaauauagcgaagagucuaagcucaaucgcgagaaaaucgacggagugaagcuggaauccaugggcgucuaccagauucuggccaucuauagcacgguggcuuccucucucguucugcuugugagccugggggccaucuccuucuggaugugcucuaacggaagccuccaauguagaauuugcaucuga

SEQ ID NO: 202476 - RNA, 1701 nt, Artificial Sequence
  derived and/or modified CDS sequence (opt5) from hemagglutinin__InfluenzaA__AGT18718
augaaggugauccuggucguucuccuguacaccuucgccacagcuaacgccgacacgcuuugcauuggcuaucacgcgaauaacagcaccgauacaguggacaccgugcuggagaaaaaugucacagugacccauuccguuaaccuccuggaagauaagcacaaugggaaacuuuguaagcugagaggaguggcuccccuccaucugggcaaaugcaacaucgccggguggauucugggaaauccugagugugaaucucucagcacagccuccucuuggagcuacaucgucgagaccuccucuagcgacaacggcacgugcuauccgggggauuuuauuaauuacgaagaacugcgggagcagcuuuccagcgugucuuccuucgaacgcuuugagaucuuccccaagaccagcucuuggccuaaccacgacuccaauaagggaguuacagcugccuguccccaugcuggcgccaagagcuuuuauaagaaccugaucuggcucgugaaaaagggcaauucuuacccuaaacuguccaagagcuauauuaacgauaaggggaaagaaguccuugugcuguggggaauccaccaccccuccaccacagcggaccaacagucucucuaccagaaugccgaugcuuacguguucgucggcaccagcagauauuccaagaaauuuaagccugagauugccauccggccgaaaguucgcgaccaggaggggagaaugaacuacuauuggacgcugauugaacccggagauaagaucacauucgaggcuaccggcaaccugguggugccucgguacgccuuugcgauggaacgcaaugccgggagcggaauuaucaucucugacacacccguccaugauugcaacaccaccugucaaacaccugagggcgcuauuaauacgucccuccccuuccagaacauccacccgauuaccaucggcaaaugcccuaaguaugugaaaagcacaaaacugagacuugccaccgggcugcggaauguucccucuauucagagccgcggacucuuuggcgcuaucgccggguucaucgaaggaggcuggacagggaugguggacggaugguacggcuaucaucaccagaacgagcaaggcuccggguacgccgcugaccugaagucuacccagaaugcgauugauaaaaucacgaacaaggucaauagcgugauugagaaaaugaacacacaguuuaccgccguuggaaaggaguucaaucaccuugagaagagaaucgaaaaccugaauaaaaagguggacgauggcuuccucgacauuuggaccuacaacgcugagcugcugguccuccuggaaaaugagcggacacuugauuaucaugacuccaacgugaaaaaccuguacgagaagguccgcaaucagcucaaaaacaaugccaaggaaaucgggaacggauguuuugaguucuaucacaagugcgauaauaccuguauggaaagcgugaaaaacggcacauacgacuauccuaaguacucugaggaagccaaacugaauagagagaagaucgaugggguuaaacuugaguccacgcggauuuaucaaauccuggcuauuuacagcaccguggccucuucccucguccuggugguuagccugggcgcgaucuccuuuuggaugugcucuaacggaagccuccagugccgcauuuguaucuga

SEQ ID NO: 202477 - RNA, 1701 nt, Artificial Sequence
  derived and/or modified CDS sequence (opt5) from hemagglutinin__InfluenzaA__AGT18720
augaaggugauccuggucguucuccuguacaccuucgccacagcuaacgccgacacgcuuugcauuggcuaucacgcgaauaacagcaccgauacaguggacaccgugcuggagaaaaaugucacagugacccauuccguuaaccuccuggaagauaagcacaaugggaaacuuuguaagcugagaggaguggcuccccuccaucugggcaaaugcaacaucgccggguggauucugggaaauccugagugugaaucucucagcacagccuccucuuggagcuacaucgucgagaccuccucuagcgacaacggcacgugcuauccgggggauuuuauuaauuacgaagaacugcgggagcagcuuuccagcgugucuuccuucgaacgcuuugagaucuuccccaaggcuagcucuuggccuaaccacgacuccaauaagggaguuaccgccgcuuguccccaugccggcgcgaaaucuuuuuauaagaaccugaucuggcucgugaaaaagggcaauagcuacccuaaacuguccaagagcuauauuaacgauaaggggaaagaaguccuugugcuguggggaauccaccaccccaauacaaccgccgaccaacagucccucuaccagaacgcugaugccuacguguucgucggcacaucuagauauagcaagaaauuuaagccugagauugcuauccggccgaaaguucgcgaccaggagagacggaugaacuacuauuggacccugauugaacccggggauaagaucacguucgaggccacaggaaaucugguggugccucgcuacgcguuugccauggaaagaaacgcuggcuccgggauuaucaucagcgacacccccguccaugauugcaauacaaccugucaaaccccugagggagccauuaacacaucucuccccuuccagaauauccacccgauuacgaucggcaaaugcccuaaguaugugaaguccaccaaacugcggcuugcuacaggccugcgcaacguucccagcauucagucuagagggcucuuuggagccaucgccggcuucaucgaagggggauggaccggcaugguggacgggugguacggauaucaucaccagaaugagcaaggcagcggcuacgcugcggaccugaaguccacacagaacgccauugauaaaaucaccaauaaggucaacucugugauugagaaaaugaauacgcaguuuacagcuguugggaaggaguucaaccaccuugagaagcggaucgaaaaucugaacaaaaagguggacgauggauuccucgacauuuggaccuacaaugccgagcugcugguccuccuggaaaacgagcgcacccuugauuaucaugacagcaacgugaaaaaucuguacgagaaggucagaaaccagcucaaaaauaacgccaaggaaaucggcaauggguguuuugaguucuaucacaagugcgauaacacauguauggaauccgugaaaaauggaaccuacgacuauccuaaguacagcgaggaagcuaaacugaaccgggagaagaucgauggcguuaaacuugagucuacacgcauuuaucaaauccuggccauuuacuccacgguggcgagcucucucguccuggugguuucccugggggcuaucagcuuuuggaugugcuccaauggcucucuccagugcagaauuuguaucuga

SEQ ID NO: 202478 - RNA, 1701 nt, Artificial Sequence
  derived and/or modified CDS sequence (opt5) from hemagglutinin__InfluenzaA__AGT18721
augaaggccauccuggugguccuccuguacaccuucgcuacagccaacgcggacacgcuuugcauuggcuaucacgcuaauaacagcaccgauacaguugacaccgugcuggagaaaaaugugacagucacccauuccgugaaccuccuggaagauaagcacaaugggaaacuuuguaagcugagaggaguugcuccccuccaucugggcaaaugcaacaucgccggguggauucugggaaauccugagugugaaucucucagcacagccuccucuuggagcuacaucguggagaccuccucuagcgacaacggcacgugcuauccgggggauuuuauuaauuacgaggaacugcgggagcagcuuuccagcgucucuuccauccaacgcagcgaaaucuguaccaagacaucuuccuggcccaaccacgacagcaauaagggagugaccgccgcuugcccucaugccggcgcgaaaucuuucuauaagaaccugauuuggcucguuaaaaagggcaauuccuaccccaaacugagcaaguccuauaucaacgauaaggggaaagaggugcuuguccuguggggcauucaccaccaaaauucuagaggacaucagcagagccucuaccagaacgccgacgcuuacguguuuguggggacaucccgguauagcaagaaauucaagccugaaaucgccauucgccccaaagucaaggagcaggauggaagaauggacuacuauuggacccugaucgagccuggcgauaaaauuacguuugaagcuacagggaaccugguugugccgcgguacgccuucgcgauggagcgcaaugccggaucuggcaucaucauuuccgacacccccgugcacgauuguaacacaaccugccagaccccugaaggcgcuaucaauacaagccuccccuuucagaacauucauccuaucacgauugggaagugucccaaguaugucaaaucuaccaagcugagacuugccacaggacugcggaaugugccgagcauccaaucccgcggccucuucggggcuaucgccggauuuauugagggcggguggaccggaaugguugacggcugguacggcuaucaccaccagaacgaacaggggucuggauacgccgcugaccugaaaagcacacagaaugcgaucgauaagauuaccaacaaagucaauuccgugaucgagaagaugaacacgcaauucacagccgugggcaaggaguuuaaucaucuugaaaagagaauugagaaccugaauaagaaaguugacgauggguuccucgacaucuggaccuacaacgcugaacugcuggugcuccuggagaaugaacggacccuugauuaucacgacagcaacgucaagaaccuguacgagaaagugcgcaaucagcucaagaacaaugccaaggagaucggaaacggcugcuuugaguucuaucauaaaugugauaauacaugcauggaaucugucaagaacgggaccuacgacuauccuaaauacuccgaagaggccaagcugaauagagagaaaauugauggcgugaaacuugaaagcacacggaucuaucagauucuggcuaucuacucuacgguugccuccagccucgugcuggucgugucccugggagcgauuucuuucuggaugugcagcaacggcucccuccaaugucgcaucugcauuuga

SEQ ID NO: 202479 - RNA, 1701 nt, Artificial Sequence
  derived and/or modified CDS sequence (opt5) from hemagglutinin__InfluenzaA__AGT18722
augaaggccauccuggugguccuccuguacaccuucgcuacagccaacgcggacacgcuuugcauuggcuaucacgcuaauaacagcaccgauacaguugacaccgugcuggagaagaaugugacagucacccauuccgugaaccuccuggaagauaagcacaaugggaaacuuuguaagcugagaggaguugcuccccuccaucugggcaaaugcaacaucgccggguggauucugggaaauccugagugugaaucucucagcacagccuccucuuggagcuacaucguggagaccuccaagucuaacaaucggacgugcuauccgggcgacuuuauuaacuacgaagaacugcgcgagcagcuuagcuccgucagcucuuucgaaagauuugagaucuuccccaagaccuccagcuggccuaaucacgauucuaacaaaggggugacagccgcuuguccccaugccggagcgaaguccuuuuauaaaaaucugaucuggcucguuaagaaaggcaacagcuacccuaagcugucuaaguccuauauuaaugacaaaggcaaggaagugcuuguccugugggggauccaccaccccagcaccacagccgaucaacagucccucuaccagaacgcugacgccuacguguucgugggaaccucucgguauagcaaaaaguuuaaaccugagauugcuauccgcccgaaggucagagaucaggagggccggaugaacuacuauuggacgcugauugaacccggggacaaaaucacauucgaggccaccggaaaucugguugugccucgcuacgcguuugccauggaaagaaacgcuggcuccgggauuaucaucagcgauacacccgugcaugacugcaauaccaccugucaaacaccugagggagccauuaacacgucucuccccuuccagaauauccacccgauuaccaucggcaagugcccuaaguaugucaaauccacaaagcugcggcuugcuaccggccugcgcaacgugcccagcauucagucuagagggcucuuuggagccaucgccggcuucaucgaagggggauggacaggcaugguugaugggugguacggauaucaucaccagaaugagcaaggcagcggcuacgcugcggaccugaaauccacccagaacgccauugacaagaucacgaauaaagugaacucugucauugagaagaugaauacacaguuuaccgcuguggggaaggaguucaaccaccuugagaaacggaucgaaaaucugaacaagaaaguugaugacggauuccucgauauuuggaccuacaaugccgagcugcuggugcuccuggaaaacgagcgcacacuugacuaucaugauagcaacgucaagaaucuguacgagaaagugagaaaccagcucaagaauaacgccaaggaaaucggcaauggguguuuugaguucuaucacaaaugcgacaacaccuguauggaauccgucaagaauggaacauacgauuauccuaaauacagcgaggaagcuaagcugaaccgggagaaaaucgacggcgugaaacuugagucuacgcgcauuuaucaaauccuggccauuuacuccaccguugcgagcucucucgugcuggucgugucccugggggcuaucagcuuuuggaugugcuccaauggcucucuccagugcagaauuuguaucuga

SEQ ID NO: 202480 - RNA, 1701 nt, Artificial Sequence
  derived and/or modified CDS sequence (opt5) from hemagglutinin__InfluenzaA__AGT18723
augaaggccauccuggugguccuccuguacaccuucgcuacagccaacgcggacacgcuuugcauuggcuaucacgcuaauaacagcaccgauacaguugacaccgugcuggagaaaaaugugacagucacccauuccgugaaccuccuggaagauaagcacaaugggaaacuuuguaagcugagaggaguugcuccccuccaucugggcaaaugcaacaucgccggguggauucugggaaauccugagugugaaucucucagcacagccuccucuuggagcuacaucguggagaccuccaagacgaacaaucggaccugcuauccgggcgacuuuauuaacuacgaagaacugcgcgagcagcuuucuagcgucuccagcuucgaaagauuugagaucuuccccaagacaucuuccuggccuaaucacgauagcaacaaaggggugaccgccgcuuguccccaugccggagcgaagucuuuuuauaaaaaucugaucuggcucguuaagaaaggcaacuccuacccuaagcugagcaagucuuauauuaaugacaaaggcaaggaagugcuuguccugugggggauccaccaccaaaacaaaaaggccgagcagcagacacccuaccagaacgcugaugccuacguguucgugggaaccucccgguauagcaaaaaguuuaaaccugagauugcuauccgcccgaaggucagagaccaagaaggccggauggauuacuauuggacgcucauugagcccggggacaagaucacauucgaagccaccggaaaucugguugugccucgcuacgcguuugccauggagagaaacgcuggcuccgggauuaucaucucugauacacccgugcaugacugcaauaccaccugucagacaccugaaggagccauuaacacgagccugcccuuccagaauauccacccgauuaccaucggcaaaugcccuaaguaugucaaauccacaaagcuccggcuggcuaccggccuucgcaacgugcccagcauucagucuagagggcuguuuggagccaucgccggcuucaucgaagggggauggacaggcaugguugaugggugguacggauaucaucaccaaaaugagcagggcuccggcuacgcugcggaccucaaaagcacccagaacgccauugacaagaucacgaauaaggugaacucugucauugagaaaaugaauacacaguuuaccgcuguggggaaggaguucaaccaccuggaaaaacggaucgagaaucuuaacaagaaaguugaugacggauuccuggauauuuggaccuacaaugccgaacuccuggugcugcucgagaacgagcgcacacuggacuaucaugauagcaacgucaagaaucuuuacgaaaaggugagaaaccaacugaaaaauaacgccaaggagaucggcaauggguguuuugaguucuaucacaaaugcgacaacaccuguauggaguccgucaagaauggaacauacgauuauccuaaauacucugaagaggcuaagcucaaccgggagaagaucgacggcgugaaacuggaaagcacgcgcauuuaucagauccuugccauuuacuccaccguugcgagcucucuggugcucgucgugucccugggggcuaucagcuuuuggaugugcucuaauggcucccugcagugcagaauuuguaucuga

SEQ ID NO: 202481 - RNA, 1701 nt, Artificial Sequence
  derived and/or modified CDS sequence (opt5) from hemagglutinin__InfluenzaA__AGT18724
augaaggccauccuggugguccuccuguacaccuucgcuacagccaacgcggacacgcuuugcauuggcuaucacgcuaauaacagcaccgauacaguugacaccgugcuggagaagaaugugacagucacccauuccgugaaccuccuggaagauaagcacaaugggaaacuuuguaagcugagaggaguugugccccuccaucugggcaaaugcaacaucgccggguggauucugggaaauccugagugugaaucucucagcacagccuccucuuggagcuacaucgucgagaccuccaagacgaacaaucggaccugcuauccgggcgacuuuauuaacuacgaagaacugcgcgagcagcuuucuagcguguccagcuucgaaagauuugagaucuuccccaagacaucuuccuggccuaaucacgauagcaacaaagggguuaccgcugccuguccccaugcuggagccaagucuuuuuauaaaaaucugaucuggcucgugaagaaaggcaacuccuacccuaagcugagcaagucuuauauuaaugacaaaggcaaggaaguccuugugcugugggggauccaccaccccuccacaaccgcggaucaacagacgcucuaccagaacgccgacgcuuacguguucgucggaacaagccgguauuccaaaaaguuuaaaccugagauugccauccgcccgaagguuagagaucaggagggccggaugaacuacuaucgcacccugauugaacccgagaauaaaaucacauucgaagcuaccgggaaccugguggugccuagauacgccuuugcgauggagcggaaugccggaucuggcauuaucaucagcgacacccccguccaugauugcaacacaacgugucaaaccccugaaggggcuauuaauacaucccuccccuuccagaacauccacccgauuaccaucggaaagugcccuaaguaugugaaaagcacaaagcugcgccuugccaccggccugagaaauguucccucuauucagucccggggccucuuuggggcuaucgccggauucaucgagggcggguggacgggaaugguggacggcugguacggguaucaucaccagaacgagcaaggaagcggcuacgccgcugaucugaaaucuacacagaaugcgauugacaagaucaccaacaaagucaauagcgugauugaaaagaugaacacccaguuuacagccguuggcaaggaguucaaucaccuugaaaaacgcaucgagaaccugaauaagaaaguggacgauggguuccucgacauuuggaccuacaacgcugaacugcugguccuccuggagaacgagagaacacuugauuaucaugacuccaaugugaagaaccuguacgaaaaaguccggaaucagcucaagaacaaugccaaggagaucggaaacggcuguuuugaguucuaucacaaaugcgauaauacguguauggagucugugaagaacgggaccuacgacuauccuaaauacagcgaagaggccaagcugaaucgcgagaaaaucgauggaguuaaacuugaauccacaagaauuuaucaaauccuggcuauuuacagcaccguggccucuucccucguccuggugguuagccugggcgcgaucucuuuuuggaugugcuccaacgggagccuccagugccggauuuguaucuga

SEQ ID NO: 202482 - RNA, 1701 nt, Artificial Sequence
  derived and/or modified CDS sequence (opt5) from hemagglutinin__InfluenzaA__AGT18725
augaaggugauccuggucguucuccuguacaccuucgccacagcuaacgccgacacgcuuugcauuggcuaucacgcgaauaacagcaccgauacaguggacaccgugcuggagaaaaaugucacagugacccauuccguuaaccuccuggaagauaagcacaaugggaaacuuuguaagcugagaggaguggcuccccuccaucugggcaaaugcaacaucgccggguggauucugggaaauccugagugugaaucucucagcacagccuccucuuggagcuacaucgucgagaccuccucuagcgacaacggcacgugcuauccgggggauuuuauuaauuacgaagaacugcgggagcagcuuuccagcgugucuuccuucgaacgcuuugagaucuuccccaagaccagcucuuggccuaaccacgacuccaauaagggaguuacagcugccuguccccaugcuggcgccaaauccuuuuauaagaaccugaucuggcucgugaaaaagggcaauucuuacccuaaacuguccaagagcuauauuaacgauaaggggaaagaaguccuugugcuguggggaauccaccaccccuccaccucugcggaccaacagagccucuaccagaaugccgaugcuuacguguucgucggcacauccagauauagcaagaaauuuaagccugagauugccauccggccgaaaguucgcgaccaggaggggagaaugaacuacuauuggacccugguggaacccggagauaagauuacguucgaggcuacaggcaaccugguggucccucgguacgccuuugcgauggaacgcaaugccgggucuggaaucauuaucuccgacacccccgugcaugauugcaacacaaccugucaaaccccugagggcgcuaucaauacaagccuccccuuccagaacauucacccgaucacgauuggcaaaugcccuaaguauguuaagucuaccaaacugagacuugccacagggcugcggaaugugcccagcauccagucccgcggacucuuuggcgcuauugccggguucaucgaaggaggcuggaccgggauggucgacggaugguacggcuaucaucaccagaacgagcaaggcucuggguacgccgcugaccuuaagagcacacagaaugcgaucgauaaaauuaccaacaaggugaauagcguuaucgagaaaaugaacacgcaguuuacagccgugggaaaggaguucaaucaccuggagaagagaauugaaaaccugaauaaaaaggucgacgauggcuuccucgacaucuggaccuacaacgcugagcugcuggugcuccuggaaaaugagcggacccuugauuaucaugacagcaacgucaaaaaccuguacgagaaggugcgcacacagcucaaaaauaacgccaaggaaauugggaauggauguuuugaguucuaucacaagugcgauaacaccuguauggaaucuguuaaaaauggcacauacgacuauccuaaguacuccgaggaagccaaacugaacagagagaagaucgauggggugaaacuugagagcacgcggaucuaucaaauucuggcuaucuacucuaccgucgccuccagccucgugcugguugugucccugggcgcgauuucuuuuuggaugugcagcaauggaucccuccagugccgcaucuguauuuga

SEQ ID NO: 202483 - RNA, 1701 nt, Artificial Sequence
  derived and/or modified CDS sequence (opt5) from hemagglutinin__InfluenzaA__AGT18734
augaaggccauccuggugguccuccuguacaccuucgcuacagccaacgcggacacgcuuugcauuggcuaucacgcuaauaacagcaccgauacaguugacaccgugcuggagaaaaaugugacagucacccauuccgugaaccuccuggaagauaagcacaaugggaaacuuuguaagcugagaggaguugcuccccuccaucugggcaaaugcaacaucgccggguggauucugggaaauccugagugugaaucucucagcacagccuccucuuggagcuacaucguggagaccuccucuagcgacaacggcacgugcuauccgggggauuuuauuaauuacgaagaacugcgggagcagcuuuccagcgucucuuccuucgaacgcuuugagaucuuccccaagaccagcucuuggccuaaccacgacuccaauaagggagugacagccgcuuguccccaugccggcgcgaaaucuuuuuauaagaaccugaucuggcucguuaaaaagggcaauagcuacccuaaacuguccaagagcuauauuaacgauaaggggaaagaagugcuuguccuguggggaauccaccaccccuccaccacagccgaccaacagucucucuaccagaaugcugaugccuacguguucgugggcaccagcagauauuccaagaaauuuaagccugagauugcuauccggccgaaaguccgcgaccaggaggggagaauuaacuacuauuggacgcugaucgaacccggagauaagauuacauucgaggccaccggcaaccugguugugccucgguacgcguuugccauggaacgcaaugcugggagcggaaucaucauuucugacacacccgugcaugauugcaacaccaccugucaaacaccugagggcgccaucaauacgucccuccccuuccagaacauucacccgaucaccauuggcaaaugcccuaaguaugucaagagcacaaaacugagacuugcuaccgggcugcggaaugugcccucuauccagagccgcggacucuuuggcgccaucgccggguucauugaaggaggcuggacagggaugguugacggaugguacggcuaucaucaccagaacgagcaaggcuccggguacgcugcggaccugaagucuacccagaaugccaucgauaaaauuacgaacaaggugaauagcgucaucgagaaaaugaacacacaguuuaccgcugugggaaaggaguucaaucaccuugagaagagaauugaaaaccugaauaaaaagguugacgauggcuuccucgacaucuggaccuacaacgccgagcugcuggugcuccuggaaaaugagcggacacuugauuaucaugacuccaacgucaaaaaccuguacgagaaggugcgcaaucagcucaaaaacaaugccaaggaaaucgggaacggauguuuugaguucuaucacaagugcgauaauaccuguauggaaagcgucaaaaacggcacauacgacuauccuaaguacucugaggaagcuaaacugaauagagagaagauugauggggugaaacuugaguccacgcggaucuaucaaauucuggccaucuacagcaccguugcgucuucccucgugcuggucgugagccugggcgcuauuuccuuuuggaugugcucuaacggaagccuccagugccgcaucuguauuuga

SEQ ID NO: 202484 - RNA, 1701 nt, Artificial Sequence; identical to SEQ ID NO: 202195
  derived and/or modified CDS sequence (opt5) from hemagglutinin__InfluenzaA__AGT18735

SEQ ID NO: 202485 - RNA, 1701 nt, Artificial Sequence
  derived and/or modified CDS sequence (opt5) from hemagglutinin__InfluenzaA__AGT18748
augaagaccaucauugcccugagcuacauccucugccugguguucgcucagaaacuucccggcaacgacaauuccacagccacgcugugucucgggcaccaugcggucccuaacggaaccauuguuaagacaaucaccaaugauagaauugaggugacaaacgcuaccgaacuggugcaaaauucuagcaucggcgagaucugcgacuccccgcaccagauucuugaugaagagaacuguacacugaucgacgcccuccugggggauccccagugcgacgauuuucagaauaaaaagugggaccuguucgucgaacggucuaaagccuauagcaacuguuacccuuaugaugugcccgacuacgcuucccuccgcucucugguugccagcuccggaacccuugaguuuaauaacgagagcuucaauugggcuggcgugacgcaaaacgggaccucuuccgccugcagacggggaagcaauucuuccuuuuucagccgccugaacuggcucacacaucugaauuuuaaguauccugcgcuuaacgucaccaugcccaacaaugaacaguucgauaagcuguacauuuggggcgugcaccauccuucuacagacaaagaucagaucuuucucuaugcccaguccagcggcagaauuaccguuuccacgaagcggucucaacaggcugugaucccgaacauugggagccgccccagaauccggaauaucccuucccgcauuagcaucuacuggacaauugucaaacccggagacauccugcugauuaacucuaccggcaaucucaucgccccuagaggguacuucaagauccgguccggaaaaagcucuauuaugcgcagcgacgcucccaucggcaaguguaaguccgagugcauuacaccgaacgggucuaucccuaaugauaaacccuuucagaacgugaauagaauuaccuauggagccuguccucgguacgugaagcagagcacccugaaacuugcgacaggcaugcgcaacguccccgaaaagcaaacgagaggcaucuucggggccaucgcuggauuuauugagaauggcugggaggggaugguugacggaugguauggcuuccggcaccagaacuccgaagggagaggacaggccgcugaucugaaaagcacccaagccgccaucgaccagauuaauggcaagcucaaccgccugaucggcaaaacaaaugagaaguuccaccagauugaaaaggaguuuucugaaguggaggggcggauccaggaucuugagaaauacguggaagacaccaagauugaucugugguccuauaacgcugagcuccuggucgcgcuggaaaaccaacauacaaucgaccucaccgauagcgagaugaauaaacuguucgaaaagacgaaaaagcagcuuagagagaacgccgaggacaugggaaauggcugcuuuaagaucuaccacaaaugugauaacgcuugcauugggucuauccgcaauggaacauaugaccaugacguguaccgggaugaagcccugaacaauagauuccagauuaagggcguugagcucaaauccggguacaaggacuggauccuguggauuagcuuugccaucuccugcuuccuucuguguguggcucuccugggcuuuaucaugugggccugccagaaaggaaacauucgcuguaauaucugcauuuga

SEQ ID NO: 202486 - RNA, 1701 nt, Artificial Sequence
  derived and/or modified CDS sequence (opt5) from hemagglutinin__InfluenzaA__AGT18749
augaagaccaucauugcccugagcuacauccucugccugguguucgcucagaaacuucccgagaacgacaauuccacagccacgcugugucucggccaccaugcggucccuaacgggaccauuguuaagacaaucaccgaugaccaaauugaagugacaaaugcuaccgagcuggugcagaacucuagcacaggagaaaucugcgauuccccgcaccagauccuugacggcgagaauuguacccugauugaugcccuccugggggacccccagugcgauggauuucaaaacaaaaagugggaccuguucgucgaaagaucuaaagccuauagcaauuguuacccuuaugaugugcccgacuacgcuucccuccggucucugguugccagcuccggcacgcuugaguuuaacaaugagagcuucaacuggaccggggugacacagaauggaaccucuuccgcuugcauccgcagaagcaacaauuccuuuuucucucggcugaacuggcucacacaucugaauuuuaaguauccugcccuuaacgucaccaugcccaacaaugaacaguucgauaagcuguacauuuggggcgugcaccauccuggcacggacaaagaucagaucuuucucuaugcgcaagccagcgggcgcauuacaguuucuaccaagagaucccagcaggcugugaucccgaacauuggaagccggccccgcgucagaaauaucccuucccggaucucuauuuacuggacaaucgugaaacccggcgacauucugcugaucaacagcaccgggaaucucauugccccucgcggauacuucagaauccgguccggccgcagcucuaucaugagauccgacgcucccauugggaaguguaacagcgagugcaucaccccgaauggaucuauuccuaacgauaaacccuuucagaaugugaaccggaucacauauggcgccuguccucgcuacgucaagcaaaauacgcugaaacuugcgaccggcaugagaaacguucccgaaaaacagacacgggggauuuucggagccaucgcuggcuuuaucgagaaugggugggagggaaugguggacggcugguauggguucagacaccagaacagcgaaggacgcggccaagccgcugaucugaaguccacccaggccgccauugaccagaucaauggcaaacucaaccggcugauugggaagacaaacgagaaauuccaccagaucgaaaaggaguuuucugaaguggagggacgcauucaagaucuugagaaauacgucgaagacaccaagaucgaucuguggagcuauaaugcugagcuccugguggcgcuggaaaaccagcauacgauugaccucacagauuccgagaugaauaagcuguucgaaaagaccaagaaacagcuuagagagaacgccgaggacaugggcaaugggugcuuuaagaucuaccacaaaugugauaacgcuugcaucggaagcauucggaauggcaccuaugaccaugacguuuacagagaugaagcccugaacaaucgcuuccagaucaaggggguggagcucaagucuggcuacaaagacuggauucuguggaucuccuuugccauuagcugcuuccuucugugugucgcucuccugggauuuaucaugugggccugccaaaagggcaacauccgguguaauauuugcaucuga

SEQ ID NO: 202487 - RNA, 1701 nt, Artificial Sequence
  derived and/or modified CDS sequence (opt5) from hemagglutinin__InfluenzaA__AGT18751
augaagaccgugaucgcccugagcuacauucucugccuggucuucgcucagaaacuucccggcaacgacaauuccacagccacgcugugucucgggcaccaugcgguuccuaacggaaccaucgugaagacaauuaccaaugaucaaaucgaggugacaaacgcuaccgaacugguccaaaauucuagcacaggcgagauuugcgacuccccgcaccagauccuugauggggaaaacuguacccugaucgacgcccuccugggagauccccagugcgacggcuuucagaauaaaaagugggaucuguucguggagagaucuaaagccuauagcaacuguuacccuuaugacguucccgauuacgcuucccuccggucucugguggccagcuccgggacgcuugaauuuaauaacgagagcuucaauuggaccggagucacacagaacggcaccucuuccgcuugcauucgcagaagcaauaacuccuuuuucucucggcugaauuggcucacacaucugaacuuuaaguauccugcccuuaacgugaccaugcccaauaacgagcaguucgacaagcuguacaucuggggcguucaccauccugggacggauaaagaccagauuuuucucuaugcgcaagccagcggacgcaucacagugucuaccaagagaucccagcaggcugucauuccgaauaucggcagccggccccgcgugagaaacauuccuucccggaucucuaucuacuggacaauugugaaacccggggauauccugcugauuaauagcaccggaaaccucaucgccccucgcggcuacuucaagauuagauccgggcggagcucuaucaugcgcuccgacgcucccaucggaaaauguaauagcgaaugcauuaccccgaacggcucuaucccuaaugacaagcccuuucagaacgucaauagaauuacauauggcgccuguccucgguacguuaagcaaaacacgcugaaacuugcgaccgggaugcgcaaugugcccgagaagcagacaagaggaaucuucggcgccauugcuggguuuaucgaaaacggaugggagggcaugguggaugggugguauggauuccggcaccagaauagcgagggcagaggccaagccgcugaccugaaauccacccaggccgccaucgaucagauuaacgggaagcucaaccgccugaucggaaaaacaaaugaaaaguuccaccagauugagaaagaauuuucugaggucgaaggccggauccaagaccuugagaaguacguggaggauaccaagauugaccuguggagcuauaaauccgaacuccugguugcucuggagaaccagcauacgaucgaucucacagacagcgaaaugaauaagcuguucgagaaaaccaagaaacagcuuagagaaaacgcggaggauauggggaauggaugcuuuaagauuuaccacaagugugacaacgccugcaucggcucuauccgcaaugggaccuaugaucaugacguguaccgggacgaggcucugaacaauagauuccagauuaaaggcgucgaacucaaguccggauacaaagauuggauccuguggauuagcuuugccaucucuugcuuccuucuguguguggcccuccugggcuuuauuaugugggcuugccaaaaggggaacauccgcuguaauaucugcauuuga

SEQ ID NO: 202488 - RNA, 1701 nt, Artificial Sequence
  derived and/or modified CDS sequence (opt5) from hemagglutinin__InfluenzaA__AGT18752
augaagaccaucauugcccugagcuacaucauuugccucguguucgcucagaaacugcccggcaacgacaauuccacagccacgcuuugucuggggcaccaugcggucccuaacggaaccaucguuaagacaauuaccaaugaucaaaucgaggugacaaacgcuaccgaacucgugcaaaauucuagcacaggcgagaucugcaacuccccgcaccagauucuggacggggaaaauuguacccuuaucgaugcccugcucggagacccccagugcgauggcuuucagaacaaaaagugggaccuguucgucgagagaucuaaagccuauagcaauuguuacccuuaugaugugcccgacuacgcuucccugcggucucucguugccagcuccgggacgcuggaauuuaacaaugagagcuucaacuggaccggagugacacagaauggcaccucuuccgcuugcauucgcagaagcaacaauuccuuuuucucucggcuuaacuggcugacacaucucaacuuuaaguauccugcccugaaugucaccaugcccaacaaugagcaguucgauaaacuuuacaucuggggcgugcaccauccugggacggacaaggaucagauuuuucuguaugcgcaagccagcggacgcaucacaguuucuaccaagagaucccagcaggcugugauuccgaacaucggcagccggccccgcgucagaaauaucccuucccggauuucuaucuacuggacaauugugaaacccggggacauccuccugauuaacagcaccggaaaucugaucgccccucgcggcuacuucaagaucagauccgggcggagcucuauuaugcgcuccgaugcucccaucggaaaauguaacagcgaaugcauuaccccgaauggcucuaucccuaacgacaagcccuuucagaaugugaacagaauuacauauggcgccuguccucgguacgucaagcaaaauacgcucaaacuggcgaccgggaugcgcaacguucccgagaagcagacaagaggaaucuucggcgccaucgcuggguuuauugaaaauggaugggagggcaugguggacgggugguauggauuccggcaccagaacagcgagggcagaggccaagccgcugaucuuaaauccacccaggccgccaucgaccagauuaacgggaagcugaaucgccucaucggaaaaacaaacgaaaaguuccaccagauugagaaagaauuuucugagguggaaggccggauccaagaucuggagaaguacgucgaggacaccaagauugaucuuuggagcuauuccagcgaacugcucguggcucuggagaaucagcauacgaucgaccugacagauucugaaaugaacaaacucuucgagaagaccaaaaagcagcugagagaaaaugcggaggacauggggaacggaugcuuuaaaaucuaccacaagugugauaaugccugcauuggcuccauccgcaacgggaccuaugaccaugauguuuaccgggacgaggcucuuaauaacagauuccagauuaagggcguggaacugaaaagcggauacaaggacuggauccucuggauuucuuuugccaucuccugcuuccugcuuugugucgcccugcucggcuuuaucaugugggcuugccaaaaagggaauauucgcuguaacaucugcauuuga

SEQ ID NO: 202489 - RNA, 1701 nt, Artificial Sequence
  derived and/or modified CDS sequence (opt5) from hemagglutinin__InfluenzaA__AGT18753
augaagaccaucauugcccugagcuacauccucugccugguguucgcucagaaacuucccggcaacgacaauuccacagccacgcugugucucgggcaccaugcggucccuaacggaaccauuguuaagacaaucaccaaugaucaaauugaggugacaaacgcuaccgaacuggugcaaaauucuagcacaggcgagaucugcaacuccccgcaccagauccuugacggggaaaauuguacccugauugaugcccuccugggagacccccagugcgauggcuuucagaacaaaaagugggaccuguucgucgagagaucuaaagccuauagcaauuguuacccuuaugaugugcccgacuacgcuucccuccggucucugguugccagcuccgggacgcuugaauuuaacaaugagagcuucaacuggaccggagugacacagaauggcaccucuuccgcuugcauccgcagaagcaacaauuccuuuuucucucggcugaacuggcucacacaucugaacuuuaaguauccugcccuuaaugucaccaugcccaacaaugagcaguucgauaagcuguacauuuggggcgugcaccauccugggacggacaaagaucagaucuuucucuaugcgcaagccagcggacgcauuacaguuucuaccaagagaucccagcaggcugugaucccgaacauuggcagccggccccgcgucagaaauaucccuucccggaucucuauuuacuggacaaucgugaaacccggggacauucugcugaucaacagcaccggaaaucucauugccccucgcggcuacuucaagaucagauccgggcggagcucuaucaugcgcuccgaugcucccauuggaaaauguaacagcgaaugcaucaccccgaauggcucuauuccuaacgacaagcccuuucagaaugugaacagaaucacauauggcgccuguccucgguacgucaagcaaaauacgcugaaacuugcgaccgggaugcgcaacguucccgagaagcagacaagaggaauuuucggcgccaucgcuggguuuaucgaaaauggaugggagggcaugguggacgggugguauggauuccggcaccagaacagcgagggcagaggccaagccgcugaucugaaauccacccaggccgccauugaccagaucaacgggaagcucaaucgccugauuggaaaaacaaacgaaaaguuccaccagaucgagaaagaauuuucugagguggaaggccggauucaagaucuugagaaguacgucgaggacaccaagaucgaucuguggagcuauaaauccgaacuccugguggcucuggagaaucagcauacgauugaccucacagauagcgaaaugaacaagcuguucgagaaaaccaagaaacagcuuagagaaaaugcggaggacauggggaacggaugcuuuaagaucuaccacaagugugauaaugccugcaucggcucuauucgcaacgggaccuaugaccaugauguuuaccgggacgaggcucugaauaacagauuccagaucaaaggcguggaacucaaguccggauacaaagacuggauucuguggaucagcuuugccauuucuugcuuccuucugugugucgcccuccugggcuuuaucaugugggcuugccaaaaggggaauauccgcuguaacauuugcaucuga

SEQ ID NO: 202490 - RNA, 1701 nt, Artificial Sequence
  derived and/or modified CDS sequence (opt5) from hemagglutinin__InfluenzaA__AGT18754
augaagaccaucauugcccugagcuacauccucugccugguguucgcucagaaacuucccgagaacgacaauuccacagccacgcugugucucggccaccaugcggucccuaacgggaccauuguuaagacaaucaccgaugaccaaauugaagugacaaaugcuaccgagcuggugcagaacucuagcacaggagaaaucugcgauuccccgcaccagauccuugacggcgagaauuguacccugauugaugcccuccugggggacccccagugcgauggauuucaaaacaaaaagugggaccuguucgucgaaagaggcaaagccuauucuaauuguuacccuuaugaugugcccgacuacgcuagccuccggucccugguugccacgucugggacccuugaguuuaacaaugagagcuucaacuggacaggagugacccagaauggcacauccagcgcuugcauccgcagaucuaacaauuccuuuuucagccggcugaacuggcucacccaucugaauuuuaaguauccugcccuuaacgucacgaugcccaacaaugaacaguucgauaagcuguacauuuggggcgugcaccauccugggacagacaaagaucagaucuuucucuaugcgcaagccucuggacgcauuaccguuuccacaaagagaagccagcaggcugugaucccgaacauuggcucucggccccgcgucagaaauaucccuucccggaucagcauuuacuggaccaucgugaaacccggggacauucugcugaucaacuccaccggaaaucucauugccccucgcggcuacuucaagaucagaucugggcggagcuccaucaugcgcagcgacgcucccauuggaaaauguaacucugagugcaucacaccgaauggcuccauuccuaacgauaagcccuuucagaaugugaacagaaucacguauggcgccuguccucgguacgucaagcaaaauacccugaaacuugcgacagggaugcgcaacguucccgaaaagcagaccagaggaauuuucggcgccaucgcuggguuuaucgagaauggaugggagggcaugguggacgggugguauggauuccggcaccagaacagcgaaggcagaggccaagccgcugaucugaaaucuacacaggccgccauugaccagaucaaugggaagcucaaccgccugauuggaaaaaccaacgagaaguuccaccagaucgaaaaagaguuuagcgaaguggagggccggauucaagaucuugagaaguacgucgaagacacgaagaucgaucugugguccuauaaugcugagcuccugguggcgcuggaaaaccagcauacaauugaccucaccgauucugagaugaauaaacuguucgaaaagaccaaaaagcagcuuagagagaacgccgaggacauggggaauggaugcuuuaaaaucuaccacaagugugauaacgcuugcaucggcagcauucgcaaugggacauaugaccaugacguuuaccgggaugaagcccugaacaauagauuccagaucaagggcguggagcucaaauccggauacaaggacuggauucuguggaucagcuuugccauuucuugcuuccuucugugugucgcucuccugggcuuuaucaugugggccugccaaaaagggaacauccgcuguaauauuugcaucuga

SEQ ID NO: 202491 - RNA, 1701 nt, Artificial Sequence
  derived and/or modified CDS sequence (opt5) from hemagglutinin__InfluenzaA__AGT18756
augaagaccaucauugcccugagcuacgugcucugccuggucuucgcucagaaacuucccggcaacgacaauuccacagccacgcugugucucgggcaccaugcgguuccuaacggaaccaucgugaagacaauuaccaaugauagaaucgaggugacaaacgcuaccgaacugguccaaaauucuagcauuggcgagaucugcgacuccccgcaccagauccuugauggggaaaacuguacacugauugacgcccuccugggagauccccagugcgacgauuuucagaauaaaaagugggaccuguucguggagcggucuaaagccuauagcaacuguuacccuuaugauguucccgacuacgcuucccuccgcucucugguggccagcuccggcacccuugaauuuaauaacgagagcuucaauugggcuggggucacgcaaaacggaaccucuuccgccugcagacggggcagcaauucuuccuuuuucagccgccugaacuggcucacacaucugaauuuuaaguauccugcgcuuaacgugaccaugcccaacaaugagcaguucgauaagcuguacaucuggggcguucaccauccugggacagacaaagaucagauuuuucucuaugcccagucuuccggaagaaucaccgugagcacgaagcggucccaacaggcugucauuccgaacaucggcucucgcccccggauuagaaauaucccuagccgcaucuccauuuacuggacaaucgugaaacccggggacauucugcugaucaacagcaccggaaaucucauugccccuagaggcuacuucaagauccggucugggaaauccagcaucaugcgcucugacgcucccauuggaaaguguaagagcgaaugcaucacaccgaacggcuccauuccuaaugauaaacccuuucagaacgugaauagaaucaccuauggcgccuguccucgguacgucaagcagucuacccugaaacuugcgacagggaugcgcaacguucccgagaagcaaacgagaggaauuuucggcgccaucgcuggguuuaucgaaaauggaugggagggcaugguggacgggugguauggauuccggcaccagaacagcgagggcagaggccaggccgcugaucugaaauccacccaagccgccauugaccagaucaaugggaagcucaaccgccugauuggaaaaacaaaugaaaaguuccaccagaucgagaaggaauuuagcgagguggaaggccggauucaggaucuugagaaauacgucgaggacaccaagaucgaucuguggucuuauaaauccgaacuccugguggcucuggagaaccaacauacaauugaccucaccgauagcgaaaugaacaagcuguucgagaaaacgaagaagcagcuuagagaaaaugcggaggacauggggaacggaugcuuuaaaaucuaccacaagugugauaaugccugcaucggcucuauucgcaacgggacauaugaccaugacguuuaccgggaugaggcucugaauaacagauuccagaucaaaggcguggaacucaaguccggauacaaagacuggauucuguggaucagcuuugccauuuccugcuuccuucugugugucgcccuccugggcuuuaucaugugggcuugccagaaggggaauauccgcuguaacauuugcaucuga

SEQ ID NO: 202492 - RNA, 1701 nt, Artificial Sequence
  derived and/or modified CDS sequence (opt5) from hemagglutinin__InfluenzaA__AGT18757
augaagaccaucauugcccugagcuacauccucugccugguguucgcucagaaacuucccggcaacgacaauuccacagccacgcugugucucgggcaccaugcggucccuaacggaaccauuguuaagacaaucaccaaugauagaauugaggugacaaacgcuaccgaacuggugcaaaauucuagcaucggcgagaucugcgacuccccgcaccagauucuugauggggaaaacuguacacugaucgacgcccuccugggagauccccagugcgacgauuuucagaauaaaaagugggaccuguucgucgagcggucuaaagccuauagcaacuguuacccuuaugaugugcccgacuacgcuucccuccgcucucugguugccagcuccggcacccuugaauuuaauaacgagagcuucaauugggcuggggugacgcaaaacggaaccucuuccgccugcagacggggcagcaauucuuccuuuuucagccgccugaacuggcucacacaucugaauuuuaaguauccugcgcuuaacgucaccaugcccaacaaugagcaguucgauaagcuguacauuuggggcgugcaccauccugggacagacaaagaucagaucuuucucuaugcccagucuuccggaagaauuaccguuagcacgaagcggucccaacaggcugugaucccgaacauuggcucucgccccagaauccggaauaucccuagccgcauuuccaucuacuggacaauugucaaacccggggacauccugcugauuaacagcaccggaaaucucaucgccccuagaggcuacuucaagauccggucugggaaauccagcauuaugcgcucugacgcucccaucggaaaguguaagagcgaaugcauuacaccgaacggcuccaucccuaaugauaaacccuuucagaacgugaauagaauuaccuauggcgccuguccucgguacgugaagcagucuacccugaaacuugcgacagggaugcgcaacguccccgagaagcaaacgagaggaaucuucggcgccaucgcuggguuuauugaaaauggaugggagggcaugguugacgggugguauggauuccggcaccagaacagcgagggcagaggccaggccgcugaucugaaauccacccaagccgccaucgaccagauuaaugggaagcucaaccgccugaucggaaaaacaaaugaaaaguuccaccagauugagaaggaauuuagcgagguggaaggccggauccaggaucuugagaaauacguggaggacaccaagauugaucuguggucuuauaacgcugaacuccuggucgcgcuggagaaccaacauacaaucgaccucaccgauuccgaaaugaauaaacuguucgagaagacgaaaaagcagcuuagagaaaacgccgaggacauggggaauggaugcuuuaagaucuaccacaaaugugauaacgcuugcauuggcagcauccgcaaugggacauaugaccaugacguguaccgggaugaggcccugaacaauagauuccagauuaagggcguugaacucaaaucuggauacaaggacuggauccuguggauuuccuuugccaucagcugcuuccuucuguguguggcucuccugggcuuuaucaugugggccugccagaaagggaacauucgcuguaauaucugcauuuga

SEQ ID NO: 202493 - RNA, 1701 nt, Artificial Sequence
  derived and/or modified CDS sequence (opt5) from hemagglutinin__InfluenzaA__AGT18758
augaagaccaucauugcccugagcuacauccucugccugguguucgcucagaaacuucccggcaacgacaauuccacagccacgcugugucucgggcaccaugcggucccuaacggaaccauuguuaagacaaucaccaaugauagaauugaggugacaaacgcuaccgaacuggugcaaaauucuagcaucggcgagaucugcgacuccccgcaccagauucuugauggggaaaacuguacacugaucgacgcccuccugggagauccccagugcgacgauuuucagaauaaaaagugggaccuguucgucgagcggucuaaagccuauagcaacuguuacccuuaugaugugcccgacuacgcuucccuccgcucucugguugccagcuccggcacccuugaauuuaauaacgagagcuucaauugggcuggggugacgcaaaacggaaccucuuccgccugcagacggggcagcaauucuuccuuuuucagccgccugaacuggcucacacaucugaauuuuaaguauccugcgcuuaacgucaccaugcccaacaaugagcaguucgauaagcuguacauuuggggcgugcaccauccugggacagacaaagaucagaucuuucucuaugcccagucuuccggaagaauuaccguuagcacgaagcggucccaacaggcugugaucccgaacauuggcucucgccccagaauccggaauaucccuagccgcauuuccaucuacuggacaauugucaaacccggggacauccugcugauuaacagcaccggaaaucucaucgccccuagaggcuacuucaagauccggucugggaaauccagcauuaugcgcucugacgcucccaucggaaaguguaagagcgaaugcauuacaccgaacggcuccaucccuaaugauaaacccuuucagaacgugaauagaauuaccuauggcgccuguccucgguacgugaagcagucuacccugaaacuugcgacagggaugcgcaacguccccgagaagcaaacgagaggaaucuucggcgccaucgcuggguuuauugaaaauggaugggagggcaugguugacgggugguauggauuccggcaccagaacagcgagggcagaggccaggccgcugaucugaaauccacccaagccgccaucgaccagauuaaugggaagcucaaccgccugaucggaaaaacaaaugaaaaguuccaccagauugagaaggaauuuagcgagguggaaggccggauccaggaucuugagaaauacguggaggacaccaagauugaucuguggucuuauuccagcgaacuccuggucgcucuggagaaccaacauacaaucgaccucaccgauucugaaaugaacaaacuguucgagaagacgaaaaagcagcuuagagaaaaugcggaggacauggggaacggaugcuuuaagaucuaccacaaaugugauaauacaugcauuggcuccauccgcaacgggaccuaugaccaugacguguaccgggaugaggcccugaauaacagauuccagauuaagggcguugaacucaaaagcggauacaaggacuggauccuguggauuuccuuugcuaucucuugcuuccuugugugugucgcccugcucggcuuuaucaugugggccugccagaaagggaauauucgcuguaacaucugcauuuga

SEQ ID NO: 202494 - RNA, 1701 nt, Artificial Sequence
  derived and/or modified CDS sequence (opt5) from hemagglutinin__InfluenzaA__AGT18759
augaagaccaucauugcccugagcuacauccucugccugguguucgcucagaaacuucccggcaacgacaauuccacagccacgcugugucucgggcaccaugcggucccuaacggaaccauuguuaagacaaucaccaaugauagaauugaggugacaaacgcuaccgaacuggugcaaaauucuagcaucggcgagaucugcgacuccccgcaccagauucuugauggggaaaacuguacacugaucgacgcccuccugggagauccccagugcgacgauuuucagaauaaaaagugggaccuguucgucgagcggucuaaagccuauagcaacuguuacccuuaugaugugcccgacuacgcuucccuccgcucucugguugccagcuccggcacccuugaauuuaauaacgagagcuucaauugggcuggggugacgcaaaacggaaccucuuccgccugcagacggggcagcaauucuuccuuuuucagccgccugaacuggcucacacaucugaauuuuaaguauccugcgcuuaacgucaccaugcccaacaaugagcaguucgauaagcuguacauuuggggcgugcaccauccugggacagacaaagaucagaucuuucucuaugcccagucuuccggaagaauuaccguuagcacgaagcggucccaacaggcugugaucccgaacauuggcucucgccccagaauccggaauaucccuagccgcauuuccaucuacuggacaauugucaaacccggggacauccugcugauuaacagcaccggaaaucucaucgccccuagaggcuacuucaagauccggucugggaaauccagcauuaugcgcucugacgcucccaucggaaaguguaagagcgaaugcauuacaccgaacggcuccaucccuaaugauaaacccuuucagaacgugaauagaauuaccuauggcgccuguccucgguacgugaagcagucuacccugaaacuugcgacagggaugcgcaacguccccgagaagcaaacgagaggaaucuucggcgccaucgcuggguuuauugaaaauggaugggagggcaugguugacgggugguauggauuccggcaccagaacagcgagggcagaggccaggccgcugaucugaaauccacccaagccgccaucgaccagauuaaugggaagcucaaccgccugaucggaaaaacaaaugaaaaguuccaccagauugagaaggaauuuagcgagguggaaggccggauccaggaucuugagaaauacguggaggacaccaagauugaucuguggucuuauuccagcgaacuccuggucgcucuggagaaccaacauacaaucgaccucaccgauucugaaaugaacaaacuguucgagaagacgaaaaagcagcuuagagaaaaugcggaggacauggggaacggaugcuuuaagaucuaccacaaaugugauaaugccugcauuggcuccauccgcaacgggacauaugaccaugacguguaccgggaugaggcucugaauaacagauuccagauuaagggcguugaacucaaaagcggauacaaggacuggauccuguggauuuccuuugccaucucuugcuuccuugugugugucgcccugcucggcuuuaucaugugggcuugccagaaagggaauauucgcuguaacaucugcauuuga

SEQ ID NO: 202495 - RNA, 1701 nt, Artificial Sequence
  derived and/or modified CDS sequence (opt5) from hemagglutinin__InfluenzaA__AGT18760
augaagaccaucauugcccugagcuacauccucugccugguguucgcucagaaacuucccggcaacgacaauuccacagccacgcugugucucgggcaccaugcggucccuaacggaaccauuguuaagacaaucaccaaugauagaauugaggugacaaacgcuaccgaacuggugcaaaauucuagcaucggcgagaucugcgacuccccgcaccagauucuugauggggaaaacuguacacugaucgacgcccuccugggagauccccagugcgacgauuuucagaauaaaaagugggaccuguucgucgagcggaacaaagccuauucuaauuguuacccuuaugaugugcccgacuacgcuagccuccgcucccugguugccucuagcggcacccuugaauuuaacaaugaguccuucaacugggcuggggugacgcaaaauggaaccagcucugccugcagacggggcuccaacagcuccuuuuucucucgccugaauuggcucacacaucugaacuuuaaguauccugcgcuuaacgucaccaugcccaauaacgagcaguucgauaagcuguacauuuggggcgugcaccauccugggacagacaaagaucagaucuuucucuaugcccagagcucuggaagaauuaccguuuccacgaagcggagccaacaggcugugaucccgaauauuggcucccgccccagaauccggaacaucccuucucgcauuagcaucuacuggacaauugucaaacccggggacauccugcugauuaauuccaccggaaaccucaucgccccuagaggcuacuucaagauccggagcgggaaaucuuccauuaugcgcagcgacgcucccaucggaaaguguaagucugaaugcauuacaccgaauggcagcaucccuaacgauaaacccuuucagaaugugaacagaauuaccuauggcgccuguccucgguacgugaagcaguccacccugaaacuugcgacagggaugcgcaauguccccgagaagcaaacgagaggaaucuucggcgccaucgcuggguuuauugaaaacggaugggagggcaugguugacgggugguauggauuccggcaccaaaauucugagggcagaggccaggccgcugaucugaaaagcacccaggccgccaucgaccagauuaacgggaagcucaaucgccugaucggaaaaacaaacgaaaaguuccaccagauugagaaggaauuuuccgagguggaaggccggauccaggaucuugagaaauacguggaggacaccaagauugaucuguggagcuauaaaucugaacuccuggucgcucuggagaaccaacauacaaucgaccucaccgauuccgaaaugaauaagcuguucgagaaaacgaagaagcagcuuagagaaaacgcggaggacauggggaauggaugcuuuaaaaucuaccacaagugugauaacgccugcauuggcagcauccgcaaugggacauaugaccaugacguguaccgggaugaggcucugaacaauagauuccagauuaaaggcguugaacucaagucuggauacaaagacuggauccuguggauuuccuuugccaucagcugcuuccuugugugugucgcccugcucggcuuuaucaugugggcuugccagaaggggaacauucgcuguaauaucugcauuuga

SEQ ID NO: 202496 - RNA, 1701 nt, Artificial Sequence
  derived and/or modified CDS sequence (opt5) from hemagglutinin__InfluenzaA__AGT18761
augaagaccaucauugcccugagcuacauccucugccugguguucgcucagaaacuucccggcaacgacaauuccacagccacgcugugucucgggcaccaugcggucccuaacggaaccauuguuaagacaaucaccaaugauagaauugaggugacaaacgcuaccgaacuggugcaaaauucuagcaucggcgagaucugcgacuccccgcaccagauucuugauggggaaaacuguacacugaucgacgcccuccugggagauccccagugcgacgauuuucagaauaaaaagugggaccuguucgucgagcggucuaaagccuauagcaacuguuacccuuaugaugugcccgacuacgcuucccuccgcucucugguugccagcuccggcacccuugaauuuaauaacgagagcuucaauugggcuggggugacgcaaaacggaaccucuuccgccugcagacggggcagcaauucuuccuuuuucagccgccugaacuggcucacacaucugaauuuuaaguauccugcgcuuaacgucaccaugcccaacaaugagcaguucgauaagcuguacauuuggggcgugcaccauccugggacagacaaagaucagaucuuucucuaugcccagucuuccggaagaauuaccguuagcacgaagcggucccaacaggcugugaucccgaacauuggcucucgccccagaauccggaauaucccuagccgcauuuccaucuacuggacaauugucaaacccggggacauccugcugauuaacagcaccggaaaucucaucgccccuagaggcuacuucaagauccggucugggaaauccagcauuaugcgcucugacgcucccaucggaaaguguaagagcgaaugcauuacaccgaacggcuccaucccuaaugauaaacccuuucagaacgugaauagaauuaccuauggcgccuguccucgguacgugaagcagucuacccugaaacuugcgacagggaugcgcaacguccccgagaagcaaacgagaggaaucuucggcgccaucgcuggguuuauugaaaauggaugggagggcaugguugacgggugguauggauuccggcaccagaacagcgagggcagaggccaggccgcugaucugaaauccacccaagccgccaucgaccagauuaaugggaagcucaaccgccugaucggaaaaacaaaugaaaaguuccaccagauugagaaggaauuuagcgagguggaaggccggauccaggaucuugagaaauacguggaggacaccaagauugaucuguggucuuauuccagcgaguuccucgucgcucuggaaaaccaacauacaaucgaccugaccgauucugaaaugaacaaacucuuugagaagacgaaaaagcagcugagagaaaaugcggaggacauggggaacggaugcuucaagaucuaccacaaaugugauaaugccugcauuggcuccauccgcaacgggacauaugaccaugacguguaccgggaugaggcucuuaauaacagauuucagauuaagggcguugaacugaaaagcggauacaaggacuggauccucuggauuuccuucgccaucucuugcuuucuggugugugucgcccuucugggcuucaucaugugggcuugccagaaagggaauauucgcuguaacaucugcauuuga

SEQ ID NO: 202497 - RNA, 1701 nt, Artificial Sequence
  derived and/or modified CDS sequence (opt5) from hemagglutinin__InfluenzaA__AGT37102
auggaggccaagcuggugguccucuucugcgcuuuuaccacacugaaagccgacaucauuuguguuggcuaccacgcgaacaauagcacggauaccguggacacaaucauggaaaagaacgugaccgucacacauuccgugaaucuucuggagaacucucacaaugggaaacucugcagccugaacggaaaggcuccccuucagcugggcaauuguaacguugccggguggauucucggaaauccugaaugcgaucugcugcucaccgccaacuccuggucuuauaucauugagacaagcuccucuaaaaauggcaccuguuacccgggggaauuuagcgacuaugaggagcugagagaacuucuguccacggugagcucuuucgagcgguucgaaaucuuucccaaggcuaccuccuggccuaaccaugagacaaccaagggagccacaaucgcuugcagccacucuggcgccuccagcuucuaccgcaaucuccuguggauugucaaaaagggcaacucuuaucccaaaaucuccaagagcuacaccaauaacagagggaaagaggugcuuguuauuuggggagugcaucacccucccacggauuccucucaacaggcgcuguaucagaacacacacaccuacaucagcgucggcuccagcaaguacuaucagcgguuuacaccugugguggccgcucgcccgaagauuagagaacaagaggggcggaugaauuacuauuggacccuccuggaacagggagacaccaucacauucgaggccacgggcaaccugauugcucccugguacgccuuugcgcucgauauggggucuuccagcggaaucauggucucugacgccccuguucauaauuguaccacaaaaugccagacaccccacggcgcucugaaaagcaaccuuccuuuccagaaugugcaucccaucaccauuggcgaauguccgaaauaugugaaguccacccaacugcgcauggccacggggcucagaaacaucccuucuauucagagccggggacuguuuggcgcuaucgccggguucauugagggaggcuggacagggaugaucgauggaugguacggcuaucaccaccagaaugagcagggcuccggguacgccgcugaccagaaaagcacccaaaucgcgauugauggaaucucuaacaaggucaauuccauuaucgaaaagaugaacgugcaguuuaccagcguuggcaaggaguucaaugaccuugaaaagcgcauugagaaccugaauaaaaagguggaugacggguuccucgacgucuggacauacaacgccgaacugcuggugcuccuggagaaugagagaacccuugauuuucaugacuucaacguuaaaaaccuguaugaaaaggugaaaucucaacuccggaauaacgcuaaggagaucggaaauggcugcuuugaguucuaccacaagugugauaacgaaugcauggaaaaugucaaaaacgggacauauaauuaccccaaguauuccgaggagagcaaacugaaccgcgaaaagaucgacggcgugaaacuugaguccauuggaguccaucagauccuggccauuuacucuacgguggccagcucccucguucugcuggugucucucggcgcuaucagcuuuuggaugugcuccaaugggagccugcaguguagaauuugcaucuga

SEQ ID NO: 202498 - RNA, 1701 nt, Artificial Sequence
  derived and/or modified CDS sequence (opt5) from hemagglutinin__InfluenzaA__AGU01877
augaaggccauccuggugguccuccuguacaccuucgcuacagccaacgcggacacgcuuugcauuggcuaucacgcuaauaacagcaccgauacaguugacaccgugcuggagaaaaaugugacagucacccauuccgugaaccuccuggaagauaagcacaaugggaaacuuuguaagcugagaggaguugcuccccuccaucugggcaaaugcaacaucgccggguggauucugggaaauccugagugugaaucucucagcacagccuccucuuggagcuacaucguggagaccuccucuagcgacaacggcacgugcuauccgggggauuuuauuaauuacgaagaacugcgggagcagcuuuccagcgucucuuccuucgaacgcuuugagaucuuccccaagaccagcucuuggccuaaccacgacuccaauaagggagugacagccgcuuguccccaugccggcgcgaaaucuuuuuauaagaaccugaucuggcucguuaaaaagggcaauagcuacccuaaacuguccaagagcuauauuaacgauaaggggaaagaagugcuuguccuguggggaauccaccaccccuccaccacaaccgaccaacagucucucuaccagaaugccgaugcuuacguguucgugggcacgagcagauauuccaagaaauuuaagccugagauugccauccggccgaaaguccgcgaccaggaggggagaaugaacuacuauuggacacugauugaacccggagauaagaucaccuucgaggcuacaggcaaccugguugugccucgguacgccuuugcgauggaacgcaaugccgggagcggaauuaucaucucugacacccccgugcaugauugcaacaccacaugucaaacgccugagggcgcuauuaauaccucccuccccuuccagaacauccacccgauuacaaucggcaaaugcccuaaguaugucaagagcaccaaacugagacuugccacagggcugcggaaugugcccucuauucagagccgcggacucuuuggcgcuaucgccggguucaucgaaggaggcuggaccgggaugguugacggaugguacggcuaucaucaccagaacgagcaaggcuccggguacgccgcugaccugaagucuacgcagaaugcgauugauaaaaucacaaacaaggugaauagcgucauugagaaaaugaacacccaguuuaccgccgugggaaaggaguucaaucaccuugagaagagaaucgaaaaccugaauaaaaagguugacgauggcuuccucgacauuuggacauacaacgcugagcugcuggugcuccuggaaaaugagcggacccuugauuaucaugacuccaacgucaaaaaccuguacgagaaggugcgcaaucagcucaaaaacaaugccaaggaaaucgggaacggauguuuugaguucuaucacaagugcgauaauacauguauggaaagcgucaaaaacggcacguacgacuauccuaaguacucugaggaagccaaacugaauagagagaagaucgauggggugaaacuugaguccacccggauuuaucaaauccuggcuauuuacagcacaguugccucuucccucgugcuggucgugagccugggcgcgaucuccuuuuggaugugcucuaacggaagccuccagugccgcauuuguaucuga

SEQ ID NO: 202499 - RNA, 1701 nt, Artificial Sequence
  derived and/or modified CDS sequence (opt5) from hemagglutinin__InfluenzaA__AGU01878
augaaggccauccugguggucaugcucuacacccuggcuacagccaacgcggacacgcuuugcauuggcuaucacgcuaauaacagcaccgauacaguugacaccgugcuggagaaaaaugugacagucacccauuccgugaaccuccuggaagauaagcacgacgggaaacuuuguaagcugagaggaguugcuccccuccaucugggcaaaugcaauaucgccggguggauucugggaaacccugagugugaaucucucagcacagccuccucuuggagcuacaucguggagaccuccggcucugauaaugggacgugcuauccgggagacuucauugauuacgaggagcugcgggagcagcuuagcuccgucagcucuuuugaacgcuucgagaucuuucccaagaccuccagcuggccuaaccacgacucuaauaagggcgugacagccgcuuguccccaugccggcgcgaaaggguucuauaagaaccugaucuggcucguuaaaaagggaaauuccuacccuaaacugagcauuucuuauaucaacgauaagggcaaggaagugcuuguccugugggggauucaccaccccuccaccacagccgaccaacagagccucuaccagaaugcugauaccuacguguuugugggaacguccagauauucuaaaaaguucaaaccugagaucgccauucggccgaagguccgcgaccaggagggcagaaugaacuacuauuggacacugguugaacccggggauaaaaucaccuuugaggcuacaggaaaucugguggugccucgguacgccuucgcgauggaacgcaacgccggcagcggcauuaucaucuccgacacccccguccaugacugcaacaccacaugucaaacgccuaagggggcuauuaauaccagccuccccuuucagaacauccacccgauuacaaucggaaaaugcccuaaguaugugaagucuaccaaacugagacuugccacaggccugcggaauguucccuccauucagagccgcggacucuucggggcuaucgccggcuuuaucgaagggggauggaccggcaugguggauggcugguacggguaucaucaccagaacgaacaaggaucuggcuacgccgcugaccuuaagagcacgcagaaugcgauugauaaaaucacaaacaaggucaauuccgugauugagaaaaugaacacccaguucaccgccguugggaaggaguuuaaucaccuugaaaagagaaucgagaaccugaauaaaaagguggacgauggauuccucgacauuuggacauacaacgcugaacugcugguccuccuggagaaugaacggacccuugauuaucaugacucuaacgugaaaaaucuguacgagaagguccgcaaccagcucaaaaacaaugccaaggagaucggcaacggguguuucgaauuuuaucacaagugcgauaauacauguauggagagcgugaaaaacggcacguacgacuauccuaaguacuccgaagaggccaaacugaauagagaagagaucgauggaguuaagcuggagagcacccggauuuaucaaauccuggcuauuuacucuacagccgcguccagccucgugcuggucgugucucugggcgcuaucuccuucuggaugugcagcaacgggucccuccagugccgcauuuguaucuga

SEQ ID NO: 202500 - RNA, 1701 nt, Artificial Sequence
  derived and/or modified CDS sequence (opt5) from hemagglutinin__InfluenzaA__AGU01879
augaaggccauccugguggucaugcucuacaccuucgcuacagccaacgcggacacgcugugcauuggcuaucacgcuaauaacagcaccgauacaguugacaccgugcuugagaaaaaugugacagucacccauuccgugaaccugcucgaagauaagcacaaugagaaacuguguaaacuuagagggguugcuccccugcaucucggaaagugcaacaucgccggcuggauucuggggaauccugaaugugagucucugagcacagccuccucuuggagcuacaucguggaaaccuccggaucugacaacggcacgugcuauccgggggauuuuauugacuacgaggagcuccgggaacagcugagcuccgucagcucuuucgagcgcuuugaaaucuuccccaagaccuccagcuggccuaaucacgauucuaacaagggagugacagccgcuuguccccaagccggcgcgaaaggcuuuuauaagaaucuuaucuggcugguuaaaaaggggaacuccuacccuaaacucagcaagucuuauauuaaugacaagggaaaagaggugcugguccuuuggggcauccaucaccccuccaccacagccgaucagcagagccuguaccagaacgcugacaccuacguguucguggggacguccagauauucuaagaaauuuaagccugagauugccauccggccgaaaguccgcgaucaagaaggaagaaugaauuacuauuggacacucguugagcccggcgacaagauuaccuucgaagcuacagggaaccugguggugccucgguacgccuuugcgauggagcgcaacgccggaagcggcaucauuaucuccgauacccccguccacgacugcaauaccacaugucagacgccuaaaggcgcuaucaacaccagccugcccuuccagaauauucauccgaucacaauugggaagugcccuaaguaugugaaaucuaccaagcucagacuggccacaggacuucggaacguucccuccauccagagccgcggccuguuuggggcuauugccggauucaucgaaggcggguggaccggaaugguggacggcugguacggcuaucaccaucaaaaugagcaggggucuggauacgccgcugaucucaaaagcacgcagaacgcgaucgacaagauuacaaauaaagucaacuccgugaucgagaagaugaauacccaguuuaccgccguuggcaaggaauuuaaccaccuggagaaaagaauugaaaaucuuaacaagaaaguggaugacggguuccuggauaucuggacauacaaugcugagcuccugguccugcucgaaaacgagcggacccuggacuaucacgauucuaaugugaagaaccuuuacgagaaaguccgcaaccaacugaagaauaacgccaaggaaauuggaaauggcuguuucgaguucuaucauaaaugcgacaacacauguauggaaagcgugaagaaugggacguacgauuauccuaaauacuccgaggaagccaagcucaacagagaggagaucgacggcguuaaacuggaaagcacccggaucuaucagauucuugcuaucuacucuacaguggccuccagccugguccucgugguuucucugggagcgauuuccuuuuggaugugcagcaauggcucccugcagugccgcaucuguauuuga

SEQ ID NO: 202501 - RNA, 1701 nt, Artificial Sequence
  derived and/or modified CDS sequence (opt5) from hemagglutinin__InfluenzaA__AGU01881
augaaggccauccuggugguccuccuguacaccuucgcuacagccaacgcggacacgcuuugcauuggcuaucacgcuaauaacagcaccgauacaguugacaccgugcuggagaaaaaugugacagucacccauuccgugaaccuccuggaagauaagcacaaugggaaacuuuguaagcugagaggaguuacaccccuccaucugggcaaaugcaacaucgccggguggauucugggaaauccugagugugaaucucucagcaccgccuccucuuggagcuacaucguggagacguccucuagcgacaacggaaccugcuauccgggggauuuuauuaauuacgaagaacugcgggagcagcuuuccagcgucucuuccuucgaacgcuuugagauguuccccaagacaagcucuuggccuaaccacgacuccaauaagggagugaccgcugccuguccccaagcuggcgccaagagcuuuuauaaaaaccugaucuggcucguuaaaaagggcaauucuuacccuaaacuguccaagagcuauaucaacgauaaggggaaagaagugcuuguccuguggggcauucaucaccccuccacaaccgcggaccagcagucucucuaccagaaugccgaugcuuacguguucgugggcacgagcagauauuccaagaaauuuaagccugagaucgccauucggccgaaaguccgcgaccaagaggggagaaugaacuacuauuggacacugaucgaacccggagauaagauuaccuucgaggcuacaggcaaccugguugugccucgguacgccuuugcgauggaacgcaaugccgggagcggaaucauuaucucugacacccccgugcacgauugcaacaccacaugucagacgccugagggcgcuaucaauaccucccuccccuuccagaacauucauccgaucacaauuggcaaaugcccuaaguaugucaagagcaccaaacugagacuugccacagggcugcggaaugugcccucuauccagagccgcggacucuuuggcgcuauugccggguucaucgaaggaggcuggaccgggaugguugacggaugguacggcuaucaccaucaaaacgagcagggcuccggguacgccgcugaccugaagucuacgcagaaugcgaucgauaaaauuacaaacaaggugaauagcgucaucgagaaaaugaacacccaguuuaccgccgugggaaaggaguucaaucaccuugagaagagaauugaaaaccugaauaaaaagguugacgauggcuuccucgacaucuggacauacaacgcugagcugcuggugcuccuggaaaaugagcggacccuugauuaucacgacuccaacgucaaaaaccuguacgagaaggugcgcaaucaacucaaaaacaaugccaaggaaauugggaacggauguuuugaguucuaucauaagugcgauaauacauguauggaaagcgucaaaaacggcacguacgacuauccuaaguacucugaggaagccaaacugaauagagagaagaucgauggggugaaacuugaguccacccggaucuaucagauucuggcuaucuacagcacaguugccucuucccucgugcuggucgugagccugggcgcgauuuccuuuuggaugugcucuaacggaagccuccagugccgcaucuguauuuga

SEQ ID NO: 202502 - RNA, 1701 nt, Artificial Sequence
  derived and/or modified CDS sequence (opt5) from hemagglutinin__InfluenzaA__AGU01883
augaaggccauccugguggucaugcucuacaccuucgcuacagccaacgcggacacgcugugcauuggcuaucacgcuaauaacagcaccgauacaguugacaccgugcuugagaaaaaugugacagucacccauuccgugaaccugcucgaagauaagcacaaugggaaacuguguaaacuuagaggaguugcuccccugcaucucggcaagugcaacaucgccggguggauucugggaaauccugagugugaaucucugagcacagccuccucuuggagcuacaucguggagaccuccggcucugacaacgggacgugcuauccgggagauuuuauugacuacgaagaacuccgggagcagcugagcuccgucagcucuuucgaacgcuuugagaucuuccccaagaccuccagcuggccuaaucacgauucuaacaagggcgugacagccgcuuguccccaugccggcgcgaaaggguuuuauaagaaucuuaucuggcugguuaaaaagggaaacuccuacccuaaacucagcauuucuuauaucaauaacaaggaaaaggaggugcugguccuuuggggcauucaccaccccuccaccacagccgaccaacagagccuguaccagaaugcugauaccuacguguucguggggacguccagauauucuaaaaaguuuaaaccugagaucgccauucggccgaagguccgcgaccaggaaggaagaaugaacuacuauuggacacucguugagcccggcgauaaaaucaccuucgaagcuacagggaaccugguggugccucgguacgccuuugcgauggagcgcaaugccggaagcggcauuaucaucuccgacacccccguccaugauugcaacaccacaugucaaacgccuaagggcgcuauuaauaccagccugcccuuccagaacauccacccgauuacaaucgggaaaugcccuaaguaugugaagucuaccaaacucagacuggccacaggacuucggaauguucccuccauucagagccgcggccuguuuggggcuaucgccggauucaucgaaggcggguggaccggaaugguggacggcugguacggcuaucaucaccagaacgagcaagggucuggauacgccgcugaccucaagagcacgcagaaugcgauugauaaaaucacaaacaaggucaauuccgugauugagaaaaugaacacccaguuuaccgccguuggcaaggaguucaaucaccuggagaagagaaucgaaaaccuuaauaaaaagguggacgauggguuccuggacauuuggacauacaacgcugagcuccugguccugcucgaaaaugagcggacccuggauuaucaugacucuaacgugaaaaaccuuuacgagaagguccgcaaucagcugaaaaacaaugccaaggaaaucggaaacggcuguuuugaguucuaucacaagugcgauaauacauguauggaaagcgugaaaaacgggacguacgacuauccuaaguacuccgaggaagccaaacucaauagagaggagaucgauggcguuaagcuggaaagcacccggauuuaucaaauccuugcuauuuacucuacagccgcguccagccuggugcucgucgugucucugggagcuaucuccuuuuggaugugcagcaacggcucccugcagugccgcauuuguaucuga

SEQ ID NO: 202503 - RNA, 1701 nt, Artificial Sequence; identical to SEQ ID NO: 202132
  derived and/or modified CDS sequence (opt5) from hemagglutinin__InfluenzaA__AGU01884

SEQ ID NO: 202504 - RNA, 1701 nt, Artificial Sequence
  derived and/or modified CDS sequence (opt5) from hemagglutinin__InfluenzaA__AGU01885
augaaggccauccugguggucaugcucuacaccuucgcuacagccaacgcggacacgcugugcauuggcuaucacgcuaauaacagcaccgauacaguugacaccgugcuugagaaaaaugugacagucacccauuccgugaaccugcucgaagauaagcacaaugagaaacuguguaaacuuagagggguugcuccccugcaucucggaaagugcaacaucgccggcuggauucuggggaauccugaaugugagucucugagcacagccuccucuuggagcuacaucguggaaaccuccggaucugacaacggcacgugcuauccgggggauuuuauugacuacgaggagcuccgggaacagcugagcuccgucagcucuuucgagcgcuuugaaaucuuccccaagaccuccagcuggccuaaucacgauucuaacaagggagugacagccgcuuguccccaagccggcgcgaaaggcuuuuauaagaaucuuaucuggcugguuaaaaaggggaacuccuacccuaaacucagcaagucuuauauuaaugacaagggaaaagaggugcugguccuuuggggcauccaucaccccuccaccacagccgaucagcagagccuguaccagaacgcugacaccuacguguucguggggacguccagauauucuaagaaauuuaagccugagauugccauccggccgaaaguccgcgaucaagaaggaagaaugaauuacuauuggacacucguugagcccggcgacaagauuaccuucgaagcuacagggaaccugguggugccucgguacgccuuugcgauggagcgcaacgccggaagcggcaucauuaucuccgauacccccguccacgacugcaauaccacaugucagacgccuaaaggcgcuaucaacaccagccugcccuuccagaaugugcauccgauuacaaucgggaagugcccuaaguauguuaaaucuaccaagcucagacuggccacaggacuucggaacgugcccuccauucagagccgcggccuguuuggggcuaucgccggauucauugaaggcggguggaccggaauggucgacggcugguacggcuaucaccaucaaaaugagcaggggucuggauacgccgcugaucucaaaagcacgcagaacgcgaucgacaagaucacaaauaaagugaacuccguuauugagaagaugaauacccaguuuaccgccgugggcaaggaauuuaaccaccuggagaaaagaaucgaaaaucuuaacaagaaagucgaugacggguuccuggauauuuggacauacaaugcugagcuccuggugcugcucgaaaacgagcggacccuggacuaucacgauucuaaugucaagaaccuuuacgagaaagugcgcaaccaacugaagaauaacgccaaggaaaucggaaauggcuguuucgaguucuaucauaaaugcgacaacacauguauggaaagcguuaagaaugggacguacgauuauccuaaauacuccgaggaagccaagcucaacagagaggagauugacggcgugaaacuggaaagcacccggaucuaucagauccuugcuauuuacucuacagucgccuccagccuggugcucguugugucucugggagcgaucuccuuuuggaugugcagcaauggcucccugcagugccgcauuuguaucuga

SEQ ID NO: 202505 - RNA, 1701 nt, Artificial Sequence
  derived and/or modified CDS sequence (opt5) from hemagglutinin__InfluenzaA__AGU01887
augaaggccauccuggugguccuccuguacaccuucgcuacagccaacgcggacacgcuuugcauuggcuaucacgcuaauaacagcaccgauacaguugacaccgugcuggagaaaaaugugacagucacccauuccgugaaccuccuggaagauaagcacaaugggaaacuuuguaagcugagaggaguugcuccccuccaucugggcaaaugcaacaucgccggguggauucugggaaauccugagugugaaucucucagcacagccuccucuuggagcuacaucguggagaccuccucuagcgacaacggcacgugcuauccgggggauuuuauuaauuacgaagaacugcgggagcagcuuuccagcgucucuuccuucgaacgcuuugagaucuuccccaagaccagcucuuggccuaaccacgacuccaauaagggagugacagccgcuuguccccaugccggcgcgaaaucuuuuuauaagaaccugaucuggcucguuaaaaagggcaauagcuacccuaaacuguccaagagcuauauuaacgauaaggggaaagaagugcuuguccuguggggaauccaccaccccuccaccacagccgaccaacagucucucuaccagaaugcugaugccuacguguucgugggcaccagcagauauuccaagaaauuuaagccugagauugcuauccggccgaaaguccgcgaccaggaggggagaaugaacuacuauuggacgcugauugaacccggagauaagaucacauucgaggccaccggcaaccugguugugccucgguacgcguuugccguggaacgcaaugcugggagcggaauuaucaucucugacacacccguccauaacugcaauaccaccugucaaacaccugagggcgccauuaacacgucccuccccuuccagaauauccacccgauuaccaucggcaaaugcccuaaguauguuaagagcacaaaacugagacuugcuaccgggcugcggaacgugcccucuauucagagccgcggacucuuuggcgccaucgccggguucaucgaaggaggcuggacagggaugguggauggaugguacggcuaucaucaccagaaugagcaaggcuccggguacgcugcggaccugaagucuacccagaacgccauugacaaaaucacgaauaaggucaacagcgugauugagaaaaugaauacacaguuuaccgcuguuggaaaggaguucaaccaccuugagaagagaaucgaaaaucugaacaaaaagguggaugacggcuuccucgauauuuggaccuacaaugccgagcugcugguccuccuggaaaacgagcggacacuugacuaucaugauuccaacgugaaaaaucuguacgagaagguccgcaaccagcucaaaaauaacgccaaggaaaucgggaauggauguuuugaguucuaucacaagugcgacaacaccuguauggaaagcgugaaaaauggcacauacgauuauccuaaguacucugaggaagcuaaacugaacagagagaagaucgacgggguuaaacuugaguccacgcggauuuaucaaauccuggccauuuacagcaccguggcgucuucccucguccuggugguuagccugggcgcuaucuccuuuuggaugugcucuaauggaagccuccagugccgcauuuguaucuga

SEQ ID NO: 202506 - RNA, 1701 nt, Artificial Sequence
  derived and/or modified CDS sequence (opt5) from hemagglutinin__InfluenzaA__AGU01888
augaaggccauccugguggucaugcucuacaccuucgcuacagccaacgcggacacgcugugcauuggcuaucacgcuaauaacagcaccgauacaguugacaccgugcuugagaaaaaugugacagucacccauuccgugaaccugcucgaagauaagcacaaugggaaacuguguaaacuuagaggaguugcuccccugcaucucggcaagugcaacaucgccggguggauucugggaaauccugagugugaaucucugagcacagccuccucuuggagcuacaucguggagaccuccggcucugacaacgggacgugcuauccgggagauuuuauugacuacgaggagcuccgggagcagcugagcuccgucagcucuuucgaacgcuuugagaucuuccccaagaccuccagcuggccuaaucacgauucuaacaagggcgugacagccgcuuguccccaagccggcgcgaaaggguuuuauaagaaucuuaucuggcugguuaaaaagggaaacuccuacccuaaacucagcaagucuuauauuaaugacaagggcaaagaagugcugguccuuugggggauccaucaccccuccaccacagccgaucagcagagccuguaccagaacgcugacaccuacguguucgugggaacguccagauauucuaagaaauuuaagccugagauugccauccggccgaaaguccgcgaucaagagggcagaaugaauuacuauuggacacucguugaacccggggacaagauuaccuucgaggcuacaggaaaccugguggugccucgguacgccuuugcgauggaacgcaacgccggcagcggcaucauuaucuccgauacccccguccacgacugcaauaccacaugucagacgccuaaaggggcuaucaacaccagccugcccuuccagaauauucauccgaucacaauuggaaagugcccuaaguaugugaaaucuaccaagcucagacuggccacaggccuucggaacguucccuccauccagagccgcgggcuguuuggagcuauugccggcuucaucgaagggggauggaccggcaugguggacggcugguacggguaucaccaucaaaaugaacagggaucuggcuacgccgcugaucucaaaagcacgcagaacgcgaucgacaagauuacaaauaaagucaacuccgugaucgagaagaugaauaccagauuuaccgccguugggaaggaguucaaccaccuggaaaaacggauugagaaucuuaacaagaaaguggaugacggauuccuggauaucuggacauacaaugcugaacuccugguccugcucgagaacgaacgcacccuggacuaucacgauucuaaugugaagaaccuuuacgagaaagucagaaaccagcugaagaauaacgccaaggagauuggcaauggguguuuugaguucuaucauaaaugcgacaacacauguauggaaagcgugaagaauggcacguacgauuauccuaaauacuccgaagaggccaagcucaaccgggaagagaucgacggaguuaaacuggagagcacccgcaucuaucaaauucuugcuaucuacucuacaguggccuccagccugguccucgugguuucucugggcgcgauuuccuuuuggaugugcagcaaugggucccugcagugcagaaucuguauuuga

SEQ ID NO: 202507 - RNA, 1701 nt, Artificial Sequence; identical to SEQ ID NO: 202498
  derived and/or modified CDS sequence (opt5) from hemagglutinin__InfluenzaA__AGU01889

SEQ ID NO: 202508 - RNA, 1701 nt, Artificial Sequence
  derived and/or modified CDS sequence (opt5) from hemagglutinin__InfluenzaA__AGU01890
augaaggccauccugguggucaugcucuacaccuucgcuacagccaacgcggacacgcugugcauuggcuaucacgcuaauaacagcaccgauacaguugacaccgugcuugagaaaaaugugacagucacccauuccgugaaccugcucgaagauaagcacaaugggaaacuguguaaacuuagaggaguugcuccccugcaucucggcaaaugcaacaucgccggguggauucugggaaauccugagugugaaucucugagcacagccuccucuuggagcuacaucguggagaccuccggcucugacaacgggacgugcuauccgggagauuuuauugacuacgaggagcuccgggagcagcugagcuccgucagcucuuucgaacgcuuugagaucuuccccaagaccuccagcuggccuaaucacgauucuaacaagggcgugacagccgcuuguccccaagccggcgcgaaaggguuuuauaagaaucuuaucuggcugguuaaaaagggaaacuccuacccuaaacucagcaagucuuauauuaaugacaagggcaaagaagugcugguccuuugggggauccaucaccccuccaccacagccgaucagcagagccuguaccagaacgcugacaccuacguguucgugggaacguccagauauucuaagaaauuuaagccugagauugccauccggccgaaaguccgcgaucaagagggcagaaugaauuacuauuggacacucguugaacccggggacaagauuaccuucgaggcuacaggaaaccugguggugccucgguacgccuuugcgauggaacgcaacgccggcagcggcaucauuaucuccgauacccccguccacgacugcaauaccacaugucagacgccuaaaggggcuaucaacaccagccugcccuuccagaauauucauccgaucacaauuggaaagugcccuaaguaugugaaaucuaccaagcucagacuggccacaggccuucggaacguucccuccauccagagccgcgggcuguuuggagcuauugccggcuucaucgaagggggauggaccggcaugguggacggcugguacggguaucaccaucaaaaugaacagggaucuggcuacgccgcugaucucaaaagcacgcagaacgcgaucgacaagauuacaaauaaagucaacuccgugaucgagaagaugaauacccaguuuaccgccguugggaaggaguucaaccaccuggaaaagagaauugagaaucuuaacaagaaaguggaugacggauuccuggauaucuggacauacaaugcugaacuccugguccugcucgagaacgaacggacccuggacuaucacgauucuaaugugaagaaccuuuacgagaaaguccgcaaccaacugaagaauaacgccaaggagauuggcaauggguguuuugaguucuaucauaaaugcgacaacacauguauggaaagcgugaagaauggcacguacgauuauccuaaauacuccgaagaggccaagcucaacagagaagagaucgacggaguuaaacuggagagcacccggaucuaucagauucuugcuaucuacucuacaguggccuccagccugguccucgugguuucucugggcgcgauuuccuuuuggaugugcagcaaugggucccugcagugccgcaucuguauuuga

SEQ ID NO: 202509 - RNA, 1701 nt, Artificial Sequence
  derived and/or modified CDS sequence (opt5) from hemagglutinin__InfluenzaA__AGU92645
augaaggccauccuggugguccuccuguacaccuucgcuacagccaacgcggacacgcuuugcauuggcuaucacgcuaauaacagcaccgauacaguugacaccgugcuggagaaaaaugugacagucacccauuccgugaaccuccuggaagauaagcacaaugggaaacuuuguaagcugagaggaguugcuccccuccaucugggcaaaugcaacaucgccggguggauucugggaaauccugagugugaaacacucucuaccgccagcuccuggucuuacaucguggagacgagcuccucugacaacgggaccugcuauccgggcgauuuuauugacuacgaagaacugcgggagcagcuuagcuccgucagcucuuucgaacgcuuugagaucuuccccaagacauccagcuggccuaaucacgauucuaacaagggagugaccgccgcuuguccccaugccggcgcgaaaggcuuuuauaagaaucugaucuggcucguuaaaaaggggaacuccuacccuaaacugagcaagucuuauauuaaugacaagggaaaagaagugcuuguccuguggggcauccaccaccccuccacaaccgccgaucaacagagccucuaccagaacgcugacacguacguguucguggggacauccagauauucuaagaaauuuaagccugagauugagacccggccgaaaguccgcgaucaggaaggaagaaugaauuacuauuggacacugguugagcccggcgacaagaucaccuucgaagccaccgggaaccugguggugccucgguacgcuuuugccauggagcgcgaugcgggaagcggcauuaucauuuccgacacacccguccaugacugcaacacgaccugucaaacaccuaaaggcgccaucaauaccagccuccccuuccagaacauccacccgauuacaaucgggaagugcccuaaguaugugaaaucuaccaagcugagacuugcuacgggacugcggaauguucccuccauucagagccgcggccucuuuggggccaucgcuggauucauugaaggcggguggacaggaaugguggauggcugguacggcuaucaucaccagaacgagcaagggucuggauacgccgccgaccugaaaagcacccagaaugcuaucgauaagaucaccaacaaagucaauuccgugauugagaagaugaacacacaguuuaccgcgguuggcaaggaguucaaucaccuugagaaaagaaucgaaaaccugaauaagaaaguggacgauggguuccucgacauuuggacauacaacgccgagcugcugguccuccuggaaaaugagcggacgcuugauuaucaugacucuaacgugaagaaucuguacgagaaaguccgcaaccagcucaagaacaaugcuaaggaaaucggaaacggcuguuuugaguucuaucacaaaugcgauaauaccuguauggaaagcgugaagaacgggacauacgacuauccuaaauacuccgaggaagccaagcugaauagagaggagauugauggcguuaaacuugaaagcacccggaucuaucaaauccuggccauuuacucuacagcugccuccagccucgugcuggucgugucucugggagcgaucuccuuuuggaugugcagcaacggcucccuccagugccgcauuuguaucuga

SEQ ID NO: 202510 - RNA, 1701 nt, Artificial Sequence
  derived and/or modified CDS sequence (opt5) from hemagglutinin__InfluenzaA__AGU92667
augaaggccauccuggugguccuccuguacaccuucgcuacagccaacgcggacacgcuuugcauuggcuaucacgcuaauaacagcaccgauacaguugacaccgugcuggagaaaaaugugacagucacccauuccgugaaccuccuggaagauaagcacaaugggaaacuuuguaagcugagaggaguugcuccccuccaucugggcaaaugcaacaucgccggguggauucugggaaauccugagugugaaacacucucuaccgccagcuccuggucuuacaucguggagacgagcuccucugacaacgggaccugcuauccgggcgauuuuauugacuacgaagaacugcgggagcagcuuagcuccgucagcucuuucgaacgcuuugagaucuuccccaagacauccagcuggccuaaucacgauucuaacaagggagugaccgccgcuuguccccaugccggcgcgaaaggcuuuuauaagaaucugaucuggcucguuaaaaaggggaacuccuacccuaaacugagcaagucuuauauuaaugacaagggaaaagaagugcuuguccuguggggcauccaccaccccuccacaaccgccgaucaacagagccucuaccagaacgcugacacguacguguucguggggacauccagauauucuaagaaauuuaagccugagauugccacccggccgaaaguccgcgaucaggagggaagaaugaauuacuauuggacacugguugaacccggcgacaagaucaccuucgaggcuaccgggaaccugguggugccucgguacgccuuugcgauggaacgcgaugccggaagcggcauuaucauuuccgacacacccguccaugacugcaacacgaccugucaaacaccuaaaggcgcuaucaauaccagccuccccuuccagaacauccacccgauuacaaucgggaagugcccuaaguaugugaaaucuaccaagcugagacuugccacgggacugcggaauguucccuccauucagagccgcggccucuuuggggcuaucgccggauucauugagggcggguggacaggaaugguggauggcugguacggcuaucaucaccagaacgaacaagggucuggauacgccgcugaccugaaaagcacccagaaugcgaucgauaagaucaccaacaaagucaauuccgugauugagaagaugaacacacaguuuaccgccguuggcaaggaguucaaucaccuugagaaaagaaucgagaaccugaauaagaaaguggacgauggguuccucgacauuuggacauacaacgcugaacugcugguccuccuggagaaugaacgggcccuugauuaucaugacucuaacgugaagaaucuguacgagaaaguccgcaaccagcucaagaacaaugccaaggagaucggaaacggcuguuuugaguucuaucacaaaugcgauaauacguguauggaaagcgugaagaacgggaccuacgacuauccuaaauacuccgaagaggcuaagcugaauagagaagagauugauggcguuaaacuugagagcacacggaucuaucaaauccuggccauuuacucuaccgcggcuuccagccucgugcuggucgugucucugggagccaucuccuuuuggaugugcagcaacggcucccuccagugccgcauuuguaucuga

SEQ ID NO: 202511 - RNA, 1701 nt, Artificial Sequence
  derived and/or modified CDS sequence (opt5) from hemagglutinin__InfluenzaA__AGU92678
augaaggccauccuggugguccuccuguacaccuucgcuacagccaacgcggacacgcuuugcauuggccaccaugcuaauaacagcaccgauacaguugacaccgugcuggagaaaaaugugacagucacccacuccgugaaccuccuggaagauaagcauaaugggaaacuuuguaagcugagaggaguugcuccccuccaccugggcaaaugcaacaucgccggguggauucugggaaauccugagugugaaacacucucuaccgccagcuccuggucuuauaucguggagacgagcuccucugacaacgggaccugcuacccgggcgauuuuauugacuaugaagaacugcgggagcagcuuagcuccgucagcucuuucgaacgcuuugagaucuuccccaagacauccagcuggccuaaucaugauucuaacaagggagugaccgccgcuuguccccacgccggcgcgaaaggcuuuuacaagaaucugaucuggcucguuaaaaaggggaacuccuauccuaaacugagcaagucuuacauuaaugacaagggaaaagaagugcuuguccuguggggcauccaccaucccuccacaaccgccgaucaacagagccucuaucagaacgcugacacguacguguucguggggacauccagauacucuaagaaauuuaagccugagauugccacccggccgaaaguccgcgaucaggagggaagaaugaauuauuacuggacacugguugaacccggcgacaagaucaccuucgaggcuaccgggaaccugguggugccucgguaugccuuugcgauggaacgcgaugccggaagcggcauuaucauuuccgacacacccguccacgacugcaacacgaccugucaaacaccuaaaggcgcuaucaauaccagccuccccuuccagaacauccauccgauuacaaucgggaagugcccuaaguacgugaaaucuaccaagcugagacuugccacgggacugcggaauguucccuccauucagagccgcggccucuuuggggcuaucgccggauucauugagggcggguggacaggaaugguggauggcugguauggcuaccaccaccagaacgaacaagggucuggauaugccgcugaccugaaaagcacccagaaugcgaucgauaagaucaccaacaaagucaauuccgugauugagaagaugaacacacaguuuaccgccguuggcaaggaguucaaucaucuugagaaaagaaucgagaaccugaauaagaaaguggacgauggguuccucgacauuuggacauacaacgcugaacugcugguccuccuggagaaugaacggacgcuugauuaccacgacucuaacgugaagaaucuguaugagaaaguccgcaaccagcucaagaacaaugccaaggagaucggaaacggcuguuuugaguucuaccauaaaugcgauaauaccuguauggaaagcgugaagaacgggacauaugacuacccuaaauauuccgaagaggccaagcugaauagagaagagauugauggcguuaaacuugagagcacccggaucuaccaaauccuggcuauuuauucuacagccgcguccagccucgugcuggucgugucucugggagcuaucuccuuuuggaugugcagcaacggcucccuccagugccgcauuuguaucuga

SEQ ID NO: 202512 - RNA, 1701 nt, Artificial Sequence
  derived and/or modified CDS sequence (opt5) from hemagglutinin__InfluenzaA__AGU92711
augaaggccauccuggugguccuccuguacaccuucgcuacagccaacgcggacacgcuuugcauuggcuaucacgcuaauaacagcaccgauacaguugacaccgugcuggagaaaaaugugacagucacccauuccgugaaccuccuggaagauaagcacaaugggaaacuuuguaagcugagaggaguugcuccccuccaucugggcaaaugcaacaucgccggguggauucugggaaauccugagugugaaucucucagcacagccuccucuuggagcuacaucguggagaccuccucuagcgacaacggcacgugcuauccgggggauuuuauugacuacgaagaacugcgggagcagcuuuccagcgucucuuccuucgaacgcuuugagaucuuccccaagaccagcucuuggccuaaucacgauuccaacaagggagugacagccgcuuguccccaugccggcgcgaaaucuuuuuauaagaaucugaucuggcucguuaaacaaggcaacagcuacccuaagcuguccaaaagcuauauuaaugacaaggggaaggaagugcuuguccuguggggaauccaccaccccuccaccucugccgaucagcagagccucuaccagaacgcugacgccuacguguucgugggcuccagcagauauucuaaaaaguuuaaaccugagauugcuauccggccgaagguccgcgaucaagaggggagaaugaauuacuauuggacacugguugaacccggagacaaaauuaccuucgaggccacgggcaaccugguggugccucgguacgcguuugccauggaacgcaacgcuggguccggaaucauuaucagcgauacacccguccaugacugcaauaccacaugucagaccccuaagggcgccaucaacaccucucuccccuuccagaauauucacccgaucacaauuggcaaaugcccuaaguauguuaagagcacgaaacugagacuugcuaccgggcugcggaacgugcccuccauccagucucgcggacucuuuggcgccauugccggguucaucgagggaggcuggacagggaugguggacggaugguacggcuaucaucaccaaaaugaacagggcagcggguacgcugcggaucugaaguccacccagaacgccaucgacgagauuacaaauaaagucaacagcgugaucgagaagaugaauacccaguuuacggcuguuggaaaagaguucaaccaccuugagaagagaauugaaaaucugaacaagaaaguggaugacggcuuccucgauaucuggacauacaaugccgagcugcugguccuccuggaaaacgagcggacccuugacuaucaugauucuaaugugaagaaccuguacgagaaaguccgcucccaacucaagaacaaugccaaagaaauugggaacggauguuuugaguucuaucacaagugcgacaauaccuguauggaaagcgugaagaacggcacauacgauuauccuaaauacucugaggaagcuaagcugaauagagaggagaucgacgggguuaaacuugaauccacccggaucuaucagauucuggccaucuacagcacaguggcguccucucucguccuggugguuagccugggcgcuauuuccuuuuggaugugcucuaacggaagccuccagugccgcaucuguauuuga

SEQ ID NO: 202513 - RNA, 1701 nt, Artificial Sequence
  derived and/or modified CDS sequence (opt5) from hemagglutinin__InfluenzaA__AGU92722
augaaggccauccuggugguccuccuguacaccuucgcuacagccaacgcggacacgcuuugcauuggcuaucacgcuaauaacagcaccgauacaguugacaccgugcuggagaagaaugugacagucacccauuccgugaaccuccuggaagauaagcacaaugggaaacuuuguaagcugagaggaguugcuccccuccaucugggcaaaugcaacaucgccggguggauucugggaaauccugagugugaaucucucagcacagccuccucuuggagcuacaucguggagaccuccucuagcgacaacggcacgugcuauccgggggauuuuauugacuacgaagaacugcgggagcagcuuuccagcgucucuuccuucgaacgcuuugagaucuuccccaagaccagcucuuggccuaaucacgauuccgacaagggagugacagccgcuuguccccaugccggcgcgaaaucuuuuuauaagaaccugaucuggcucguuaaaaagggcaauagcuacccuaaacuguccaagagcuauauuaacgauaaggggaaagaagugcuuguccuguggggaauccaccaccccuccaccucugccgaccaacagagccucuaccagaaugcugaugccuacguguucgugggcuccagcagauauucuaagaaauuuaagccugagauugcuauccggccgaaaguccgcgaccaggaggggagaaugaacuacuauuggacacugguugaacccggagauaagauuaccuucgaggccacgggcaaucugguggugccucgguacgcguuugccauggaacgcaacgcuggguccggaaucauuaucagcgacacacccguccaugacugcaacaccacaugucaaaccccuaaaggcgccaucaauaccucucuccccuuccagaacauucacccgaucacaauuggcaagugcccuaaguaugugaaaagcacgaagcugagacuugcuaccgggcugcggaauguucccuccauccagucucgcggacucuuuggcgccauugccggguucaucgagggaggcuggacagggaugguggauggaugguacggcuaucaucaccagaacgaacaaggcagcggguacgcugcggaccugaaauccacccagaaugccaucgaugagauuacaaacaaggucaauagcgugaucgagaaaaugaacacccaguuuacggcuguuggaaaggaguucaaucaccuugagaagagaauugaaaaccugaauaaaaagguggacgauggcuuccucgacaucuggacauacaacgccgagcugcugguccuccuggaaaaugagcggacccuugauuaucaugacucuaacgugaaaaaucuguacgagaagguccgcucccagcucaaaaacaacgccaaggaaauugggaauggauguuuugaguucuaucacaagugcgauaacaccuguauggaaagcgugaaaaauggcacauacgacuauccuaaguacucugaggaagcuaaacugaacagagaggagaucgaugggguuaaacuugaauccacccggaucuaucaaauucuggccaucuacagcacaguggcguccucucucguccuggugguuagccugggcgcuauuuccuuuuggaugugcucuaauggaagccuccagugccgcaucuguauuuga

SEQ ID NO: 202514 - RNA, 1701 nt, Artificial Sequence; identical to SEQ ID NO: 202513
  derived and/or modified CDS sequence (opt5) from hemagglutinin__InfluenzaA__AGU92733

SEQ ID NO: 202515 - RNA, 1701 nt, Artificial Sequence
  derived and/or modified CDS sequence (opt5) from hemagglutinin__InfluenzaA__AGU92744
augaaggccauccuggugguccuccuguacaccuucgcuacagccaacgcggacacgcuuugcauuggcuaucacgcuaauaacagcaccgauacaguugacaccgugcuggagaagaaugugacagucacccauuccgugaaccuccuggaagauaagcacaaugggaaacuuuguaagcugagaggaguugcuccccuccaucugggcaaaugcaacaucgccggguggauucugggaaauccugagugugaaucucucagcacagccuccucuuggagcuacaucguggagaccuccucuagcgacaacggcacgugcuauccgggggauuuuauugacuacgaagaacugcgggagcagcuuuccagcgucucuuccuucgaacgcuuugagaucuuccccaagaccagcucuuggccuaaucacgauuccgacaagggagugacagccgcuuguccccaugccggcgcgaaaucuuuuuauaagaaccugaucuggcucguuaaaaagggcaauagcuacccuaaacuguccaagagcuauauuaacgauaaggggaaagaagugcuuguccuguggggaauccaccaccccuccaccucugccgaccaacagagccucuaccagaaugcugaugccuacguguucgugggcuccagcagauauucuaagaaauuuaagccugagauugcuauccggccgaaaguccgcgaccaggaggggagaaugaacuacuauuggacacugguugaacccggagauaagauuaccuucgaggccacgggcaaucugguggugccucgguacgcguuugccauggaacgcaacgcuggguccggaaucauuaucagcgacacacccguccaugacugcaacaccacaugucaaaccccuaaaggcgccaucaauaccucucuccccuuccagaacauucacccgaucacaauuggcaagugcccuaaguaugugaaaagcacgaagcugagacuugcuaccgggcugcggaauguucccuccauccagucucgcggacucuuuggcgccauugccggguucaucgagggaggcuggacagggaugguggauggaugguacggcuaucaucaccagaacgaacaaggcagcggguacgcugcggaccugaaauccacccagaaugccaucgaugagauuacaaacaaggucaauagcgugaucgagaaaaugaacacccaguuuacggcuguuggaaaggaguucaaucaccuugagaagagaauugaaaaccugaauaaaaagguggacgauggcuuccucgacaucuggacauacaacgccgagcugcugguccuccuggaaaaugagcggacccuugauuaucaugacucuaacgugaaaaaucuguacgagaagguccgcucccagcucaaaaacaacgccaaggaaauugggaauggauguuuugaguucuaucacaagugcgauaacaccuguauggaaagcgugaaaaauggcgcuuacgacuauccuaaguacucugaggaagccaaacugaacagagaggagaucgaugggguuaaacuugaauccacacggaucuaucaaauucuggcgaucuacagcaccguggcuuccucucucguccuggugguuagccugggcgccauuuccuuuuggaugugcucuaauggaagccuccagugccgcaucuguauuuga

SEQ ID NO: 202516 - RNA, 1701 nt, Artificial Sequence
  derived and/or modified CDS sequence (opt5) from hemagglutinin__InfluenzaA__AGU92755
augaaggccauccuggugguccuccuguacaccuucgcuacagccaacgcggacacgcuuugcauuggcuaucacgcuaauaacagcaccgauacaguugacaccgugcuggagaaaaaugugacagucacccauuccgugaaccuccuggaagauaagcacaaugggaaacuuuguaagcugagaggaguugcuccccuccaucugggcaaaugcaacaucgccggguggauucugggaaauccugagugugaaucucucagcacagccuccucuuggagcuacaucguggagaccuccucuagcgacaacggcacgugcuauccgggggauuuuauugacuacgaagaacugcgggagcagcuuuccagcgucucuuccuucgaacgcuuugagaucuuccccaagaccagcucuuggccuaaucacgauuccaacaagggagugacagccgcuuguccccaugccggcgcgaaaucuuuuuauaagaaucugaucuggcucguuaaaaagggcaacagcuacccuaaacuguccaagagcuauauuaaugacaaggggaaagaagugcuuguccuguggggaauccaccaccccuccaccucugccgaucaacagagccucuaccagaacgcugacgccuacguguucgugggcuccagcagauauucuaaggaguuuaaaccugagauugcuauccggccgaagguccgcgaucaggaagggagaaugaauuacuauuggacacugguugagcccggagacaaaauuaccuucgaagccacgggcaaccugguggugccucgguacgcguuugccauggagcgcaacgcuggguccggaaucauuaucagcgauacacccguccaugacugcaauaccacaugucaaaccccuaagggcgccaucaacaccucucuccccuuccagaauauucacccgaucacaauuggcaaaugcccuaaguauguuaagagcacgaaacugagacuugcuaccgggcugcggaacgugcccuccauccagucucgcggacucuuuggcgccauugccggguucaucgaaggaggcuggacagggaugguggacggaugguacggcuaucaucaccagaaugagcaaggcagcggguacgcugcggaucugaaguccacccagaacgccaucgacgagauuacaaauaaagucaacagcgugaucgaaaagaugaauacccaguuuacggcuguuggaaaagaguucaaccaccuugaaaagagaauugagaaucugaacaagaaaguggaugacggcuuccucgauaucuggacauacaaugccgaacugcugguccuccuggagaacgagcggacccuugacuaucaugauucuaaugugaagaaccuguacgaaaaaguccgcucccagcucaagaacaaugccaaagagauugggaacggauguuuugaguucuaucacaagugcgacaauaccuguauggagagcgugaagaacggcacauacgauuauccuaaauacucugaagaggcuaagcugaauagagaggaaaucgacgggguuaaacuugaguccacccggaucuaucaaauucuggccaucuacagcacaguggcguccucucucguccuggugguuagccugggcgcuauuuccuuuuggaugugcucuaacggaagccuccagugccgcaucuguauuuga

SEQ ID NO: 202517 - RNA, 1701 nt, Artificial Sequence
  derived and/or modified CDS sequence (opt5) from hemagglutinin__InfluenzaA__AGU92766
augaaggccauccuggugguccuccuguacaccuucgcuacagccaacgcggacacgcuuugcauuggcuaucacgcuaauaacagcaccgauacaguugacaccgugcuggagaaaaaugugacagucacccauuccgugaaccuccuggaagauaagcacaaugggaaacuuuguaagcugagaggaguugcuccccuccaucugggcaaaugcaacaucgccggguggauucugggaaauccugagugugaaacacucucuaccgccagcuccuggucuuacaucguggagacgagcuccucugacaacgggaccugcuauccgggcgauuuuauugacuacgaagaacugcgggagcagcuuagcuccgucagcucuuucgaacgcuuugagaucuuccccaagacauccagcuggccuaaucacgaaucuaacaagggagugaccgccgcuuguccccaugccggcgcgaaaggcuuuuauaagaaucugaucuggcucguuaaaaaggggaacuccuacccuaaacugagcaagucuuauauuaaugauaagggaaaagaggugcuuguccuguggggcauccaccaccccuccacaaccgccgaccaacagagccucuaccagaacgcugaugccuacguguucguggggacguccagauauucuaagaaauuuaagccugagauugcuacacggccgaaaguccgcgaccaggaaggaagaaugaauuacuauuggacccugguugagcccggcgauaagaucacauucgaagccaccgggaaccugguggugccucgguacgcguuugccauggagcgcgacgcuggaagcggcauuaucauuuccgauacccccguccaugacugcaacacaacgugucaaaccccuaaaggcgccaucaauacaagccuccccuuccagaacauccacccgauuaccaucgggaagugcccuaaguaugugaaaucuacaaagcugagacuugcuaccggacugcggaauguucccuccauucagagccgcggccucuuuggggccaucgccggauucauugaaggcggguggacgggaaugguggacggcugguacggcuaucaucaccagaacgagcaagggucuggauacgcugcggaucugaaaagcacacagaaugccaucgacaagaucaccaacaaagucaauuccgugauugagaagaugaacacccaguuuacagcuguuggcaaggaguucaaucaccuugagaaaagaaucgaaaaccugaauaagaaaguggaugacggguuccucgauauuuggaccuacaacgccgagcugcugguccuccuggaaaaugagcggacacuugacuaucaugauucuaacgugaagaaucuguacgagaaaguccgcaaccagcucaagaacaaugccaaggaaaucggaaacggcuguuuugaguucuaucacaaaugcgacaauacguguauggaaagcgugaagaacgggaccuacgauuauccuaaauacuccgaggaagcuaagcugaauagagaggagauugacggcguuaaacuugaaagcacacggaucuaucaaauccuggccauuuacucuaccgcggcuuccagccucgugcuggucgugucucugggagccaucuccuuuuggaugugcagcaacggcucccuccagugccgcauuuguaucuga

SEQ ID NO: 202518 - RNA, 1701 nt, Artificial Sequence
  derived and/or modified CDS sequence (opt5) from hemagglutinin__InfluenzaA__AGU92777
augaaggccauccuggugguccuccuguacaccuucgcuacagccaacgcggacacgcuuugcauuggcuaucacgcuaauaacagcaccgauacaguugacaccgugcuggagaaaaaugugacagucacccauuccgugaaccuccuggaagauaagcacaaugggaaacuuuguaagcugagaggaguugcuccccuccaucugggcaaaugcaacaucgccggguggauucugggaaauccugagugugaaacacucucuaccgccagcuccuggucuuacaucguggagacgagcuccucugacaacgggaccugcuauccgggcgauuuuauugacuacgaagaacugcgggagcagcuuagcuccgucagcucuuucgaacgcuuugagaucuuccccaagacauccagcuggccuaaucacgaaucuaacaagggagugaccgccgcuuguccccaugccggcgcgaaaggcuuuuauaagaaucugaucuggcucguuaaaaaggggaacuccuacccuaaacugagcaagucuuauauuaaugauaagggaaaagaggugcuuguccuguggggcauccaccaccccuccacaaccgccgaccaacagagcauuuaccagaacgcugauacguacguguucguggggacauccagauauucuaagaaauuuaagccugagaucgccacccggccgaaaguccgcgaccaggaaggaagaaugaauuacuauuggacacucguugagcccggcgauaagauuaccuucgaagcuaccgggaaccugguggugccucgguacgccuuugcgauggagcgcgacgccggaagcggcaucauuaucuccgauacacccguccaugacugcaacacgaccugucaaacaccuaaaggcgcuaucaauaccagccugcccuuccagaacauucacccgaucacaauugggaagugcccuaaguaugugaaaucuaccaagcucagacuggccacgggacuucggaauguucccuccauccagagccgcggccuguuuggggcuauugccggauucaucgaaggcggguggacaggaaugguggacggcugguacggcuaucaucaccagaacgagcaagggucuggauacgccgcugaucucaaaagcacccagaaugcgaucgacaagauuaccaacaaagucaauuccgugaucgagaagaugaacacacaguuuaccgccguuggcaaggaguucaaucaccuggagaaaagaauugaaaaccuuaauaagaaaguggaugacggguuccuggauaucuggacauacaacgcugagcuccugguccugcucgaaaaugagcggacgcuggacuaucaugauucuaacgugaagaaucuuuacgagaaaguccgcaaccagcugaagaacaaugccaaggaaauuggaaacggcuguuuugaguucuaucacaaaugcgacaauaccuguauggaaagcgugaagaacgggacauacgauuauccuaaauacuccgaggaagccaagcucaauagagaggagaucgacggcguuaaacuggaaagcacccggaucuaucaaauucuugcuaucuacucuacagccgcguccagccuggugcucgucgugucucugggagcuauuuccuuuuggaugugcagcaacggcucccugcagugccgcaucuguauuuga

SEQ ID NO: 202519 - RNA, 1701 nt, Artificial Sequence
  derived and/or modified CDS sequence (opt5) from hemagglutinin__InfluenzaA__AGU92788
augaaggccauccuggugguccuccuguacaccuucgcuacagccaacgcggacacgcuuugcauuggcuaucacgcuaauaacagcaccgauacaguugacaccgugcuggagaaaaaugugacagucacccauuccgugaaccuccuggaagauaagcacaaugggaaacuuuguaagcugagaggaguugcuccccuccaucugggcaaaugcaacaucgccggguggauucugggaaauccugagugugaaacacucucuaccgccagcuccuggucuuacaucguggagacgagcuccucugacaacgggaccugcuauccgggggauuuuauugacuacgaagaacugcgggagcagcuuagcuccgucagcucuuucgaacgcuuugagaucuuccccaagacauccagcuggccuaaucacgauucugacaagggagugaccgccgcuuguccccaugccggcgcgaaaggcuuuuauaagaaccugaucuggcucguuaaaaagggcaauuccuacccuaaacugagcaagucuuauauuaacgauaagggaaaagaagugcuuguccuguggggcauccaccaccccuccacaaccgccgaccaacagagccucuaccagaaugcugaugccuacguguucguggggacguccagauauucuaagaaauuuaagccugagauugcuacacggccgaaaguccgcgacagagagggacggaugaacuacuauuggacccugguugaacccggcgauaagaucacauucgaggccaccgggaaucugguggugccucgcuacgcguuugccauggaaagagacgcuggaagcggcauuaucauuuccgacacccccguccaugauugcaacacaacgugucagaccccuaaaggcgccaucaacacaagccuccccuuccaaaauauccacccgauuaccaucgggaagugcccuaaguaugugaaaucuacaaagcugcggcuugcuaccggacugcgcaacguucccuccauucagagcagaggccucuuuggggccaucgccggauucauugagggcggguggacgggaaugcuggacggcugguacggcuaucaucaccagaaugaacaggggucuggauacgcugcggaucuuaaaagcacacaaaacgccaucgacaagaucaccaauaaagugaacuccgucauugagaagaugaauacccaguuuacagcugugggcaaggaguucaaccaccuggaaaaacggaucgagaaucucaacaagaaaguugaugacggguuccuggauauuuggaccuacaaugccgaacugcucgugcugcuugagaacgaacgcacacuggacuaucaugauucuaaugucaagaaccucuacgagaaagugagaaaucagcugaagaacaacgccaaggagaucggaaauggcuguuuugaguucuaucacaaaugcgacaacacguguauggagagcgucaagaaugggaccuacgauuauccuaaauacuccgaagaggcuaaacuuaaccgggaagagauugacggcgugaagcuggagagcacacgcaucuaucagauccucgccauuuacucuaccgcggcuuccagccugguucugguggucucucucggagccaucuccuuuuggaugugcagcaauggcucccugcaaugcagaauuuguaucuga

SEQ ID NO: 202520 - RNA, 1701 nt, Artificial Sequence
  derived and/or modified CDS sequence (opt5) from hemagglutinin__InfluenzaA__AGU92799
augaaggccauccuggugguccuccuguacaccuucgcuacagccaacgcggacacgcuuugcauuggcuaucacgcuaauaacagcaccgauacaguugacaccgugcuggagaaaaaugugacagucacccauuccgugaaccuccuggaagauaagcacaaugggaaacuuuguaagcugagaggaguugcuccccuccaucugggcaaaugcaacaucgccggguggauucugggaaauccugagugugaaacacucucuaccgccagcuccuggucuuacaucguggagacgagcuccucugacaacgggaccugcuauccgggggauuuuauugacuacgaagaacugcgggagcagcuuagcuccgucagcucuuucgaacgcuuugagaucuuccccaagacauccagcuggccugaucacgacucuaauaagggagugaccgccgcuuguccccaugccggcgcgaaaggcuuuuauaagaaccugaucuggcucguuaaaaagggcaauuccuacccuaaacugagcaagucuuauauuaacgauaagggaaaagaagugcuuguccuguggggcauccaccaccccuccacaaccgccgaccaacagagccucuaccagaaugcugaugccuacguguucguggggacguccagauauucuaagaaauuuaagccugagauugcuacacggccgaaaguccgcgacagagagggacggaugaacuacuauuggacccugguugaacccggcgauaagaucacauucgaggccaccgggaaucugguggugccucgcuacgcguuugccauggaaagagacgcuggaagcggcauuaucauuuccgacacccccguccaugauugcaacacaacgugucagaccccuaaaggcgccaucaacacaagccuccccuuccaaaauauccacccgauuaccaucgggaagugcccuaaguaugugaaaucuacaaagcugcggcuugcuaccggacugcgcaacguucccuccauucagagcagaggccucuuuggggccaucgccggauucauugagggcggguggacgggaaugguggacggcugguacggcuaucaucaccagaaugaacaggggucuggauacgcugcggaucugaaaagcacacaaaacgccaucgacaagaucaccaauaaagucaacuccgugauugagaagaugaauacccaguuuacagcuguuggcaaggaguucaaccaccuugaaaaacggaucgagaaucugaacaagaaaguggaugacggguuccucgauauuuggaccuacaaugccgaacugcugguccuccuggagaacgaacgcacacuugacuaucaugauucuaaugugaagaaccuguacgagaaagucagaaaucagcucaagaacaacgccaaggagaucggaaauggcuguuuugaguucuaucacaaaugcgacaacacguguauggagagcgugaagaaugggaccuacgauuauccuaaauacuccgaagaggcuaagcugaaccgggaagagauugacggcguuaaacuugagagcacacgcaucuaucagauccuggccauuuacucuaccgcggcuuccagccucgugcuggucgugucucugggagccaucuccuuuuggaugugcagcaauggcucccuccaaugcagaauuuguaucuga

SEQ ID NO: 202521 - RNA, 1701 nt, Artificial Sequence
  derived and/or modified CDS sequence (opt5) from hemagglutinin__InfluenzaA__AGU92821
augaaggccauccuggugguccuccuguacaccuucgcuacagccaacgcggacacgcuuugcauuggcuaucacgcuaauaacagcaccgauacaguugacaccgugcuggagaaaaaugugacagucacccauuccgugaaccuccuggaagauaagcacaaugggaaacuuuguaagcugagaggaguugcuccccuccaucugggcaaaugcaacaucgccggguggauucugggaaauccugagugugaaacacucucuaccgccagcuccuggucuuacaucguggagacgagcuccucugacaacgggaccugcuauccgggcgauuuuauugacuacgaagaacugcgggagcagcuuagcuccgucagcucuuucgaacgcuuugagaucuuccccaagacauccagcuggccuaaucacgauucuaacaagggagugaccgccgcuuguccccaugccggcgcgaaaggcuuuuauaagaaucugaucuggcucguuaaaaaggggaacuccuacccuaaacugagcaagucuuauauuaaugacaagggaaaagaagugcuuguccuguggggcauccaccaccccuccacaaccgccgaucaacagagccucuaccagaacgcugacacguacguguucguggggacauccagauauucuaagauguuuaaaccugagauugccacccggccgaagguccgcgauagagagggacggaugaauuacuauuggacacugguugaacccggcgacaaaaucaccuucgaggcuaccgggaaccugguggugccucgcuacgccuuugcgauggaaagagaugccggaagcggcauuaucauuuccgacacacccguccaugacugcaacacgaccugucagacaccuaagggcgcuaucaauaccagccuccccuuccaaaacauccacccgauuacaaucgggaaaugcccuaaguaugugaagucuaccaaacugcggcuugccacgggacugcgcaauguucccuccauucagagcagaggccucuuuggggcuaucgccggauucauugagggcggguggacaggaaugguggauggcugguacggcuaucaucaccagaacgaacaggggucuggauacgccgcugaccuuaagagcacccaaaaugcgaucgauaaaaucaccaacaaggucaauuccgugauugagaaaaugaacacacaguuuaccgccguuggcaaggaguucaaucaccuugaaaagcggaucgagaaccugaauaaaaagguggacgauggguuccucgacauuuggacauacaacgcugaacugcugguccuccuggagaaugaacgcacgcuugauuaucaugacucuaacgugaaaaaucuguacgagaaggucagaaaccagcucaaaaacaaugccaaggagaucggaaacggcuguuuugaguucuaucacaagugcgauaauaccuguauggagagcgugaaaaacgggacauacgacuauccuaaguacuccgaagaggccaaacugaaucgggaagagauugauggcguuaagcuggagagcacccgcaucuaucagauccuggcuauuuacucuacagccgcguccagccucgugcuggucgugucucugggagcuaucuccuuuuggaugugcagcaacggcucccuccaaugcagaauuuguaucuga

SEQ ID NO: 202522 - RNA, 1701 nt, Artificial Sequence
  derived and/or modified CDS sequence (opt5) from hemagglutinin__InfluenzaA__AGU92843
augaaggccauccuggugguccuccuguacaccuucgcuacagccaacgcggacacgcuuugcauuggcuaucacgcuaauaacagcaccgauacaguugacaccgugcuggagaagaaugugacagucacccauuccgugaaccuccuggaagauaagcacaaugggaaacuuuguaagcugagaggaguugcuccccuccaucugggcaaaugcaacaucgccggguggauucugggaaauccugagugugaaucucucagcacagccuccucuuggagcuacaucguggagaccuccucuagcgacaacggcacgugcuauccgggggauuuuauugacuacgaagaacugcgggagcagcuuuccagcgucucuuccuucgaacgcuuugagaucuuccccaagaccagcucuuggccuaaucacgauuccaacaagggagugacagccgcuuguccccaugccggcgcgaaaucuuuuuauaagaaucugaucuggcucguuaaaaagggcgacagcuacccuaaacuguccaagagcuauauuaacgauaaggggaaagaagugcuuguccuguggggaauccaccaccccuccaccucugccgaccaacagagccucuaccagaaugcugaugccuacguguucgugggcuccagcagauauucuaagaaauuuaagccugagauugcuauccggccgaaaguccgcgacagagaggggcggaugaacuacuauuggacacugguugaacccggagauaagauuaccuucgaggccacgggcaaucugguggugccucgcuacgcguuugccauggaaagaaacgcuggguccggaaucauuaucagcgacacacccguccaugacugcaacaccacaugucagaccccuaaaggcgccaucaauaccucucuccccuuccaaaacauucacccgaucacaauuggcaagugcccuaaguaugugaaaagcacgaagcugcggcuugcuaccgggcugcgcaauguucccuccauccagucuagaggacucuuuggcgccauugccggguucaucgagggaggcuggacagggaugguggauggaugguacggcuaucaucaccagaacgaacagggcagcggguacgcugcggaccugaaauccacccaaaaugccaucgaugagauuacaaacaaggucaauagcgugaucgagaaaaugaacacccaguuuacggcuguuggaaaggaguucaaucaccuugagaagcggauugaaaaccugaauaaaaagguggacgauggcuuccucgacaucuggacauacaacgccgagcugcugguccuccuggaaaaugagcgcacccuugauuaucaugacucuaacgugaaaaaucuguacgagaaggucagaucccagcucaaaaacaacgccaaggaaauugggaauggauguuuugaguucuaucacaagugcgauaacaccuguauggaaagcgugaaaaauggcacauacgacuauccuaaguacucugaggaagcuaaacugaaccgggaggagaucgaugggguuaaacuugaauccacccgcaucuaucagauucuggccaucuacagcacaguggcguccucucucguccuggugguuagccugggcgcuauuuccuuuuggaugugcucuaauggaagccuccaaugcagaaucuguauuuga

SEQ ID NO: 202523 - RNA, 1710 nt, Artificial Sequence
  derived and/or modified CDS sequence (opt5) from hemagglutinin__InfluenzaA__AGU92854
augaaggccauccuggugguccuccuguacaccuucgcuacagccaacgcggacacgcuuugcauuggcuaucacgcuaauaacagcaccgauacaguugacaccgugcuggagaaaaaugugacagucacccauuccgugaaccuccuggaagauaagcacaaugggaaacuuuguaagcugagaggaguugcuccccuccaucugggcaaaugcaacaucgccggguggauucugggaaauccugagugugaaucucucagcacagccuccucuuggagcuacaucguggagaccuccucuagcgacaacggcacgugcuauccgggggauuuuauugacuacgaagaacugcgggagcagcuuuccagcgucucuuccuucgaacgcuuugagaucuuccccaagaccagcucuuggccuaaucacgauuccgacaagggagugacagccgcuuguccccaugccggcgcgaaaucuuuuuauaagaaccugaucuggcucguuaaaaagggcaauagcuacccuaaacuguccaagagcuauauuaacgauaaggggaaagaagugcuuguccuguggggaauccaccaccccuccaccucugccgaccaacagagccucuaccagaaugcugaugccuacguguucgugggcuccagcagauauucuaagaaauuuaagccugagauugcuauccggccgaaaguccgcgacagagaggggcggaugaacuacuauuggacacugguugaacccggagauaagauuaccuucgaggccacgggcaaucugguggugccucgcuacgcguuugccauggaaagaaacgcuggguccggaaucauuaucagcgacacacccguccaugacugcaacaccacaugucagaccccuaaaggcgccaucaauaccucucucacaagccugcccuuccaaaacauucacccgaucacgauuggcaagugcccuaaguaugugaaauccaccaaacuucggcuggcuacagggcuccgcaauguucccucuauccagagcagaggacuguuuggcgccauugccggguucaucgagggaggcuggaccgggaugguggauggaugguacggcuaucaucaccagaacgaacagggcuccggguacgcugcggaccuuaagagcacacaaaaugccaucgaugagauuaccaacaaggucaauucugugaucgagaaaaugaacacgcaguuuacagcuguuggaaaggaguucaaucaccuggagaagcggauugaaaaccucaauaaaaagguggacgauggcuuccuggacaucuggaccuacaacgccgagcugcucguccugcuugaaaaugagcgcacccuggauuaucaugacuccaacgugaaaaaucucuacgagaaggucagaagccagcugaaaaacaacgccaaggaaauugggaauggauguuuugaguucuaucacaagugcgauaacacauguauggaaucugugaaaaauggcaccuacgacuauccuaaguacuccgaggaagcuaaacuuaaccgggaggagaucgaugggguuaagcuggaaagcacacgcaucuaucagauucucgccaucuacuccacgguggcgucuagccugguccuggugguuucccucggcgcuauuucuuuuuggaugugcagcaauggaucccugcaaugcagaaucuguauuuga

SEQ ID NO: 202524 - RNA, 1701 nt, Artificial Sequence
  derived and/or modified CDS sequence (opt5) from hemagglutinin__InfluenzaA__AGU92887
augaaggccauccuggugguccuccuguacaccuucgcuacagccaacgcggacacgcuuugcauuggcuaucacgcuaauaacagcaccgauacaguugacaccgugcuggagaagaaugugacagucacccauuccgugaaccuccuggaagauaagcacaaugggaaacuuuguaagcugagaggaguugcuccccuccaucugggcaaaugcaacaucgccggguggauucugggaaauccugagugugaaucucucagcacagccuccucuuggagcuacaucguggagaccuccucuagcgacaacggcacgugcuauccgggggauuuuauugacuacgaagaacugcgggagcagcuuuccagcgucucuuccuucgaacgcuuugagaucuuccccaagaccagcucuuggccuaaucacgauuccaacaagggagugacagccgcuuguccccaugccggcgcgaaaucuuuuuauaagaaucugaucuggcucguuaaaaagggcaacagcuacccuaaacuguccaagagcuauauuaaugacaaggggaaagaagugcuuguccuguggggaauccaccaccccuccaccucugaugaccaacagagccucuaccagaacgccgaugcuuacguguucgugggcuccagcagauauucuaagaaauuuaagccugagauugccauccggccgaaaguccgcgacagagaggggcggaugaauuacuauuggacacugguugaacccggagauaagauuaccuucgaggcuacgggcaaccugguggugccucgcuacgccuuugcgauggaaagaaacgccggguccggaaucauuaucagcgacacacccguccaugacugcaauaccacaugucagaccccuaaaggcgcuaucaacaccucucuccccuuccaaaauauucacccgaucacaauuggcaagugcccuaaguaugugaaaagcacgaagcugcggcuugccaccgggcugcgcaacguucccuccauccagucuagaggacucuuuggcgcuauugccggguucaucgagggaggcuggacagggaugguggauggaugguacggcuaucaucaccagaaugaacagggcagcggguacgccgcugaccugaaauccacccaaaacgcgaucgaugagauuacaaauaaggucaacagcgugaucgagaaaaugaauacccaguuuacggccguuggaaaggaguucaaccaccuugagaagcggauugaaaaucugaacaaaaagguggacgauggcuuccucgacaucuggacauacaaugcugagcugcugguccuccuggaaaacgagcgcacccuugauuaucaugacucuaaugugaaaaaccuguacgagaaggucagaucccagcucaaaaacaaugccaaggaaauugggaacggauguuuugaguucuaucacaagugcgauaauaccuguauggaaagcgugaaaaacggcacauacgacuauccuaaguacucugaggaagccaaacugaaucgggaggagaucgaugggguuaaacuugaauccacccgcaucuaucagauucuggcuaucuacagcacaguggccuccucucucguccuggugguuagccugggcgcgauuuccuuuuggaugugcucuaacggaagccuccaaugcagaaucuguauuuga

SEQ ID NO: 202525 - RNA, 1701 nt, Artificial Sequence; identical to SEQ ID NO: 202509
  derived and/or modified CDS sequence (opt5) from hemagglutinin__InfluenzaA__AGU92898

SEQ ID NO: 202526 - RNA, 1701 nt, Artificial Sequence; identical to SEQ ID NO: 202510
  derived and/or modified CDS sequence (opt5) from hemagglutinin__InfluenzaA__AGU92909

SEQ ID NO: 202527 - RNA, 1701 nt, Artificial Sequence; identical to SEQ ID NO: 202512
  derived and/or modified CDS sequence (opt5) from hemagglutinin__InfluenzaA__AGU92931

SEQ ID NO: 202528 - RNA, 1701 nt, Artificial Sequence; identical to SEQ ID NO: 202513
  derived and/or modified CDS sequence (opt5) from hemagglutinin__InfluenzaA__AGU92942

SEQ ID NO: 202529 - RNA, 1701 nt, Artificial Sequence; identical to SEQ ID NO: 202513
  derived and/or modified CDS sequence (opt5) from hemagglutinin__InfluenzaA__AGU92953

SEQ ID NO: 202530 - RNA, 1701 nt, Artificial Sequence
  derived and/or modified CDS sequence (opt5) from hemagglutinin__InfluenzaA__AGU92964
augaaggccauccuggugguccuccuguacaccuucgcuacagccaacgcggacacgcuuugcauuggcuaucacgcuaauaacagcaccgauacaguugacaccgugcuggagaaaaaugugacagucacccauuccgugaaccuccuggaagauaagcacaaugggaaacuuuguaagcugagaggaguugcuccccuccaucugggcaaaugcaacaucgccggguggauucugggaaauccugagugugaaacacucucuaccgccagcuccuggucuuacaucguggagacgagcuccucugacaacgggaccugcuauccgggcgauuuuauugacuacgaagaacugcgggagcagcuuagcuccgucagcucuuucgaacgcuuugagaucuuccccaagacauccagcuggccuaaucacgauucuaacaagggagugaccgccgcuuguccccaugccggcgcgaaaggcuuuuauaagaaucugaucuggcucguuaaaaaggggaacuccuacccuaaacugagcaagucuuauauuaaugacaagggaaaagaagugcuuguccuguggggcauccaccaccccuccacaaccgccgaucaacagagccucuaccagaacgcugacgccuacguguucguggggacguccagauauucuaagaaauuuaagccugagauugcuacacggccgaaaguccgcgauagagagggacggaugaauuacuauuggacccugguugaacccggcgacaagaucacauucgaggccaccgggaaccugguggugccucgcuacgcguuugccauggaaagagaugcuggaagcggcauuaucauuuccgacacccccguccaugacugcaacacaacgugucagaccccuaaaggcgccaucaauacaagccuccccuuccaaaacauccacccgauuaccaucgggaagugcccuaaguaugugaaaucuacaaagcugcggcuugcuaccggacugcgcaauguucccuccauucagagcagaggccucuuuggggccaucgccggauucauugagggcggguggacgggaaugcuggauggcugguacggcuaucaucaccagaacgaacaggggucuggauacgcugcggaccuuaaaagcacacaaaaugccaucgauaagaucaccaacaaagucaauuccgugauugagaagaugaacacccaguuuacagcugugggcaaggaguucaaucaccuggaaaaacggaucgagaaccucaauaagaaaguugacgauggguuccuggacauuuggaccuacaacgccgaacugcucgugcugcuugagaaugaacgcacacuggauuaucaugacucuaacgucaagaaucucuacgagaaagugagaaaccagcugaagaacaaugccaaggagaucggaaacggcuguuuugaguucuaucacaaaugcgauaauacguguauggagagcgucaagaacgggaccuacgacuauccuaaauacuccgaagaggcuaaacuuaaucgggaagagauugauggcgugaagcuggagagcacacgcaucuaucagauccucgccauuuacucuaccgcggcuuccagccugguucugguggucucucucggagccaucuccuuuuggaugugcagcaacggcucccugcaaugcagaauuuguaucuga

SEQ ID NO: 202531 - RNA, 1701 nt, Artificial Sequence
  derived and/or modified CDS sequence (opt5) from hemagglutinin__InfluenzaA__AGU92975
augaaggccauccuggugguccuccuguacaccuucgcuacagccaacgcggacacgcuuugcauuggcuaucacgcuaauaacagcaccgauacaguugacaccgugcuggagaaaaaugugacagucacccauuccgugaaccuccuggaagauaagcacaaugggaaacuuuguaagcugagaggaguugcuccccuccaucugggcaaaugcaacaucgccggguggauucugggaaauccugagugugaaacacucucuaccgccagcuccuggucuuacaucguggagacgagcuccucugacaacgggaccugcuauccgggcgauuuuauugacuacgaagaacugcgggagcagcuuagcuccgucagcucuuucgaacgcuuugagaucuuccccaagacauccagcuggccuaaucacgauucuaacaagggagugaccgccgcuuguccccaugccggcgcgaaaggcuuuuauaagaaucugaucuggcucguuaaaaaggaaaacuccuacccuaaacugagcaagucuuauauuaaugacaaggggaaagaggugcuuguccuguggggaauccaccaccccuccacaaccgccgaucaacagagccucuaccagaacgcugacacguacguguucgugggcacauccagauauucuaagaaauuuaagccugagauugccacccggccgaaaguccgcgauagagaagggcggaugaauuacuauuggacacugguugagcccggagacaagaucaccuucgaagcuaccggcaaccugguggugccucgcuacgccuuugcgauggagagagaugccgggagcggaauuaucauuuccgacacacccguccaugacugcaacacgaccugucagacaccuaaaggcgcuaucaauaccagccuccccuuccaaaacauccacccgauuacaaucggcaagugcccuaaguaugugaaaucuaccaagcugcggcuugccacggggcugcgcaauguucccuccauucagagcagaggacucuuuggcgcuaucgccggguucauugaaggaggcuggacagggaugguggauggaugguacggcuaucaucaccagaacgagcagggcucuggguacgccgcugaccugaaaagcacccaaaaugcgaucgauaagaucaccaacaaagucaauuccgugauugagaagaugaacacacaguuuaccgccguuggaaaggaguucaaucaccuugagaaacggaucgaaaaccugaauaagaaaguggacgauggcuuccucgacauuuggacauacaacgcugagcugcugguccuccuggaaaaugagcgcacgcuugauuaucaugacucuaacgugaagaaucuguacgagaaagucagaaaccagcucaagaacaaugccaaggaaaucgggaacggauguuuugaguucuaucacaaaugcgauaauaccuguauggaaagcgugaagaacggcacauacgacuauccuaaauacuccgaggaagccaagcugaaucgggaggagauugaugggguuaaacuugaaagcacccgcaucuaucagauccuggcuauuuacucuacagccgcguccagccucgugcuggucgugucucugggcgcuaucuccuuuuggaugugcagcaacggaucccuccaaugcagaauuuguaucuga

SEQ ID NO: 202532 - RNA, 1701 nt, Artificial Sequence; identical to SEQ ID NO: 202522
  derived and/or modified CDS sequence (opt5) from hemagglutinin__InfluenzaA__AGU92986

SEQ ID NO: 202533 - RNA, 1701 nt, Artificial Sequence
  derived and/or modified CDS sequence (opt5) from hemagglutinin__InfluenzaA__AGU92997
augaaggccauccuggugguccuccuguacaccuucgcuacagccaacgcggacacgcuuugcauuggcuaucacgcuaauaacagcaccgauacaguugacaccgugcuggagaaaaaugugacagucacccauuccgugaaccuccuggaagauaagcacaaugggaaacuuuguaagcugagaggaguugcuccccuccaucugggcaaaugcaacaucgccggguggauucugggaaauccugagugugaaucucucagcacagccuccucuuggagcuacaucguggagaccuccucuagcgacaacggcacgugcuauccgggggauuuuauugacuacgaagaacugcgggagcagcuuuccagcgucucuuccuucgaacgcuuugagaucuuccccaagaccagcucuuggccuaaucacgauuccaacaagggagugacagccgcuuguccccaugccggcgcgaaaucuuuuuauaagaaucugaucuggcucguuaaaaagggcaacagcuacccuaaacuguccaagagcuauauuaaugacaaggggaaagaagugcuuguccuguggggaauccaccaccccuccaccucugccgaucaacagagccucuaccagaacgcugacgccuacguguucgugggcuccagcagauauucuaagauguuuaaaccugagauugcuauccggccgaagguccgcgauagagaggggcggaugaauuacuauuggacacugguugaacccggagacaaaauuaccuucgaggccacgggcaaccugguggugccucgcuacgcguuugccauggaaagaaacgcuggguccggaaucauuaucagcgauacacccguccaugacugcaauaccacaugucagaccccuaagggcgccaucaacaccucucuccccuuccaaaauauucacccgaucacaauuggcaaaugcccuaaguauguuaagagcacgaaacugcggcuugcuaccgggcugcgcaacgugcccuccauccagucuagaggacucuuuggcgccauugccggguucaucgagggaggcuggacagggaugguggacggaugguacggcuaucaucaccagaaugaacagggcagcggguacgcugcggaucugaaguccacccaaaacgccaucgacgagauuacaaauaaagucaacagcgugaucgagaagaugaauacccaguuuacggcuguuggaaaagaguucaaccaccuugagaagcggauugaaaaucugaacaagaaaguggaugacggcuuccucgauaucuggacauacaaugccgagcugcugguccuccuggaaaacgagcgcacccuugacuaucaugauucuaaugugaagaaccuguacgagaaagucagaucccagcucaagaacaaugccaaagaaauugggaacggauguuuugaguucuaucacaagugcgacaauaccuguauggaaagcgugaagaacggcacauacgauuauccuaaauacucugaggaagcuaagcugaaucgggaggagaucgacgggguuaaacuugaauccacccgcaucuaucagauucuggccaucuacagcacaguggcguccucucucguccuggugguuagccugggcgcuauuuccuuuuggaugugcucuaacggaagccuccaaugcagaaucuguauuuga

SEQ ID NO: 202534 - RNA, 1701 nt, Artificial Sequence; identical to SEQ ID NO: 202524
  derived and/or modified CDS sequence (opt5) from hemagglutinin__InfluenzaA__AGU93008

SEQ ID NO: 202535 - RNA, 1698 nt, Artificial Sequence; identical to SEQ ID NO: 198626
  derived and/or modified CDS sequence (opt5) from hemagglutinin__InfluenzaA__AGU93019

SEQ ID NO: 202536 - RNA, 1701 nt, Artificial Sequence; identical to SEQ ID NO: 199122
  derived and/or modified CDS sequence (opt5) from hemagglutinin__InfluenzaA__AGU93031

SEQ ID NO: 202537 - RNA, 1701 nt, Artificial Sequence
  derived and/or modified CDS sequence (opt5) from hemagglutinin__InfluenzaA__AGU93042
augaaggccauccuggugguccuccuguacaccuucgcuacagccaacgcggacacgcuuugcauuggcuaucacgcuaauaacagcaccgauacaguugacaccgugcuggagaaaaaugugacagucacccauuccgugaaccuccuggaagauaagcacaaugggaaacuuuguaagcugagaggaguugcuccccuccaucugggcaaaugcaacaucgccggguggauucugggaaauccugagugugaaacacucucuaccgccaacagcugguccuacaucguggagacgucuagcuccgacaaugggaccugcuauccgggggauuuuauugacuacgaagaacugcgggagcagcuuucuagcgucuccagcuucgaacgcuuugagaucuuccccaagacaucuuccuggccuaaccacgauagcaauaagggagugaccgccgcuuguccccaugccggcgcgaaaggcuuuuauaagaaccugaucuggcucguuaaaaagggcaauucuuacccuaaacuguccaagagcuauauuaacgacaagggaaaagaagugcuuguccuguggggcauccaccaccccucuacaaccgccgaucaacagucccucuaccagaaugcugacacguacguguucguggggacaagcagauauuccaagaaauuuaagccugagauugccauccggccgaaaguccgcgaucaggagggaagaaugaacuacuauuggacccugguugaacccggcgacaagauuacauucgaggcuaccgggaaccugguggugccucgguacgccuuugcgauggaacgcgaugccggaucuggcaucauuaucagcgacacccccguccaugacugcaauacaacgugucaaaccccuaaaggcgcuaucaacacaucccuccccuuccagaauauucacccgaucaccauugggaagugcccuaaguaugugaaaagcacaaagcugagacuugccaccggacugcggaacguucccucuauccagucccgcggccucuuuggggcuauugccggauucaucgagggcggguggacgggaaugguggauggcugguacggcuaucaucaccagaaugaacaagggagcggauacgccgcugaccugaaaucuacacagaacgcgaucgauaagauuaccaauaaagucaacagcgugaucgagaagaugaauauucaguuuaccgccguuggcaaggaguucaaccaccuugagaaaagaaucgagaaucugaacaagaaaguggacgauggguuccucgacauuuggacauacaaugcugaacugcugguccuccuggagaacgaacggacccuugauuaucaugacuccaaugugaagaaccuguacgagaaaguccgcaaccagcucaagaauaacgccaaggagaucggaaauggcuguuuugaguucuaucacaaaugcgauaacacauguauggaaucugugaagaaugggacguacgacuauccuaaauacagcgaagaggccaagcugaacagagaagagaucgauggcguuaaacuugaguccacccggauuuaucaaauccuggcuauuuacagcacagccgcgucuucccucgugcuggucgugagccugggagcuaucucuuuuuggaugugcuccaauggcagccuccagugccgcauuuguaucuga

SEQ ID NO: 202538 - RNA, 1701 nt, Artificial Sequence
  derived and/or modified CDS sequence (opt5) from hemagglutinin__InfluenzaA__AGU93053
augaaggccauccuggugguccuccuguacaccuucgcuacagccaacgcggacacgcuuugcauuggcuaucacgcuaauaacagcaccgauacaguugacaccgugcuggagaaaaaugugacagucacccauuccgugaaccuccuggaagauaagcacaaugggaaacuuuguaagcugagaggaguugcuccccuccaucugggcaaaugcaacaucgccggguggauucugggaaauccugagugugaaacacucucuaccgccagcuccuggucuuacaucguggagacgagcuccucugacaacgggaccugcuauccgggcgauuuuauugacuacgaagaacugcgggagcagcuuagcuccgucagcucuuucgaacgcuuugagaucuuccccaagacauccagcuggccuaaucacgauucuaacaagggagugaccgccgcuuguccccaugccggcgcgaaaggcuuuuauaagaaucugaucuggcucguuaaaaaggggaacuccuacccuaaacugagcaagucuuauauuaaugacaagggaaaagaagugcuuguccuguggggcauccaccaccccuccacaaccgccgaucaacagagccucuaccagaacgcugacacguacguguucguggggacauccagauauucuaagaaauuuaagccugagauugccacccggccgaaaguccgcgaucaggagggaagaaugaauuacuauuggacacugguugaacccggcgacaagaucaccuucgaggcuaccgggaaccugguggugccucgguacgccuuugcgauggaacgcgaugccggaagcggcauuaucauuuccgacacacccguccaugacugcaacacgaccugucaaacaccuaaaggcgcuaucaauaccagccuccccuuccagaacauccacccgauuacaaucgggaagugcccuaaguaugugaaaucuaccaagcugagacuugccacgggacugcggaauguucccuccauucagagccgcggccucuuuggggcuaucgccggauucauugagggcggguggacaggaaugguggauggcugguacggcuaucaucaccagaacgaacaagggucuggauacgccgcugaccugaaaagcacccagaaugcgaucgauaagaucaccaacaaagucaauuccgugauugagaagaugaacacacaguuuaccgccguuggcaaggaguucaaucaccuugagaaaagaaucgagaaccugaauaagaaaguggacgauggguuccucgacauuuggacauacaacgcugaacugcugguccuccuggagaaugaacggacgcuugauuaucaugacucuaacgugaagaaucuguacgagaaaguccgcaaccagcucaagaacaaugccaaggagaucggaaacggcuguuuugaguucuaucacaaaugcgauaauaccuguauggaaagcgugaagaacgggacauacgacuauccuaaauacuccgaagaggccaagcugaauagagaagagauugauggcguuaaacuugagagcacccggaucuaucaaauccuggcuauuuacucuacagccgcguccagccucgugcuggucgugucucugggagcuaucuccuuuuggaugugcagcaacggcucccuccagugccgcauuuguaucuga

SEQ ID NO: 202539 - RNA, 1701 nt, Artificial Sequence
  derived and/or modified CDS sequence (opt5) from hemagglutinin__InfluenzaA__AGV99014
augaagaccaucauugcccugagcuacauccucugccugguguucgcucagaaacuucccggcaacgacaauuccacagccacgcugugucucgggcaccaugcggucccuaacggaaccauuguuaagacaaucaccaaugauagaauugaggugacaaacgcuaccgaacuggugcaaaauucuagcaucggcgagaucugcgacuccccgcaccagauucuugauggggaaaacuguacacugaucgacgcccuccugggagauccccagugcgacggcuuucagaauaaaaagugggaucuguucgucgagcggucuaaagccuauagcaacuguuacccuuaugacgugcccgauuacgcuucccuccgcucucugguugccagcuccgggacccuugaauuuaauaacgagagcuucaauuggacgggagugacccaaaacggcacaucuuccgcuugcauuagacggagcaauaacuccuuuuucucucgccugaauuggcucacccauagcaacuuuaaguauccugcccugaacgucacaaugcccaauaacgagcaguucgacaaacuuuacaucuggggcgugcaccauccugggaccgauaaagaccagauuuuucuguaugcgcagucuuccggaagaaucacgguuagcacaaagcggucccaacaggccgugauuccgaauaucggcucucgccccagaauccggaacauuccuagccgcaucuccauuuacuggaccaucgucaaacccggggauauucuccugaucaauagcacaggaaaccugaucgcuccuagaggcuacuucaagauucggucugggaaauccagcaucaugcgcucugacgcccccauuggaaaguguaagagcgaaugcaucaccccgaauggcuccauuccuaacgacaaacccuuucagaaugugaacagaaucaccuauggcgcuuguccucgguacgugaagcagucuacacucaaacuggccacggggaugcgcaauguccccgagaagcaaaccagaggaaucuucggcgcgauugccggguuuaucgaaaacggaugggagggcaugauggaugggugguauggauuccggcaccagaauagcgagggcagaggccaggcugccgaccuuaaauccacacaagcugccauugaucagaucaacgggaagcugaaucgccucauuggaaaaaccaacgaaaaguuccaccagaucgagaaggaauuuagcgagguugaaggccggauucaggaccuggagaaauacguggaggauacaaagaucgaccuuuggucuuauaacgccgaacugcucguggcucuggagaaucaacauaccaucgaucugacggacuccgaaaugaacaaacucuucgagaagacaaagaagcagcugagagaaaaugcggaggauauggggaacggaugcuuuaagauuuaccacaaaugugacaaugccugcaucggcagcauucgcaacgggaccuaugaucaugacgucuaccgggacgaggcucuuaauaacagauuccagaucaagggcguggaacugaaaucuggauacaaggauuggauucucuggaucuccuuugccaucagcugcuuccugcuuuguguugcccugcucggcuuuauuaugugggcuugccagaaagggaauauccgcuguaacauuugcaucuga

SEQ ID NO: 202540 - RNA, 1701 nt, Artificial Sequence; identical to SEQ ID NO: 202066
  derived and/or modified CDS sequence (opt5) from hemagglutinin__InfluenzaA__AGV99037

SEQ ID NO: 202541 - RNA, 1701 nt, Artificial Sequence
  derived and/or modified CDS sequence (opt5) from hemagglutinin__InfluenzaA__AGV99049
augaagaccaucauugcccugagcuacauccucugccugguguucgcucagaaacuucccggcaacgacaauuccacagccacgcugugucucgggcaccaugcggucccuaacggaaccguugugaagacaauuaccaaugauagaaucgaggugacaaacgcuaccgaacugguccaaaauucuagcauuggcgagaucugcgacuccccgcaccagauccuugauggggaaaacuguacacugauugacgcccuccugggagauccccagugcgacggcuuucagaauaaaaagugggaucuguucguggagcggucuaaagccuauagcaacuguuacccuuaugacguucccgauuacgcuucccuccgcucucugguggccagcuccgggacccuugaauuuaauaacgagagcuucaauuggacgggagucacccaaaacggcacaucuuccgcuugcaucagacggagcaauaacuccuuuuucucucgccugaauuggcucacccaucugaacuuuaaguauccugcccuuaacgugacaaugcccaauaacgagcaguucgacaagcuguacauuuggggcguucaccauccugggaccgauaaagaccagaucuuucucuaugcgcagagcucuggaagaauuacgguguccacaaagcggagccaacaggccgucaucccgaauauuggcucccgccccagaauccggaacaucccuucucgcauuagcaucuacuggaccauugugaaacccggggauauccugcugauuaauuccacaggaaaccucaucgcuccuagaggcuacuucaagauccggagcgggaaaucuuccauuaugcgcagcgacgcccccaucggaaaguguaagucugaaugcauuaccccgaauggcagcaucccuaacgacaaacccuuucagaaugugaacagaauuaccuauggcgcuuguccucgguacgucaagcaguccacacugaaacuugccacggggaugcgcaauguucccgagaagcaaaccagaggaaucuucggcgcgaucgccggguuuauugaaaacggaugggagggcaugguggaugggugguauggauuccggcaccaaaauucugagggcagaggccaggcugccgaccugaaaagcacacaggcugccaucgaucagauuaacgggaagcucaaucgccugaucggaaaaaccaacggcaaguuccaccagauugaaaaggaguuuuccgaaguggaggggcggauccaggaccuugaaaaauacgucgaggauacaaagauugaccuguggagcuauaacgccgagcuccugguggcucuggaaaaucaacauaccaucgaucucacggacucugagaugaacaaacuguucgaaaagaccaaaaagcagcuuagagagaaugcggaagauaugggaaacggcugcuuuaagaucuaccacaaaugugacaaugccugcauuggguccauccgcaacggcacauaugaucaugacguuuaccgggacgaggcucugaauaacagauuccagauuaagggaguggagcucaaaagcggcuacaaggauuggauccuguggauuucuuuugccaucuccugcuuccuucugugugucgugcuccugggguuuaucaugugggccugccagaaaggaaauauucgcuguaacaucugcauuuga

SEQ ID NO: 202542 - RNA, 1701 nt, Artificial Sequence
  derived and/or modified CDS sequence (opt5) from hemagglutinin__InfluenzaA__AGV99073
augaagaccaucauugcccugagcuacauccucugccugguguucgcucagaaaauucccggcaacgacaauuccacagccacgcuuugucuggggcaccaugcggucccuaacggaaccaucguuaagacaauuaccaaugauagaaucgaggugacaaacgcuaccgaacucgugcaaaauucuagcaucggcgagauuugcgacuccccgcaccagauccuggauggggaaaacuguacacuuauugacgcccugcucggagauccccagugcgacggcuuucagaauaaaaagugggaucuguucgucgagcggucuaaagccuauagcaacuguuacccuuaugacgugcccgauuacgcuucccugcgcucucucguugccagcuccgggacccuggaauuuaauaacgagagcuucaauuggacgggagugacccaaaacggcacaucuuccgcuugcaucagaggcagcaauucuuccuuuuucagccggcuuaacuggcugacccaucucaauuuuaaguauccugcccugaacgucacaaugcccaacaaugagcaguucgacaaacuuuacauuuggggagugcaccauccugggaccgauaaagaccagaucuuucuguaugcgcagucuuccggccgcauuacgguuagcacaaagagaucccaacaggccgugaucccgaacaucgggucucggccccgcauuagaaauaucccuagccggauuuccaucuacuggaccauugucaaacccggagauauccuccugaucaacagcacaggcaaucugauugcuccucgcggguacuucaagaucagaucuggaaaauccagcauuaugcggucugacgcccccaucggcaaguguaagagcgaaugcauuaccccgaacggcuccaucccuaaugacaaacccuuucagaacgugaaucgcaucaccuauggggcuuguccuagauacgugaagcagucuacacucaaacuggccacgggaaugcggaacguccccgagaagcaaacccgcggcauuuucggggcgaucgccggauuuauugaaaauggcugggaggggaugguugauggaugguauggcuucagacaccagaacagcgagggccgggggcaggcugccgaccuuaaauccacacaagcugccaucgaucagauuaauggaaagcugaacagacucaucggcaaaaccaaugaaaaguuccaccagauugagaaggaauuuagcgagguggaagggcgcauccaggaccuggagaaauacguggaggauacaaagaucgaccuuuggucuuauaacgccgaacugcucgucgcucuggagaaccaacauaccauugaucugacggacuccgaaaugaauaaacucuucgagaagacaaagaagcagcugcgggaaaacgcggaggauaugggaaauggcugcuuuaagaucuaccacaaaugugacaacgccugcauugggagcaucagaaauggcaccuaugaucaugacguguaccgcgacgaggcucuuaacaaucgguuccagauuaagggaguugaacugaaacccggcuacaaggauuggauccucuggaucucuuuugccauuuccugcuuccugcuuuguguggcccugcucggguuuaucaugugggcuugccagaaaggaaacauuagauguaauaucugcauuuga

SEQ ID NO: 202543 - RNA, 1701 nt, Artificial Sequence; identical to SEQ ID NO: 201930
  derived and/or modified CDS sequence (opt5) from hemagglutinin__InfluenzaA__AGV99085

SEQ ID NO: 202544 - RNA, 1701 nt, Artificial Sequence
  derived and/or modified CDS sequence (opt5) from hemagglutinin__InfluenzaA__AGV99097
augaagaccaucauugcccugagcuacauccucugccugguguucgcucagaaacuucccggcaacgacaauuccacagccacgcugugucucgggcaccaugcggucccuaacggaaccauuguuaagacaaucaccaaugauagaauugaggugacaaacgcuaccgaacuggugcaaaauucuagcaucggcgagaucugcgacuccccgcaccagauucuugauggggaaaacuguacacugaucgacgcccuccugggagauccccagugcgacggcuuucagaauaaaaagugggaucuguucgucgagcggucuaaagccuauagcaacuguuacccuuaugacgugcccgauuacgcuucccuccgcucucugguugccagcuccgggacccuugaauuuaauaacgagagcuucaauuggacgggagugacccaaaacggcacaucuuccgcuugcauuagacggagcaauucuuccuuuuucagccgccugaacuggcucacccaucugaauuuuaaguauccugcccuuaacgucacaaugcccaacaaugagcaguucgacaagcuguacaucuggggcgugcaccauccugggaccgauaaagaccagauuuuucucuaugcgcagucuuccggaagaaucacgguuagcacaaagcggucccaacaggccgugauuccgaacaucggcucucgccccagaauccggaauauuccuagccgcaucuccauuuacuggaccaucgucaaacccggggauauucugcugaucaacagcacaggaaaucucaucgcuccuagaggcuacuucaagauucggucugggaaauccagcaucaugcgcucugacgcccccauuggaaaguguaagagcgaaugcaucaccccgaacggcuccauuccuaaugacaaacccuuucagaacgugaauagaaucaccuauggcgcuuguccucgguacgugaagcagucuacacugaaacuugccacggggaugcgcaacguccccgagaagcaaaccagaggaaucuucggcgcgauugccggguuuaucgaaaauggaugggagggcaugguugaugggugguauggauuccggcaccagaacagcgagggcagaggccaggcugccgaccugaaauccacacaagcugccauugaucagaucaaugggaagcucaaccgccugauuggaaaaaccaaugaaaaguuccaccagaucgagaaggaauuuagcgagguggaaggccggauucaggaccuugagaaauacguggaggauacaaagaucgaccuguggucuuauaacgccgaaauccucgucgcucuggagaaccaacauaccauugaucugacggacuccgaaaugaauaaacucuucgagaagaccaaaaagcagcugagagaaaacgcggaggauauggggaauggaugcuuuaagaucuaccacaaaugugacaacgccugcauuggcagcauccgcaaugggacauaugaucaugacguguaccgggacgaggcucuuaacaauagauuccagauuaagggcguugaacugaaaucuggauacaaggauuggauccucuggaucuccuuugccauuagcugcuuccugcuuuguguggcccugcucggcuuuaucaugugggcuugccagaaagggaacauucgcuguaauaucugcauuuga

SEQ ID NO: 202545 - RNA, 1701 nt, Artificial Sequence
  derived and/or modified CDS sequence (opt5) from hemagglutinin__InfluenzaA__AGV99121
augaagaccaucauugcccugagcuacauccucugccugguguucgcucagaaacuucccggcaacgacaauuccacagccacgcugugucucgggcaccaugcggucccuaacggaaccauuguuaagacaaucaccaaugauagaauugaggugacaaacgcuaccgaacuggugcaaaauucuagcaucggcgagaucugcgacuccccgcaccagauucuugauggggaaaacuguacacugaucgacgcccuccugggagauccccagugcgacgauuuucagaauaaaaagugggaccuguucgucgagcggucuaaagccuauagcaacuguuacccuuaugaugugcccgacuacgcuucccuccgcucucugguugccagcuccggcacccuugaauuuaauaacgagagcuucaauugggcuggggugacgcaaaacggaaccucuuccgccugcauuagaggcagcaauucuuccuuuuucagccggcugaacuggcucacacaucugaauuuuaaguauccugcgcuuaacgucaccaugcccaacaaugagcaguucgauaagcuguacaucuggggcgugcaccauccugggacagacaaagaucagauuuuucucuaugcccagucuuccggacgcaucaccguuagcacgaagagaucccaacaggcugugauuccgaacaucggcucucggccccgcaucagaaauauuccuagccggaucuccauuuacuggacaaucgucaaacccggggacauucugcugaucaacagcaccggaaaucucaucgccccucgcggcuacuucaagauuagaucugggaaauccagcaucaugcggucugacgcucccauuggaaaguguaagagcgaaugcaucacaccgaacggcuccauuccuaaugauaaacccuuucagaacgugaaucgcaucaccuauggcgccuguccuagauacgugaagcagucuacccugaaacuugcgacagggaugcggaacguccccgagaagcaaacgcgcggaaucuucggcgccauugcuggguuuaucgaaaauggaugggagggcaugguugacgggugguauggauucagacaccagaacagcgagggccggggccaggccgcugaucugaaauccacccaagccgccauugaccagaucaaugggaagcucaacagacugauuggaaaaacaaaugaaaaguuccaccagaucgagaaggaauuuagcgagguggaaggccgcauucaggaucuugagaaauacguggaggacaccaagaucgaucuguggucuuauaacgcugaacuccuggucgcgcuggagaaccaacauacaaucgaccucaccgauuccgaaaugaauaaacuguucgagaagacgaaaaagcagcuucgggaaaacgccgaggacauggggaauggaugcuuuaagauuuaccacaaaugugauaacgcuugcaucggcagcauuagaaaugggacauaugaccaugacguguaccgcgaugaggcccugaacaaucgguuccagaucaagggcguugaacucaaaucuggauacaaggacuggauucuguggaucuccuuugccaucagcugcuuccuucuguguguggcucuccugggcuuuauuaugugggccugccagaaagggaacaucagauguaauauuugcaucuga

SEQ ID NO: 202546 - RNA, 1701 nt, Artificial Sequence; identical to SEQ ID NO: 202545
  derived and/or modified CDS sequence (opt5) from hemagglutinin__InfluenzaA__AGV99133

SEQ ID NO: 202547 - RNA, 1701 nt, Artificial Sequence; identical to SEQ ID NO: 202539
  derived and/or modified CDS sequence (opt5) from hemagglutinin__InfluenzaA__AGV99145

SEQ ID NO: 202548 - RNA, 1701 nt, Artificial Sequence
  derived and/or modified CDS sequence (opt5) from hemagglutinin__InfluenzaA__AGV99157
augaagaccaucauugcccugagcuacauccucugccugguguucgcucagaaacuucccggcaacgacaauuccacagccacgcugugucucgggcaccaugcggucccuaacggaaccauuguuaagacaaucaccaaugauagaauugaggugacaaacgcuaccgaacuggugcaaaauucuagcaucggcgagaucugcgacuccccgcaccagauucuugauggggaaaacuguacacugaucgacgcccuccugggagauccccagugcgacggcuuucagaauaaaaagugggaucuguucauugagcggucuaaagccuauagcaacuguuacccuuaugacguccccgauuacgcuucccuccgcucucugguggccagcuccgggacccuugaauuuaauaacgagagcuucaauuggacgggaguuacccaaaacggcacaucuuccgcuugcaucagacggagcaauaacuccuuuuucucucgccugaauuggcucacccauagcaacuuuaaguauccugcccugaacgugacaaugcccaauaacgagcaguucgacaaacuuuacauuuggggcguccaccauccugggaccgauaaggaccagaucuuucuguaugcgcagucuuccggaagaauuacggugagcacaaagcggucccaacaggccguuaucccgaauaucggcucucgcccccggauuagaaacaucccuagccgcauuuccaucuacuggaccauugugaaacccggggauauccuccugaucaauagcacaggaaaccugauugcuccuagaggcuacuucaagauccggucugggaaauccagcauuaugcgcucugacacccccaucggaaaguguaagagcgaaugcauuaccccgaauggcuccaucccuaacgacaaacccuuucagaaugucaacagaaucacauauggcgccuguccucgguacgugaagcagucuacgcucaaacuggcuaccgggaugcgcaaugugcccgagaagcaaacaagaggaauuuucggcgccaucgcgggguuuauugaaaacggaugggagggcaugauggaugggugguauggauuccggcaccagaauagcgagggcagaggccaggccgcugaccuuaaauccacccaagccgcuaucgaucagauuaacgggaagcugaaucgccucaucggaaaaacaaacgaaaaguuccaccagauugagaaggaauuuagcgaggucgaaggccggauccaggaccuggagaaauacguugaggauaccaagaucgaccuuuggucuuauaacgccgaacugcucguggcccuggagaaucaacauacgauugaucugacagacuccgaaaugaacaaacucuucgagaagaccaaaaagcagcugagagaaaaugcugaggauauggggaacggaugcuuuaagaucuaccacaaaugugacaaugcgugcauuggcagcauccgcaacgggaccuaugaucaugacguguaccgggacgaggcccuuaauaacagauuccagauuaagggcgucgaacugaaaucuggauacaaggauuggauccucuggaucuccuuugcuauuagcugcuuccugcuuuguguggcccugcucggcuuuaucaugugggccugccagaaagggaauauucgcuguaacaucugcauuuga

SEQ ID NO: 202549 - RNA, 1701 nt, Artificial Sequence; identical to SEQ ID NO: 202066
  derived and/or modified CDS sequence (opt5) from hemagglutinin__InfluenzaA__AGV99169

SEQ ID NO: 202550 - RNA, 1701 nt, Artificial Sequence; identical to SEQ ID NO: 202539
  derived and/or modified CDS sequence (opt5) from hemagglutinin__InfluenzaA__AGV99181

SEQ ID NO: 202551 - RNA, 1701 nt, Artificial Sequence
  derived and/or modified CDS sequence (opt5) from hemagglutinin__InfluenzaA__AGV99193
augaagaccaucauugcccugagcuacauccucugccugguguucgcucagaaacuucccggcaacgacaauuccacagccacgcugugucucgggcaccaugcggucccuaacggaaccauuguuaagacaaucaccaaugauagaauugaggugacaaacgcuaccgaacuggugcaaaauucuagcaucggcgagaucugcgacuccccgcaccagauucuugauggggaaaacuguacacugaucgacgcccuccugggagauccccagugcgacggcuuucagaauaaaaagugggaucuguucgucgagcggucuaaagccuauagcaacuguuacccuuaugacgugcccgauuacgcuucccuccgcucucugguugccagcuccgggacccuugaauuuaauaacgagagcuucaauuggacgggagugacccaaaacggcacaucuuccgcuugcauuagacggagcaauaacuccuuuuucucucgccugaauuggcucacccauagcaacuuuaaguauccugcccugaacgucacaaugcccaauaacgagcaguucgacaaacuuuacaucuggggcgugcaccauccugggaccgauaaggaccagauuuuucuguaugcgcagucuuccggaagaaucacgguuagcacaaagcggucccaacaggccgugauuccgaauaucggcucucgccccagaauccggaacauuccuagccgcaucuccauuuacuggaccaucgucaaacccggggauauucuccugaucaauagcacaggaaaccugaucgcuccuagaggcuacuucaagauucggucugggaaauccagcaucaugcgcucugacacccccauuggaaaguguaagagcgaaugcaucaccccgaauggcuccauuccuaacgacaaacccuuucagaaugugaacagaaucacauauggcgccuguccucgguacgugaagcagucuacgcucaaacuggcuaccgggaugcgcaauguccccgagaagcaaacaagaggaaucuucggcgccauugcgggguuuaucgaaaacggaugggagggcaugauggaugggugguauggauuccggcaccagaauagcgagggcagaggccaggccgcugaccuuaaauccacccaagccgcuauugaucagaucaacgggaagcugaaucgccucauuggaaaaacaaacgaaaaguuccaccagaucgagaaggaauuuagcgagguugaaggccggauucaggaccuggagaaauacguggaggauaccaagaucgaccuuuggucuuauaacgccgaacugcucguggcccuggagaaucaacauacgaucgaucugacagacuccgaaaugaacaaacucuucgagaagaccaaaaagcagcugagagaaaaugcugaggauauggggaacggaugcuuuaagauuuaccacaaaugugacaaugcgugcaucggcagcauucgcaacgggaccuaugaucaugacgucuaccgggacgaggcccuuaauaacagauuccagaucaagggcguggaacugaaaucuggauacaaggauuggauucucuggaucuccuuugcuaucagcugcuuccugcuuuguguugcccugcucggcuuuauuaugugggccugccagaaagggaauauccgcuguaacauuugcaucuga

SEQ ID NO: 202552 - RNA, 1701 nt, Artificial Sequence; identical to SEQ ID NO: 201940
  derived and/or modified CDS sequence (opt5) from hemagglutinin__InfluenzaA__AGV99956

SEQ ID NO: 202553 - RNA, 1701 nt, Artificial Sequence
  derived and/or modified CDS sequence (opt5) from hemagglutinin__InfluenzaA__AGV99986
augaagaccaucauugcccugagcuacauccucugccugguguucgcucagaaacuucccggcaacgacaauuccacagccacgcugugucucgggcaccaugcggucccuaacggaaccauuguuaagacaaucaccaaugauagaauugaggugacaaacgcuaccgaacuggugcaaaauucuagcaucggcgagaucugcgacuccccgcaccagauucuugauggggaaaacuguacacugaucgacgcccuccugggagauccccagugcgacggcuuucagaauaaaaagugggaucuguucgucgagcggucuaaagccuauagcaacuguuacccuuaugacgugcccgauuacgcuucccuccgcucucugauugccagcuccgggacccuugaauuuaauaacgagagcuucaauuggacgggaguuacccaaaacggcacaucuuccgcuugcaucagacggagcaauaacuccuuuuucucucgccugaauuggcucacccauagcaacuuuaaguauccugcccugaacgugacaaugcccaauaacgagcaguucgacaaacuuuacauuuggggcguccaccauccugggaccgauaaagaccagaucuuucuguaugcgcagucuuccggaagaauuacggugagcacaaagcggucccaacaggccguuaucccgaauaucggcucucgcccccggauuagaaacaucccuagccgcauuuccaucuacuggaccauugugaaacccggggauauccuccugaucaauagcacaggaaaccugauugcuccuagaggcuacuucaagauccggucugggaaauccagcauuaugcgcucugacgcccccaucggaaaguguaagagcgaaugcauuaccccgaauggcuccaucccuaacgacaaacccuuucagaaugucaacagaaucaccuauggcgcuuguccucgguacgugaagcagucuacacucaaacuggccacggggaugcgcaaugugcccgagaagcaaaccagaggaauuuucggcgcgaucgccggguuuauugaaaacggaugggagggcaugauggaugggugguauggauuccggcaccagaauagcgagggcagaggccaggcugccgaccuuaaauccacacaagcugccaucgaucagauuaacgggaagcugaaucgccucaucggaaaaaccaacgaaaaguuccaccagauugagaaggaauuuagcgaggucgaaggccggauccaggaccuggagaaauacguugaggauacaaagaucgaccuuuggucuuauaacgccgaacugcucguggcucuggagaaucaacauaccauugaucugacggacuccgaaaugaacaaacucuucgagaagacaaagaagcagcugagagaaaaugcggaggauauggggaacggaugcuuuaagaucuaccacaaaugugacaaugccugcauuggcagcauccgcaacgggaccuaugaucaugacguguaccgggacgaggcucuuaauaacagauuccagauuaagggcgucgaacugaaaucuggauacaaggauuggauccucuggaucuccuuugccauuagcugcuuccugcuuuguguggcccugcucggcuuuaucaugugggcuugccagaaagggaauauucgcuguaacaucugcauuuga

SEQ ID NO: 202554 - RNA, 1701 nt, Artificial Sequence
  derived and/or modified CDS sequence (opt5) from hemagglutinin__InfluenzaA__AGW00065
augaagaccaucauugcccugagcuacauccucugccugguguucgcucagaaacuucccggcaacgacaauuccacagccacgcugugucucgggcaccaugcggucccuaacggaaccauuguuaagacaaucaccaaugauagaauugaggugacaaacgcuaccgaacuggugcaaaauucuagcaucggcgagaucugcgacuccccgcaccagauucuugauggggaaaacuguacacugaucgacgcccuccugggagauccccagugcgacggcuuucagaauaaaaagugggaucuguucgucgagcggucuaaagccuauagcaacuguuacccuuaugacgugcccgauuacaccucccuccgcucucugguugcuagcuccgggacgcuugaauuuaauaacgagagcuucaauuggaccggagugacacaaaacggcaccucuuccgccugcauuagacggagcaauucuuccuuuuucagccgccugaacuggcucacacaucugaauuuuaaguauccugcucuuaacgucaccaugcccaacaaugagcaguucgacaagcuguacaucuggggcgugcaccauccugggacggauaaagaccagauuuuucucuaugcccagucuuccggaagaaucacaguuagcaccaagcggucccaacaggcggugauuccgaacaucggcucucgccccagaauccggaauauuccuagccgcaucuccauuuacuggacaaucgucaaacccggggauauucugcugaucaacagcaccggaaaucucaucgccccuagaggcuacuucaagauucggucugggaaauccagcaucaugcgcucugacgcucccauuggaaaguguaagagcgaaugcaucaccccgaacggcuccauuccuaaugacaaacccuuucagaacgugaauagaaucacauauggcgccuguccucgguacgugaagcagucuacgcugaaacuugcuaccgggaugcgcaacguccccgagaagcaaacaagaggaaucuucggcgccauugcgggguuuaucgaaaauggaugggagggcaugguugaugggugguauggauuccggcaccagaacagcgagggcagaggccaggccgcugaccugaaauccacccaagccgcuauugaucagaucaaugggaagcucaaccgccugauuggaaaaacaaaugaaaaguuccaccagaucgagaaggaauuuagcgagguggaaggccggauucaggaccuugagaaauacguggaggauaccaagaucgaccuguggucuuauaacgccgaacuccuggucgcccuggagaaccaacauacgaucgaucucacagacuccgaaaugaauaaacuguucgagaagaccaaaaagcagcuuagagaaaacgcugaggauauggggaauggaugcuuuaagauuuaccacaaaugugacaacgcgugcaucggcagcauucgcaaugggaccuaugaucaugacguguaccgggacgaggcccugaacaauagauuccagaucaagggcguugaacucaaaucuggauacaaggauuggauucuguggaucuccuuugcuaucagcugcuuccuucuguguguggcccuccugggcuuuauuaugugggccugccagaaagggaacauccgcuguaauauuugcaucuga

SEQ ID NO: 202555 - RNA, 1701 nt, Artificial Sequence; identical to SEQ ID NO: 202066
  derived and/or modified CDS sequence (opt5) from hemagglutinin__InfluenzaA__AGW00077

SEQ ID NO: 202556 - RNA, 1701 nt, Artificial Sequence; identical to SEQ ID NO: 201930
  derived and/or modified CDS sequence (opt5) from hemagglutinin__InfluenzaA__AGW00089

SEQ ID NO: 202557 - RNA, 1701 nt, Artificial Sequence; identical to SEQ ID NO: 202066
  derived and/or modified CDS sequence (opt5) from hemagglutinin__InfluenzaA__AGW00101

SEQ ID NO: 202558 - RNA, 1701 nt, Artificial Sequence
  derived and/or modified CDS sequence (opt5) from hemagglutinin__InfluenzaA__AGW00113
augaagaccaucauugcccugagcuacauccucugccugguguucgcucagaaacuucccggcaacgacaauuccacagccacgcugugucucgggcaccaugcggucccuaacggaaccauuguuaagacaaucaccaaugauagaauugaggugacaaacgcuaccgaacuggugcaaaauucuagcaucggcgagaucugcgacuccccgcaccagauucuugauggggaaaacuguacacugaucgacgcccuccugggagauccccagugcgacggcuuucagaauaaaaagugggaucuguucgucgagcggucuaaagccuauagcaacuguuacccuuaugacgugcccgauuacgcuucccuccgcucucugguugccagcuccgggacccuugaauuuaauaacgagagcuucaauugggcuggagugacgcaaaacggcaccucuuccgccugcauuagaggcagcaauucuuccuuuuucagccggcugaacuggcucacacaucugaauuuuaaguauccugcgcuuaacgucaccaugcccaacaaugagcaguucgacaagcuguacaucuggggagugcaccauccugggacagauaaagaccagaccuuucucuaugcccagucuuccggccgcauuacgguuagcacaaagagaucccaacaggcugugaucccgaacauugggucucggccccgcaucagaaauaucccuagccggauuuccaucuacuggaccauugucaaacccggagauauccugcugauuaacagcacaggcaaucucaucgccccucgcggguacuucaagaucagaucuggaaaauccagcauuaugcggucugacgcucccaucggcaaguguaagagcgaaugcauuaccccgaacggcuccaucccuaaugacaaacccuuucagaacgugaaucgcauuaccuauggggccuguccuagauacgugaagcagucuacacugaaacuugcgacgggaaugcggaacguccccgagaagcaaacccgcggcaucuucggggccaucgcuggauuuauugaaaauggcugggaggggaugguugauggaugguauggcuucagacaccagaacagcgagggccgggggcaggccgcugaccugaaauccacacaagccgccaucgaucagauuaauggaaagcucaacagacugaucggcaaaaccaaugaaaaguuccaccagauugagaaggaauuuagcgagguggaagggcgcauccaggaccuugagaaauacguggaggauacaaagauugaccuguggucuuauaacgcugaacuccuggucgcgcuggagaaccaacauaccaucgaucucacggacuccgaaaugaauaaacuguucgagaagaccaaaaagcagcuucgggaaaacgccgaggauaugggaaauggcugcuuuaagaucuaccacaaaugugacaacgcuugcauugggagcaucagaaauggcacauaugaucaugacguguaccgcgacgaggcccugaacaaucgguuccagauuaagggaguugaacucaaaucuggcuacaaggauuggauccuguggauuuccuuugccaucagcugcuuccuucuguguguggcucuccugggguuuaucaugugggccugccagaaaggaaacauuagauguaauaucugcauuuga

SEQ ID NO: 202559 - RNA, 1701 nt, Artificial Sequence; identical to SEQ ID NO: 202066
  derived and/or modified CDS sequence (opt5) from hemagglutinin__InfluenzaA__AGW00125

SEQ ID NO: 202560 - RNA, 1701 nt, Artificial Sequence; identical to SEQ ID NO: 202066
  derived and/or modified CDS sequence (opt5) from hemagglutinin__InfluenzaA__AGW00137

SEQ ID NO: 202561 - RNA, 1701 nt, Artificial Sequence; identical to SEQ ID NO: 202066
  derived and/or modified CDS sequence (opt5) from hemagglutinin__InfluenzaA__AGW00149

SEQ ID NO: 202562 - RNA, 1701 nt, Artificial Sequence; identical to SEQ ID NO: 202066
  derived and/or modified CDS sequence (opt5) from hemagglutinin__InfluenzaA__AGW00161

SEQ ID NO: 202563 - RNA, 1701 nt, Artificial Sequence; identical to SEQ ID NO: 202066
  derived and/or modified CDS sequence (opt5) from hemagglutinin__InfluenzaA__AGW00173

SEQ ID NO: 202564 - RNA, 1701 nt, Artificial Sequence
  derived and/or modified CDS sequence (opt5) from hemagglutinin__InfluenzaA__AGW00185
augaagaccaucauugcccugagcuacauccucugccugguguucgcucagaaacuucccggcaacgacaauuccacagccacgcugugucucgggcaccaugcggucccuaacggaaccauuguuaagacaaucaccaaugauagaauugaggugacaaacgcuaccgaacuggugcaaaauucuagcaucggcgagaucugcgacuccccgcaccagauucuugauggggaaaacuguacacugaucgacgcccuccugggagauccccagugcgacggcuuucagaauaaaaagugggaucuguucauugagcggucuaaagccuauagcaacuguuacccuuaugacguccccgauuacgcuucccuccgcucucugguggccagcuccgggacccuugaauuuaauaacgagagcuucaauuggacgggaguuacccaaaacggcacaucuuccgcuugcaucagacggagcaauaacuccuuuuucucucgccugaauuggcucacccauagcaacuuuaaguauccugcccugaacgugacaaugcccaauaacgagcaguucgacaaacuuuacauuuggggcguccaccauccugggaccgauaaagaccagaucuuucuguaugcgcagucuuccggaagaauuacggugagcacaaagcggucccaacaggccguuaucccgaauaucggcucucgcccccggauuagaaacaucccuagccgcauuuccaucuacuggaccauugugaaacccggggauauccuccugaucaauagcacaggaaaccugauugcuccuagaggcuacuucaagauccggucugggaaauccagcauuaugcgcucugacgcccccaucggaaaguguaagagcgaaugcauuaccccgaauggcuccaucccuaacgacaaacccuuucagaaugucaacagaaucaccuauggcgcuuguccucgguacgugaagcagucuacacucaaacuggccacggggaugcgcaaugugcccgagaagcaaaccagaggaauuuucggcgcgaucgccggguuuauugaaaacggaugggagggcaugauggaugggugguauggauuccggcaccagaauagcgagggcagaggccaggcugccgaccuuaaauccacacaagcugccaucgaucagauuaacgggaagcugaaucgccucaucggaaaaaccaacgaaaaguuccaccagauugagaaggaauuuagcgaggucgaaggccggauccaggaccuggagaaauacguugaggauacaaagaucgaccuuuggucuuauaacgccgaacugcucguggcucuggagaaucaacauaccauugaucugacggacuccgaaaugaacaaacucuucgagaagacaaagaagcagcugagagaaaaugcggaggauauggggaacggaugcuuuaagaucuaccacaaaugugacaaugccugcauuggcagcauccgcaacgggaccuaugaucaugacguguaccgggacgaggcucuuaauaacagauuccagauuaagggcgucgaacugaaaucuggauacaaggauuggauccucuggaucuccuuugccauuagcugcuuccugcuuuguguggcccugcucggcuuuaucaugugggcuugccagaaagggaauauucgcuguaacaucugcauuuga

SEQ ID NO: 202565 - RNA, 1701 nt, Artificial Sequence; identical to SEQ ID NO: 202066
  derived and/or modified CDS sequence (opt5) from hemagglutinin__InfluenzaA__AGW00709

SEQ ID NO: 202566 - RNA, 1701 nt, Artificial Sequence; identical to SEQ ID NO: 202066
  derived and/or modified CDS sequence (opt5) from hemagglutinin__InfluenzaA__AGW00721

SEQ ID NO: 202567 - RNA, 1701 nt, Artificial Sequence; identical to SEQ ID NO: 202066
  derived and/or modified CDS sequence (opt5) from hemagglutinin__InfluenzaA__AGW00733

SEQ ID NO: 202568 - RNA, 1701 nt, Artificial Sequence; identical to SEQ ID NO: 202066
  derived and/or modified CDS sequence (opt5) from hemagglutinin__InfluenzaA__AGW00745

SEQ ID NO: 202569 - RNA, 1701 nt, Artificial Sequence
  derived and/or modified CDS sequence (opt5) from hemagglutinin__InfluenzaA__AGW00757
augaagaccaucauugcccugagcuacauccucugccugguguucgcucagaaacuucccggcaacgacaauuccacagccacgcugugucucgggcaccaugcggucccuaacggaaccauuguuaagacaaucaccaaugauagaauugaggugacaaacgcuaccgaacuggugcaaaauucuagcaucggcgagaucugcgacuccccgcaccagauucuugauggggaaaacuguacacugaucgacgcccuccugggagauccccagugcgacggcuuucagaauaaaaagugggaucuguucgucgagcggucuaaagccuauagcaacuguuacccuuaugacgugcccgauuacgcuucccuccgcucucugguugccagcuccgggacccuugaauuuaauaacgagagcuucaauugggcuggagugacgcaaaacggcaccucuuccgccugcauuagaggcagcaauucuuccuuuuucagccggcugaacuggcucacacaucugaauuuuaaguauccugcgcuuaacgucaccaugcccaacaaugagcaguucgacaagcuguacaucuggggagugcaccauccugggacagauaaagaccagauuuuucucuaugcccagucuuccggccgcaucaccguuagcacgaagagaucccaacaggcugugauuccgaacaucgggucucggccccgcaucagaaauauuccuagccggaucuccauuuacuggacaaucgucaaacccggagauauucugcugaucaacagcaccggcaaucucaucgccccucgcggguacuucaagauuagaucuggaaaauccagcaucaugcggucugacgcucccauuggcaaguguaagagcgaaugcaucacaccgaacggcuccauuccuaaugacaaacccuuucagaaccugaaucgcaucaccuauggggccuguccuagauacgugaagcagucuacccuuaaacuggcgacaggaaugcggaacgugcccgagaagcaaacgcgcggcaucuucggggccauugcuggauuuaucgaaaauggcugggaggggauggucgauggaugguauggcuucagacaccagaacagcgagggccgggggcaggccgcugaccucaaauccacccaagccgccauugaucagaucaauggaaagcugaacagacuuauuggcaaaacaaaugaaaaguuccaccagaucgagaaggaauuuagcgagguugaagggcgcauucaggaccuggagaaauacguggaggauaccaagaucgaccucuggucuuauaacgcugaacugcugguggcgcucgagaaccaacauacaaucgaucugaccgacuccgaaaugaauaaacuuuucgagaagacgaaaaagcagcugcgggaaaacgccgaggauaugggaaauggcugcuuuaagauuuaccacaaaugugacaacgcuugcaucgggagcauuagaaauggcacauaugaucaugacgucuaccgcgacgaggcccucaacaaucgguuccagaucaagggaguggaacugaaaucuggcuacaaggauuggauucuuuggaucuccuuugccaucagcugcuuccugcucuguguugcucugcugggguuuauuaugugggccugccagaaaggaaacaucagauguaauauuugcaucuga

SEQ ID NO: 202570 - RNA, 1701 nt, Artificial Sequence; identical to SEQ ID NO: 202069
  derived and/or modified CDS sequence (opt5) from hemagglutinin__InfluenzaA__AGW00769

SEQ ID NO: 202571 - RNA, 1701 nt, Artificial Sequence; identical to SEQ ID NO: 201955
  derived and/or modified CDS sequence (opt5) from hemagglutinin__InfluenzaA__AGW00781

SEQ ID NO: 202572 - RNA, 1701 nt, Artificial Sequence; identical to SEQ ID NO: 202554
  derived and/or modified CDS sequence (opt5) from hemagglutinin__InfluenzaA__AGW00793

SEQ ID NO: 202573 - RNA, 1701 nt, Artificial Sequence; identical to SEQ ID NO: 202066
  derived and/or modified CDS sequence (opt5) from hemagglutinin__InfluenzaA__AGW00805

SEQ ID NO: 202574 - RNA, 1701 nt, Artificial Sequence; identical to SEQ ID NO: 201907
  derived and/or modified CDS sequence (opt5) from hemagglutinin__InfluenzaA__AGW00817

SEQ ID NO: 202575 - RNA, 1701 nt, Artificial Sequence; identical to SEQ ID NO: 202553
  derived and/or modified CDS sequence (opt5) from hemagglutinin__InfluenzaA__AGW00829

SEQ ID NO: 202576 - RNA, 1701 nt, Artificial Sequence
  derived and/or modified CDS sequence (opt5) from hemagglutinin__InfluenzaA__AGW00841
augaagaccaucauugcccugagcuacauccucugccugguguucgcucagaaacuucccggcaacgacaauuccacagccacgcugugucucgggcaccaugcggucccuaacggaaccauuguuaagacaaucaccaauggcagaauugaggugacaaacgcuaccgaacuggugcaaaauucuagcaucggggagaucugcgauuccccgcaccagauucuugacggagaaaacuguacacugaucgaugcccuccugggcgacccccagugcgauggguuucagaauaaaaagugggaccuguucgucgagcggucuaaagccuauagcaacuguuacccuuaugaugugcccgacuacgcuucccuccgcucucugguugccagcuccggaacccuugaauuuaauaacgagagcuucaauugggcuggcgugacgcaaaacggcaccucuuccgccugcauuagagggagcaauucuuccuuuuucagccggcugaacuggcucacacaucugaauuuuaaguauccugcgcuuaacgucaccaugcccaacaaugagcaguucgauaagcuguacaucuggggagugcaccauccuggcacagacaaagaucagauuuuucucuaugcccagucuuccgggcgcaucaccguuagcacgaagagaucccaacaggcugugauuccgaacaucggaucucggccccgcaucagaaauauuccuagccggaucuccauuuacuggacaaucgucaaacccggcgacauucugcugaucaacagcaccgggaaucucaucgccccucgcggauacuucaagauuagaucuggcaaauccagcaucaugcggucugaugcucccauuggcaaguguaagagcgaaugcaucacaccgaacggguccauuccuaaugacaaacccuuucagaacgugaaucgcaucaccuauggagccuguccuagauacgugaagcagucuacccugaaacuugcgacaggcaugcggaacguccccgagaagcaaacgcgcgggaucuucggagccauugcuggcuuuaucgaaaaugggugggagggaaugguugacggcugguauggcuucagacaccagaacagcgaggggcggggacaggccgcugaucugaaauccacccaagccgccauugaccagaucaauggcaagcucaacagacugauugggaaaacaaaugaaaaguuccaccagaucgagaaggaauuuagcgagguggaaggacgcauucaggaucuugagaaauacguggaggacaccaagaucgaucuguggucuuauaacgcugaacuccuggucgcgcuggagaaccaacauacaaucgaccucaccgauuccgaaaugaauaaacuguucgagaagacgaaaaagcagcuucgggaaaacgccgaggacaugggcaaugggugcuuuaagauuuaccacaaaugugauaacgcuugcaucggcagcauuagaaauggaacauaugaccaugauguguaccgcgacgaggcccugaacaaucgguuccagaucaagggcguugaacucaaaucuggguacaaggacuggauucuguggaucuccuuugccaucagcugcuuccuucuguguguggcucuccugggauuuauuaugugggccugccagaaaggcaacaucagauguaauauuugcaucuga

SEQ ID NO: 202577 - RNA, 1701 nt, Artificial Sequence
  derived and/or modified CDS sequence (opt5) from hemagglutinin__InfluenzaA__AGW00853
augaagaccaucauugcccugagcuacauccucugccugguguucgcucagaaacuucccggcaacgacaauuccacagccacgcugugucucgggcaccaugcggucccuaacggaaccauuguuaagacaaucaccaaugauagaauugaggugacaaacgcuaccgaacuggugcaaaauucuagcaucggcgagaucugcgacuccccgcaccagauucuugauggggaaaacuguacacugaucgacgcccuccugggagauccccagugcgacggcuuucagaauaaaaagugggaucuguucgucgagcggucuaaagccuauagcaacuguuacccuuaugacgugcccgauuacgcuucccuccgcucucugguugccagcuccgggacccuugaauuuaauaacgagagcuucaauuggacgggagugacccaaaacggcacaucuuccgcuugcauuagacggagcaauucuuccuuuuucagccgccugaacuggcucacccaucugaauuuuaaguauccugcccuuaacgucacaaugcccaacaaugagcaguucgacaagcuguacaucuggggcgugcaccauccugggaccgauaaagaccagauuuuucucuaugcgcagccgucuggaagaaucacgguuuccacaaagcggagccaacaggccgugauucccaacaucggcucccgcccuagaauccggaauauucccucucgcaucagcauuuacuggaccaucgucaaaccuggggauauucugcugaucaacuccacaggaaaucucaucgcucccagaggcuacuucaagauucggagcgggaaaucuuccaucaugcgcagcgacgccccgauuggaaaguguaagucugaaugcaucaccccuaacggcagcauucccaaugacaaaccuuuucagaacgugaauagaaucaccuauggcgcuuguccccgguacgugaagcaguccacacugaaacuugccacggggaugcgcaacguccccgagaagcaaaccagaggaaucuucggcgcgauugccggguuuaucgaaaauggaugggagggcaugguugaugggugguauggauuccggcaccagaacucugagggcagaggccaggcugccgaccugaaaagcacacaagcugccauugaucagaucaaugggaagcucaaccgccugauuggaaaaaccaaugaaaaguuccaccagaucgagaaggaauuuuccgagguggaaggccggauucaggaccuugagaaauacguggaggauacaaagaucgaccuguggagcuauaacgccgaacuccuggucgcucuggagaaccaacauaccaucgaucucacggacucugaaaugaauaaacuguucgagaagaccaaaaagcagcuuagagaaaacgcggaggauauggggaauggaugcuuuaagauuuaccacaaaugugacaacgccugcaucggcuccauucgcaaugggacauaugaucauaacguguaccgggacgaggcucugaauaacagauuccagaucaagggcguugaacucaaaagcggauacaaggacuggauucuguggaucucuuuugccaucuccugcuuccuucuguguguggcccuccugggcuuuauuaugugggcuugccagaaagggaauauccgcuguaacauuugcaucuga

SEQ ID NO: 202578 - RNA, 1701 nt, Artificial Sequence; identical to SEQ ID NO: 201930
  derived and/or modified CDS sequence (opt5) from hemagglutinin__InfluenzaA__AGW00865

SEQ ID NO: 202579 - RNA, 1701 nt, Artificial Sequence
  derived and/or modified CDS sequence (opt5) from hemagglutinin__InfluenzaA__AGW00877
augaagaccaucauugcccugagcuacauccucugccugguguucgcucaggagcuucccggcaacgacgauuccacagccacgcugugucucgggcaccaugcggucccuaauggaaccauuguuaaaacaaucaccaacgaccaaauugaagugacaaaugcuaccgagcuggugcagucuagcuccacaggcgaaaucugcaacucuccgcaccagauccuugauggggagaauuguacccugauugacgcccuccugggagauccccagugcgacggcuuucaaaacaagaaaugggaucuguucgucgaaagaagcaaggcccauuccaauuguuauccuuacgacgugcccgauuaugcuucucuccggagccugguugccuccagcgggacgcuugaguuuaacaaugagucuuucaacuggaccggagugacacagaauggcaccuccagcgcuugcauccgcagaucuaacaauuccuuuuucagccggcugaacuggcucacacaccugaauuuuaaauacccugcccuuaacgucaccaugcccaacaaugaacaguucgacaagcuguauauuuggggcgugcaucacccugggacggauaaggaccagaucuuucucuacgcgcaagccucuggacgcauuacaguuuccaccaaaagaagccagcaggcugugaucccgaacauuggcuuccggccccgcgucagaaauaucccuucccgggugucuaucuauuggacaauugugaagcccggggauauccugcugauuaacagcaccggaaaucucaucgccccucgcggcuacuuuaaaauuagauccggaaagagcucuaucaugcgguccgacgcucccaucgggaaauguaacagcgccugcauuaccccgaauggcucuaucccuaacgacaagcccuuccagaaugucaaccgcauuacauacggcgcguguccuagauauguuaagcaaaauacgcugaaacuugccaccgggaugcggaacgugcccgagaagcagacacgcggaaucuuuggcgcuauugccggguucaucgaaaauggaugggagggcaugguggaugggugguacggauucagacaccagaacagcgagggccggggccaagcugccgaccugaaauccacccaggccgcuaucgaucagauuaaugggaagcucaacagacugaucggaaaaacaaacgaaaaguuucaucagauugagaaagaguucucugaagucgaaggccgcauccaagaccuugagaaguauguggaggauaccaagauugaccuguggagcuacaaugcggaacuccugguugcccuggagaaccagcacacgaucgaucucacagacuccgaaaugaauaaacuguuugagaagaccaaaaagcagcuucgggaaaacgcugaggauauggggaauggaugcuucaaaauuuaucauaagugugacaacgccugcaucggcagcaucagaaaugggaccuacgaucacgacguguaucgcgacgaggcccugaacaaucgguuucagauuaagggcgucgaacucaaaucuggauacaaggauuggauccuguggauuuccuucgcuaucagcugcuuucuucuguguguggcccuccugggcuucauuaugugggcgugccaaaaagggaacaucagauguaauaucugcauuuga

SEQ ID NO: 202580 - RNA, 1701 nt, Artificial Sequence
  derived and/or modified CDS sequence (opt5) from hemagglutinin__InfluenzaA__AGW00889
augaagaccaucauugcccugagcuacauccucugccugguguucgcucagaaacuucccggcaacgacaauuccacagccacgcugugucucgggcaccaugcggucccuaacggaaccauuguuaagacaaucaccaaugauagaauugaggugacaaacgcuaccgaacuggugcaaaauucuagcaucggcgagaucugcgacuccccgcaccagauucuugauggggaaaacuguacacugaucgacgcccuccugggagauccccagugcgacggcuuucagaauaaaaagugggaucuguucgucgagcggucuaaagccuauagcaacuguuacccuuaugacgugcccgauuacgcuucccuccgcucucugguugccagcuccgggacccuugaauuuaauaacgagagcuucaauuggacgggagugacccaaaacggcacaucuuccgcuugcauuagacggagcaauucuuccuuuuucagccgccugaacuggcucacccaucugaauuuuaaguauccugcccuuaacgucacaaugcccaacaaugagcaguucgacaagcuguacaucuggggcgugcaccauccugggaccgauaaagaccagauuuuucucuaugcgcagucuuccggaagaaucacgguuagcacaaagcggucccaacaggccgugauuccgaacaucggcucucgccccagaauccggaauauuccuagccgcaucuccauuuacuggaccaucgucaaacccggggauauucugcugaucaacagcacaggaaaucucaucgcuccuagaggcuacuucaagauucggucugggaaauccagcaucaugcgcucugacgcccccauuggaaaguguaagagcgaaugcaucaccccgaacggcuccauuccuaaugacaaacccuuucagaacgugaauagaaucaccuauggcgcuuguccucgguacgugaagcagucuacacugaaacuugccacggggaugcgcaacguccccgagaagcaaaccagaggaaucuucggcgcgauugccggguuuaucgaaaauggaugggagggcaugguugaugggugguauggauuccggcaccagaacagcgagggcagaggccaggcugccgaccugaaauccacacaagcugccauugaucagaucaaugggaagcucaaccgccugauuggaaaaaccaaugaaaaguuccaccagaucgagaaggaauuuagcgagguggaaggccggauucaggaccuugagaaauacguggaggauacaaagaucgaccuguggucuuauaacgccgaacuccuggucgcucuggagaaccaacauaccaucgaucucacggacuccgaaaugaauaaacuguucgagaagaccaaaaagcagcuuagagaaaacgcggaggauauggggaauggaugcuuuaagauuuaccacaaaugugacaacgccugcaucggcagcauucgcaaugggacauaugaucauaacguguaccgggacgaggcucugaauaacagauuccagaucaagggcguugaacucaaaucuggauacaaggacugggugcuguggauuuccuuugccaucagcugcuuccuucugugugucgcccuccugggcuuuaucaugugggcuugccagaaagggaauauucgcuguaacaucugcauuuga

SEQ ID NO: 202581 - RNA, 1701 nt, Artificial Sequence; identical to SEQ ID NO: 201930
  derived and/or modified CDS sequence (opt5) from hemagglutinin__InfluenzaA__AGW00901

SEQ ID NO: 202582 - RNA, 1701 nt, Artificial Sequence; identical to SEQ ID NO: 201930
  derived and/or modified CDS sequence (opt5) from hemagglutinin__InfluenzaA__AGW00913

SEQ ID NO: 202583 - RNA, 1701 nt, Artificial Sequence; identical to SEQ ID NO: 202066
  derived and/or modified CDS sequence (opt5) from hemagglutinin__InfluenzaA__AGW00931

SEQ ID NO: 202584 - RNA, 1701 nt, Artificial Sequence; identical to SEQ ID NO: 202066
  derived and/or modified CDS sequence (opt5) from hemagglutinin__InfluenzaA__AGW01244

SEQ ID NO: 202585 - RNA, 1701 nt, Artificial Sequence; identical to SEQ ID NO: 201940
  derived and/or modified CDS sequence (opt5) from hemagglutinin__InfluenzaA__AGW01256

SEQ ID NO: 202586 - RNA, 1701 nt, Artificial Sequence
  derived and/or modified CDS sequence (opt5) from hemagglutinin__InfluenzaA__AGW01295
augaagaccaucauugcccugagcuacauccucugccugguguucgcucagaaacuucccggcaacgacaauuccacagccacgcugugucucgggcaccaugcggucccuaacggaaccauuguuaagacaaucaccaaugauagaauugaggugacaaacgcuaccgaacuggugcaaaauucuagcaucggcgagaucugcgacuccccgcaccagauucuugauggggaaaacuguacacugaucgacgcccuccugggagauccccagugcgacggcuuucagaauaaaaagugggaucuguucgucgagcggucuaaagccuauagcaacuguuacccuuaugacgugcccgauuacgcuucccuccgcucucugguugccagcuccgggacccuugaauuuaauaacgagagcuucaauuggacgggagugacccaaaacggcacaucuuccgcuugcauuagacggagcaauucuuccuuuuucagccgccugaacuggcucacccaucugaauuuuaaguauccugcccuuaacgucacaaugcccaacaaugagcaguucgacaagcuguacaucuggggcgugcaccauccugggaccgauaaagaccagauuuuucucuaugcgcagucuuccggaagaaucacgguuagcacaaagcggucccaacaggccgugauuccgaacaucggcucucgccccagaauccggaauauuccuagccgcaucuccauuuacuggaccaucgucaaacccggggauauucugcugaucaacagcacaggaaaucucaucgcuccuagaggcuacuucaagauucggucugggaaauccagcaucaugcgcucugacgcccccauuggaaaguguaagagcgaaugcaucaccccgaacggcuccauuccuaaugacaaacccuuucagaacgugaauagaaucaccuauggcgcuuguccucgguacgugaagcagucuacacugaaacuugccacggggaugcgcaacguccccgagaagcaaaccagaggaaucuucggcgcgauugccggguuuaucgaaaauggaugggagggcaugguugaugggugguauggauuccggcaccagaacagcgagggcagaggccaggcugccgaccugaaauccacacaagcugccauugaucagaucaaugggaagcucaaccgccugauuggaaaaaccaaugaaaaguuccaccagaucgagaaggaauuuagcgagguggaaggccggauucaggaccuugagaaauacguggaggauacaaagaucgaccuguggucuuauaacgccgaaauccucgucgcucuggagaaccaacauaccauugaucugacggacuccgaaaugaauaaacucuucgagaagaccaaaaagcagcugagagaaaacgcggaggauauggggaauggaugcuuuaagaucuaccacaaaugugacaacgccugcauuggcagcauccgcaaugggacauaugaucauaacguguaccgggacgaggcucuuaauaacagauuccagauuaagggcguugaacugaaaucuggauacaaggacuggauccucuggaucuccuuugccauuagcugcuuccugcuuuguguggcccugcucggcuuuaucaugugggcuugccagaaagggaauauucgcuguaacaucugcauuuga

SEQ ID NO: 202587 - RNA, 1701 nt, Artificial Sequence; identical to SEQ ID NO: 201930
  derived and/or modified CDS sequence (opt5) from hemagglutinin__InfluenzaA__AGW01307

SEQ ID NO: 202588 - RNA, 1701 nt, Artificial Sequence
  derived and/or modified CDS sequence (opt5) from hemagglutinin__InfluenzaA__AGW01319
augaagaccaucauugcccugagcuacauccucugccugguguucgcucaggagcuucccggcaacgacgauuccacagccacgcugugucucgggcaccaugcggucccuaauggaaccauuguuaaaacaaucaccaacgaccaaauugaagugacaaaugcuaccgagcuggugcagucuagcuccacaggcgaaaucugcaacucuccgcaccagauccuugauggggagaauuguacccugauugacgcccuccugggagauccccagugcgacggcuuucaaaacaagaaaugggaucuguucgucgaaagaagcaaggcccauuccaauuguuauccuuacgacgugcccgauuaugcuucucuccggagccugguugccuccagcgggacgcuugaguuuaacaaugagucuuucaacuggaccggagugacacaggacggcaccuccagcgcuugcauccgcagaucuaauaacuccuuuuucagccggcugaauuggcucacacaccugaacuuuaaauacccugcccuuaaugucaccaugcccaacaacgaacaguucgauaagcuguauauuuggggcgugcaucacccugggacggacaaggaucagaucuuucucuacgcgcaagccucuggacgcauuacaguuuccaccaaaagaagccagcaggcugugaucccgaauauuggcucccggccccgcgucagaaacaucccuucucgggugagcaucuauuggacaauugugaagcccggggacauccugcugauuaauuccaccggaaaccucaucgccccucgcggcuacuucaaaauuagaagcgggaagucuuccaucaugcggagcgacgcucccaucggaaaauguaauucugccugcauuaccccgaacggcagcaucccuaaugauaagcccuuucagaacgucaaucgcauuacauacggcgcguguccuagauauguuaagcaaaacacgcugaaacuugccaccgggaugcggaaugugcccgagaagcagacacgcggaaucuucggcgcuauugccggguuuaucgaaaacggaugggagggcaugguggacgggugguacggauucagacaccaaaauuccgagggccggggccaggcugccgaucugaaaucuacccaggccgcuaucgaccagauuaacgggaagcucaauaaacugaucggaaagacaaacgaaaaauuccaucagauugagaaggaauuuagcgaggucgaaggcagaauccaagaucuugagaaguauguggaggacaccaaaauugaucugugguccuacaacgcggaacuccugguugcccuggagaaucagcacacgaucgaccucacagauagcgaaaugaacaagcuguucgagaaaaccaagaaacagcuucgcgaaaaugcugaggacauggggaacggaugcuuuaagauuuaucauaagugugauaaugccugcaucggcucuauccggaacgggaccuacgaccacgacguguauagagaugaggcccugaauaaccgcuuccagauuaaaggcgucgaacucaaguccggauacaaagacuggauccuguggauuagcuuugcuaucucuugcuuccuucuguguguggcccuccugggcuuuauuaugugggcgugccaaaaggggaauauccgguguaacaucugcauuuga

SEQ ID NO: 202589 - RNA, 1701 nt, Artificial Sequence
  derived and/or modified CDS sequence (opt5) from hemagglutinin__InfluenzaA__AGW01331
augaagaccaucauugcccugagcuacauccucugccugguguucgcucagaaacuucccggcaacgacaauuccacagccacgcugugucucgggcaccaugcggucccuaacggaaccauuguuaagacaaucaccaaugauagaauugaggugacaaacgcuaccgaacuggugcaaaauucuagcaucggcgagaucugcgacuccccgcaccagauucuugauggggaaaacuguacacugaucgacgcccuccugggagauccccagugcgacggcuuucagaauaaaaagugggaucuguucgucgagcggucuaaagccuauagcaacuguuacccuuaugacgugcccgauuacgcuucccuccgcucucugguugccagcuccgggacccuugaauuuaauaacgagagcuucaauugggcuggagugacgcaaaacggcaccucuuccgccugcauuagaggcagcaauucuuccuuuuucagccggcugaacuggcucacacaucugaauuuuaaguauccugcgcuuaacgucaccaugcccaacaaugagcaguucgacaagcuguacaucuggggagugcaccauccugggacagauaaagaccagauuuuucucuaugcccagucuuccggccgcaucaccguuagcacgaagagaucccaacaggcugugauuccgaacaucgggucucggccccgcaucagaaauauuccuagccggaucuccauuuacuggacaaucgucaaacccggagauauucugcugaucaacagcaccggcaaucucaucgccccucgcggguacuucaagauuagaucuggaaaauccagcaucaugcggucugacgcucccauuggcaaguguaagagcgaaugcaucacaccgaacggcuccauuccuaaugacaaacccuuucagaacgugaaucgcaucaccuauggggccuguccuagauacgugaagcagucuacccugaaacuugcgacaggaaugcggaacguccccgagaagcaaacgcgcggcaucuucggggccauugcuggauuuaucgaaaauggcugggaggggaugguugauggaugguauggcuucagacaccagaacagcgagggccgggggcaggccgcugaccugaaauccacccaagccgccauugaucagaucaauggaaagcucaacagacugauuggcaaaacaaaugaaaaguuccaccagaucgagaaggaauuuagcgagguggaagggcgcauucaggaccuugagaaauacguggaggauaccaagaucgaccuguggucuuauaacgcugaacuccuggucgcgcuggagaaccaacauacaaucgaucucaccgacuccgaaaugaauaaacuguucgagaagacgaaaaagcagcuucgggaaaacgccgaggauaugggaaauggcugcuuuaagauuuaccacaaaugugacaacgcuugcaucgggagcauuagaaauggcacauaugagcaugauguguaccgcgacgaagcccugaacaaucgguuccagaucaagggaguugagcucaaaucuggcuacaaggacuggauucuguggaucuccuuugccaucagcugcuuccuucuguguguggcucuccugggguuuauuaugugggccugccagaaaggaaacaucagauguaauauuugcaucuga

SEQ ID NO: 202590 - RNA, 1701 nt, Artificial Sequence; identical to SEQ ID NO: 202066
  derived and/or modified CDS sequence (opt5) from hemagglutinin__InfluenzaA__AGW01343

SEQ ID NO: 202591 - RNA, 1701 nt, Artificial Sequence; identical to SEQ ID NO: 202069
  derived and/or modified CDS sequence (opt5) from hemagglutinin__InfluenzaA__AGW01355

SEQ ID NO: 202592 - RNA, 1701 nt, Artificial Sequence; identical to SEQ ID NO: 201940
  derived and/or modified CDS sequence (opt5) from hemagglutinin__InfluenzaA__AGW01367

SEQ ID NO: 202593 - RNA, 1701 nt, Artificial Sequence; identical to SEQ ID NO: 202066
  derived and/or modified CDS sequence (opt5) from hemagglutinin__InfluenzaA__AGW01391

SEQ ID NO: 202594 - RNA, 1701 nt, Artificial Sequence
  derived and/or modified CDS sequence (opt5) from hemagglutinin__InfluenzaA__AGW01403
augaagaccaucauugcccugagcuacauccucugccugauuuucgcucagaaacuucccggcaacgacaauuccacagccacgcugugucucgggcaccaugcggugccuaacggaaccaucgucaagacaauuaccaaugaucaaaucgagguuacaaacgcuaccgaacuggugcagucuagcuccacaggcgagaucugcaauucuccgcaccagauucuugacggggaaaacuguacccugaucgaugcccuccugggagacccccagugcgauggcuuucaaaauaaaaagugggaccuguucguggagagaagcaaagcccauuccaacuguuauccuuacgauguccccgacuaugcuucucuccggagccugguggccuccagcgggacgcuugaauuuaauaacgagucuuucaauuggaccggaguuacacagaacggcaccuccagcgcuugcauucgcagaucuaauaacuccuuuuucagccggcugaauuggcucacacaccugaacuuuaaguacccugcccuuaacgugaccaugcccaauaacgagcaguucgauaagcuguauaucuggggcguccaucacccugggacggacaaagaucagauuuuucucuacgcgcaagccgcuggacgcaucacagugucuaccaagagaucccagcaggccguuauuccgaauaucggcagccggccccgcgugagaaacaucccuucccgggucucuauuuauuggacaaucgugaaacccggggacauucugcugaucaauagcaccggaaaccucauugcuccucgcggcuacuucaagaucagauccgggaaaagcucuaucaugcgguccgaugcccccauuggaaaguguaauagcgcgugcaucaccccgaacggcucuauuccuaaugacaagcccuuucagaacgugaaucgcaucacauacggcgccuguccuagauaugucaaacaaaacacgcugaaacuugcuaccgggaugcggaauguucccgaaaaacagacacgcggaauuuucggcgccaucgcuggguuuaucgagaacggaugggaaggcaugguggacgggugguacggauucagacaccagaauagcgagggccggggccaagccgccgaucugaaguccacccaggcugcgauugaccagaucaacgggaaacucaacagacugauuggaaagacaaaugagaaauuccaucagaucgaaaaggaguuuucugaaguggagggccgcauucaagaucuugaaaaguaugucgaggacaccaaaaucgaucuguggagcuacaacgccgagcuccugguggcucuggaaaaucagcacacgauugaccucacagauuccgagaugaacaagcuguucgaaaagaccaagaaacagcuucgggagaaugccgaagacauggggaacggaugcuuuaagaucuaucauaagugugauaaugccugcaucggcagcauuagaaacgggaccuacgaccacuauguuuaccgcgaugaggcucugaauaaccgguuccagaucaaaggcguggagcucaagucuggauacaaagacuggauucuguggaucuccuuugccacaagcugcuuccuucugugugucgcgcuccugggcuuuauuaugugggcuugccaaaaggggaauaucagauguaacaucugcauuuga

SEQ ID NO: 202595 - RNA, 1701 nt, Artificial Sequence; identical to SEQ ID NO: 201930
  derived and/or modified CDS sequence (opt5) from hemagglutinin__InfluenzaA__AGW01415

SEQ ID NO: 202596 - RNA, 1701 nt, Artificial Sequence; identical to SEQ ID NO: 201930
  derived and/or modified CDS sequence (opt5) from hemagglutinin__InfluenzaA__AGW01427

SEQ ID NO: 202597 - RNA, 1701 nt, Artificial Sequence; identical to SEQ ID NO: 201930
  derived and/or modified CDS sequence (opt5) from hemagglutinin__InfluenzaA__AGW01439

SEQ ID NO: 202598 - RNA, 1701 nt, Artificial Sequence
  derived and/or modified CDS sequence (opt5) from hemagglutinin__InfluenzaA__AGW01451
augaagaccaucauugcccugagcuacauccucugccugguguucgcucagaaacuucccggcaacgacaauuccacagccacgcugugucucgggcaccaugcggucccuaacggaaccauuguuaagacaaucaccaaugauagaauugaggugacaaacgcuaccgaacuggugcaaaauucuagcaucggcgagaucugcgacuccccgcaccagauucuugauggggaaaacuguacacugaucgacgcccuccugggagauccccagugcgacggcuuucagaauaaaaagugggaucuguucgucgagcggucuaaagccuauagcaacuguuacccuuaugacgugcccgauuacgcuucccuccgcucucugguugccagcuccgggacccuugaauuuaauaacgagagcuucaauugggcuggagugacgcaaaacggcaccucuuccgccugcauuagaggcagcaauucuuccuuuuucagccggcugaacuggcucacacaucugaauuuuaaguauccugcgcuuaacgucaccaugcccaacaaugagcaguucgacaagcuguacaucuggggagugcaccauccugggacagauaaagaccagauuuuucucuaugcccagucuuccggccgcaucaccguuagcacgaagagaucccaacaggcugugauuccgaacaucgggucucggccccgcaucagaaauauuccuagccggaucuccauuuacuggacaaucgucaaacccggagauauucugcugaucaacagcaccggcaaucucaucgccccucgcggguacuucaagauuagaucuggaaaauccagcaucaugcggucugacgcucccauuggcaaguguaagagcgaaugcaucacaccgaacggcuccauuccuaaugacaaacccuuucagaacgugaaucgcaucaccuauggggccuguccuagauacgugaagcagucuacccugaaacuugcgacaggaaugcggaacguccccgagaagcaaacgcgcggcaucuucggggccauugcuggauuuaucgaaaauggcugggaggggaugauggauggaugguauggcuucagacaccagaacagcgagggccgggggcaggccgcugaccugaaauccacccaagccgccauugaucagaucaauggaaagcucaacagacugauuggcaaaacaaaugaaaaguuccaccagaucgagaaggaauuuagcgagguugaagggcgcauucaggaccuugagaaauacgugguggauaccaagaucgaccuguggucuuauaacgcugagcuccuggucgcgcuggaaaaccaacauacaaucgaucucaccgacuccgagaugaauaaacuguucgaaaagacgaaaaagcagcuucgggagaacgccgaagauaugggaaauggcugcuuuaagauuuaccacaaaugugacaacgcuugcaucgggagcauuagaaauggcacauaugaucaugacguguaccgcgacgaggcccugaacaaucgguuccagaucaagggaguugagcucaaaucuggcuacaaggauuggauucuguggaucuccuuugccaucagcugcuuccuucuguguguggcucuccugggguuuauuaugugggccugccagaaaggaaacaucagauguaauauuugcaucuga

SEQ ID NO: 202599 - RNA, 1701 nt, Artificial Sequence; identical to SEQ ID NO: 202066
  derived and/or modified CDS sequence (opt5) from hemagglutinin__InfluenzaA__AGW01463

SEQ ID NO: 202600 - RNA, 1701 nt, Artificial Sequence; identical to SEQ ID NO: 202066
  derived and/or modified CDS sequence (opt5) from hemagglutinin__InfluenzaA__AGW01475

SEQ ID NO: 202601 - RNA, 1701 nt, Artificial Sequence
  derived and/or modified CDS sequence (opt5) from hemagglutinin__InfluenzaA__AGW01487
augaagaccaucauugcccugagcuacauccucugccugguguucgcucagaaacuucccggcaacgacaauuccacagccacgcugugucucgggcaccaugcggucccuaacggaaccauuguuaagacaaucaccaaugauagaauugaggugacaaacgcuaccgaacuggugcaaaauucuagcaucggcgagaucugcgacuccccgcaccagauucuugauggggaaaacuguacacugaucgacgcccuccugggagauccccagugcgacggcuuucagaauaaaaagugggaucuguucgucgagcggucuaaagccuauagcaacuguuacccuuaugacgugcccgauuacgcuucccuccgcucucugguugccagcuccgggacccuugaauuuaauaacgagagcuucaauuggacgggagugacccaaaacggcacaucuuccgcuugcauuagacggagcaauaacuccuuuuucucucgccugaauuggcucacccauagcaacuuuaaguauccugcccugaacgucacaaugcccaauaacgagcaguucgacaaacuuuacaucuggggcgugcaccauccugggaccggaaaagaucagauuuuucuguaugcgcagucuuccggcagaaucacgguuagcacaaagcggucccaacaggccgugauuccgaauaucgggucucgccccagaauccggaacauuccuagccgcaucuccauuuacuggaccaucgucaaacccggagacauucuccugaucaauagcacaggcaaccugaucgcuccuagaggguacuucaagauucggucuggaaaauccagcaucaugcgcucugaugcccccauuggcaaguguaagagcgaaugcaucaccccgaauggcuccauuccuaacgacaaacccuuucagaaugugaacagaaucaccuauggggcuuguccucgguacgugaagcagucuacacucaaacuggccacgggaaugcgcaauguccccgagaagcaaaccagaggcaucuucggggcgauugccggauuuaucgaaaacggcugggaggggaugauggacggaugguauggcuuccggcaccagaauagcgagggcagagggcaggcugccgaucuuaaauccacacaagcugccauugaccagaucaacggaaagcugaaucgccucauuggcaaaaccaacgaaaaguuccaccagaucgagaaggaauuuagcgagguugaagggcggauucaggaucuggagaaauacguggaggacacaaagaucgaucuuuggucuuauaacgccgaacugcucguggcucuggagaaucaacauaccaucgaccugacggauuccgaaaugaacaaacucuucgagaagacaaagaagcagcugagagaaaaugcggaggacaugggaaacggcugcuuuaagauuuaccacaaaugugauaaugccugcaucgggagcauucgcaacggcaccuaugaccaugaugucuaccgggacgaggcucuuaauaacagauuccagaucaagggaguggaacugaaaucuggcuacaaggacuggauucucuggaucuccuuugccaucagcugcuuccugcuuuguguugcccugcucggguuuauuaugugggcuugccagaaaggaaauauccgcuguaacauuugcaucuga

SEQ ID NO: 202602 - RNA, 1701 nt, Artificial Sequence; identical to SEQ ID NO: 201930
  derived and/or modified CDS sequence (opt5) from hemagglutinin__InfluenzaA__AGW01499

SEQ ID NO: 202603 - RNA, 1701 nt, Artificial Sequence
  derived and/or modified CDS sequence (opt5) from hemagglutinin__InfluenzaA__AGW01511
augaagaccaucauugcccugagcuacauccucugccugguguucgcucagaaacuucccggcaacgacaauuccacagccacgcugugucucgggcaccaugcggucccuaacggaaccauuguuaagacaaucaccaaugauagaauugaggugacaaacgcuaccgaacuggugcaaaauucuagcaucggcgagaucugcgacuccccgcaccagauucuugauggggaaaacuguacacugaucgacgcccuccugggagauccccagugcgacggcuuucagaauaaaaagugggaucuguucgucgagcggucuaaagccuauagcaacuguuacccuuaugacgugcccgauuacgcuucccuccgcucucugguugccagcuccgggacccuugaauuuaauaacgagagcuucaauugggcuggagugacgcaaaacggcaccucuuccgccugcauuagaggcagcaauucuuccuuuuucagccggcugaacuggcucacacaucugaauuuuaaguauccugcgcuuaacgucaccaugcccaacaaugagcaguucgacaagcuguacaucuggggagugcaccauccugggacagauaaagaccagauuuuucucuaugcccagucuuccggccgcaucaccguuagcacgaagagaucccaacaggcugugauuccgaacaucgggucucggccccgcaucagaaauauuccuagccggaucuccauuuacuggacaaucgucaaacccggagauauucugcugaucaacagcaccggcaaucucaucgccccucgcggguacuucaagauuagaucuggaaaauccagcaucaugcggucugacgcucccauuggcaaguguaagagcgaaugcaucacaccgaacggcuccauuccuaaugacaaacccuuucagaacgugaaucgcaucaccuauggggccuguccuagauacgugaagcagucuacccugaaacuugcgacaggaaugcggaacguccccgagaagcaaacgcgcggcaucuucggggccauugcuggauuuaucgaaaauggcugggaggggaugguugauggaugguauggcuucagacaccagaacagcgagggccgggggcaggccgcugaccugaaauccacccaagccgccauugaucagaucaauggaaagcucaacagacugauuggcaaaacaaaugaaaaguuccaccagaucgagaaggaauuuagcgagguggaagggcgcauucaggaccuugagaaauacguggaggauaccaagaucgaccuguggucuuauaacgcugaacuccuggucgcgcuggagaaccaacauacaaucgaucucaccgacuccgaaaugaauaaacuguucgagaagacgaaaaagcagcuucgggaaaacgccgaggauaugggaaauggcugcuuuaagauuuaccacaaaugugacaacgcuugcaucgggagcauuagaaauggcacauaugaucaugacguguaccgcgacgaggcccugaacaaucgguuccagaucaagggaguugaacucaaaucuggcuacaaggauuggauucuguggaucuccuuugccaucagcugcuuccuucugugugcugcccuccugggguuuauuaugugggcgugccagaaaggaaacaucagauguaauauuugcaucuga

SEQ ID NO: 202604 - RNA, 1701 nt, Artificial Sequence
  derived and/or modified CDS sequence (opt5) from hemagglutinin__InfluenzaA__AGW01535
augaagaccaucauugcccugagcuacauccucugccugguguucgcucagaaacuucccggcaacgacaauuccacagccacgcugugucucgggcaccaugcggucccuaacggaaccauuguuaagacaaucaccaaugauagaauugaggugacaaacgcuaccgaacuggugcaaaauucuagcaucggcgagaucugcgacuccccgcaccagauucuugauggggaaaacuguacacugaucgacgcccuccugggagauccccagugcgacggcuuucagaauaaaaagugggaucuguucgucgagcggucuaaagccuauagcaacuguuacccuuaugacgugcccgauuacgcuucccuccgcucucugguugccagcuccgggacccuugaauuuaauaaggagagcuucaacugggcuggagugacgcaaaauggcaccucuuccgccugcauuagaggcagcaacucuuccuuuuucagccggcugaauuggcucacacaucugaacuuuaaguauccugcgcuuaaugucaccaugcccaacaacgagcaguucgacaaacuguacaucuggggagugcaccauccugggacagauaaggaccagauuuuucucuaugcccagucuuccggccgcaucaccguuagcacgaaaagaucccaacaggcugugauuccgaauaucgggucucggccccgcaucagaaacauuccuagccggaucuccauuuacuggacaaucgucaagcccggagauauucugcugaucaauagcaccggcaaccucaucgccccucgcggguacuucaaaauuagaucuggaaaguccagcaucaugcggucugacgcucccauuggcaaguguaaaagcgaaugcaucacaccgaauggcuccauuccuaacgacaagcccuuucagaaugugaaccgcaucaccuauggggccuguccuagauacgugaaacagucuacccugaaacuugcgacaggaaugcggaauguccccgagaagcaaacgcgcggcaucuucggggccauugcuggauuuaucgaaaacggcugggaggggaugguugauggaugguauggcuucagacaccagaauagcgagggccgggggcaggccgcugaccugaaguccacccaagccgccauugaucagaucaacggaaaacucaauagacugauuggcaagacaaacgaaaaguuccaccagaucgagaaagaauuuagcgagguggaagggcgcauucaggaccuugagaaguacguggaggauaccaaaaucgaccuguggucuuauaaugcugaacuccuggucgcgcuggagaaccaacauacaaucgaucucaccgacuccgaaaugaacaagcuguucgagaaaacgaagaagcagcuucgggaaaaugccgaggauaugggaaacggcugcuuuaaaauuuaccacaagugugacaaugcuugcaucgggagcauuagaaacggcacauaugaucaugacguguaccgcgacgaggcccugaauaaccgguuccagaucaaaggaguugaacucaagucuggcuacaaagauuggauucuguggaucuccuuugccaucagcugcuuccuucuguguguggcucuccugggguuuauuaugugggccugccagaagggaaauaucagauguaacauuugcaucuga

SEQ ID NO: 202605 - RNA, 1701 nt, Artificial Sequence; identical to SEQ ID NO: 201930
  derived and/or modified CDS sequence (opt5) from hemagglutinin__InfluenzaA__AGW01547

SEQ ID NO: 202606 - RNA, 1701 nt, Artificial Sequence; identical to SEQ ID NO: 202066
  derived and/or modified CDS sequence (opt5) from hemagglutinin__InfluenzaA__AGW01559

SEQ ID NO: 202607 - RNA, 1701 nt, Artificial Sequence; identical to SEQ ID NO: 202066
  derived and/or modified CDS sequence (opt5) from hemagglutinin__InfluenzaA__AGW01571

SEQ ID NO: 202608 - RNA, 1701 nt, Artificial Sequence; identical to SEQ ID NO: 202066
  derived and/or modified CDS sequence (opt5) from hemagglutinin__InfluenzaA__AGW01583

SEQ ID NO: 202609 - RNA, 1701 nt, Artificial Sequence; identical to SEQ ID NO: 202066
  derived and/or modified CDS sequence (opt5) from hemagglutinin__InfluenzaA__AGW01595

SEQ ID NO: 202610 - RNA, 1701 nt, Artificial Sequence
  derived and/or modified CDS sequence (opt5) from hemagglutinin__InfluenzaA__AGW01607
augaagaccaucauugcccugagcuacauccucugccuggugcuugcucagaaacugcccggcaacgacaauuccacagccacgcucugucuggggcaccaugcggucccuaacggaaccauuguuaagacaaucaccaaugauagaauugaggugacaaacgcuaccgaacuugugcaaaauucuagcaucggcgagaucugcgacuccccgcaccagauucuggauggggaaaacuguacacucaucgacgcccugcugggagauccccagugcgacggcuuccagaauaaaaagugggaucucuuugucgagcggucuaaagccuauagcaacuguuacccuuaugacgugcccgauuacgcuucccugcgcucucuuguugccagcuccgggacccuggaauuuaauaacgagagcuucaauugggcuggagugacgcaaaacggcaccucuuccgccugcauuagaggcagcaauucuuccuucuuuagccggcucaacuggcugacacaucuuaauuucaaguauccugcgcugaacgucaccaugcccaacaaugagcaguuugacaagcucuacaucuggggagugcaccauccugggacagauaaagaccagauuuuccuguaugcccagucuuccggccgcaucaccguuagcacgaagagaucccaacaggcugugauuccgaacaucgggucucggccccgcaucagaaauauuccuagccggaucuccauuuacuggacaaucgucaaacccggagauauucugcucaucaacagcaccggcaaucugaucgccccucgcggguacuuuaagauuagaucuggaaaauccagcaucaugcggucugacgcucccauuggcaaguguaagagcgaaugcaucacaccgaacggcuccauuccuaaugacaaacccuuccagaacgugaaucgcaucaccuauggggccuguccuagauacgugaagcagucuacccuuaaacuggcgacaggaaugcggaacguccccgagaagcaaacgcgcggcaucuuuggggccauugcuggauucaucgaaaauggcugggaggggaugguugauggaugguauggcuuuagacaccagaacagcgagggccgggggcaggccgcugaccucaaauccacccaagccgccauugaucagaucaauggaaagcugaacagacuuauuggcaaaacaaaugaaaaguuccaccagaucgagaaggaguucagcgaaguggaagggcgcauucaggaccuggagaaauacguggaggauaccaagaucgaccucuggucuuauaacgcugaacugcuggucgcgcucgagaaccaacauacaaucgaucugaccgacuccgaaaugaauaaacuuuuugagaagacgaaaaagcagcugcgggaaaacgccgaggauaugggaaauggcugcuucaagauuuaccacaaaugugacaacgcuugcaucgggagcauuagaaauggcacauaugaucaugacguguaccgcgacgaggcccucaacaaucgguuucagaucaagggaguugaacugaaaucuggcuacaaggauuggauucuuuggaucuccuucgccaucagcugcuuucugcucuguguggcucugcugggguucauuaugugggccugccagaaaggaaacaucagauguaauauuugcaucuga

SEQ ID NO: 202611 - RNA, 1701 nt, Artificial Sequence; identical to SEQ ID NO: 202069
  derived and/or modified CDS sequence (opt5) from hemagglutinin__InfluenzaA__AGW01619

SEQ ID NO: 202612 - RNA, 1701 nt, Artificial Sequence; identical to SEQ ID NO: 202066
  derived and/or modified CDS sequence (opt5) from hemagglutinin__InfluenzaA__AGW01631

SEQ ID NO: 202613 - RNA, 1701 nt, Artificial Sequence
  derived and/or modified CDS sequence (opt5) from hemagglutinin__InfluenzaA__AGW01643
augaagaccaucauugcccugagcuacauccucugccugguguucgcucagaaacuucccggcaacgacaauuccacagccacgcugugucucgggcaccaugcggucccuaacggaaccauuguuaagacaaucaccaaugauagaauugaggugacaaacgcuaccgaacuggugcaaaauucuagcaucggcgagaucugcgacuccccgcaccagauucuugauggggaaaacuguacacugaucgacgcccuccugggagauccccagugcgacggcuuucagaauaaaaagugggaucuguucgucgagcggucuaaagccuauagcaacuguuacccuuaugacgugcccgauuacgcuucccuccgcucucugguugccagcuccgggacccuugaauuuaauaacgagagcuucaauuggacgggagugacccaaaacggcacaucuuccgcuugcauuagaggcagcaauucuuccuuuuucagccggcugaacuggcucacccaucugaauuuuaaguauccugcccuuaacgucacaaugcccaacaaugagcaguucgacaagcuguacaucuggggagugcaccauccugggaccgauaaagaccagauuuuucucuaugcgcagucuuccggccgcaucacgguuagcacaaagagaucccaacaggccgugauuccgaacaucgggucucggccccgcaucagaaauauuccuagccggaucuccauuuacuggaccaucgucaaacccggagauauucugcugaucaacagcacaggcaaucucaucgcuccucgcggguacuucaagauuagaucuggaaaauccagcaucaugcggucugacgcccccauuggcaaguguaagagcgaaugcaucaccccgaacggcuccauuccuaaugacaaacccuuucagaacgugaaucgcaucaccuauggggcuuguccuagauacgugaagcagucuacacugaaacuugccacgggaaugcggaacguccccgagaagcaaacccgcggcaucuucggggcgauugccggauuuaucgaaaauggcugggaggggaugauggauggaugguauggcuucagacaccagaacagcgagggccgggggcaggcugccgaccugaaauccacacaagcugccauugaucagaucaauggaaagcucaacagacugauuggcaaaaccaaugaaaaguuccaccagaucgagaaggaauuuagcgagguugaagggcgcauucaggaccuugagaaauacguggaggauacaaagaucgaccuguggucuuauaacgccgaacuccugguggcucuggagaaccaacauaccaucgaucucacggacuccgaaaugaauaaacuguucgagaagaccaaaaagcagcuucgggaaaacgcggaggauaugggaaauggcugcuuuaagauuuaccacaaaugugacaacgccugcaucgggagcauuagaaauggcacauaugaucaugacgucuaccgcgacgaggcucugaacaaucgguuccagaucaagggaguggaacucaaaucuggcuacaaggauuggauucuguggaucuccuuugccaucagcugcuuccuucuguguguugcccuccugggguuuauuaugugggcuugccagaaaggaaacaucagauguaauauuugcaucuga

SEQ ID NO: 202614 - RNA, 1701 nt, Artificial Sequence; identical to SEQ ID NO: 202066
  derived and/or modified CDS sequence (opt5) from hemagglutinin__InfluenzaA__AGW01655

SEQ ID NO: 202615 - RNA, 1701 nt, Artificial Sequence
  derived and/or modified CDS sequence (opt5) from hemagglutinin__InfluenzaA__AGW01667
augaagaccaucauugcccugagcuacauccucugccugguguucgcucagaaacuucccggcaacgacaauuccacagccacgcugugucucgggcaccaugcggucccuaacggaaccauuguuaagacaaucaccaaugauagaauugaggugacaaacgcuaccgaacuggugcaaaauucuagcaucggcgagaucugcgacuccccgcaccagauucuugauggggaaaacuguacacugaucgacgcccuccugggagauccccagugcgacggcuuucagaauaaaaagugggaucuguucgucgagcggucuaaagccuauagcaacuguuacccuuaugacgugcccgauuacgcuucccuccgcucucugguugccagcuccgggacccuugaauuuaauaacgagagcuucaauugggcuggagugacgcaaaacggcaccucuuccgccugcauuagaggcagcaauucuuccuuuuucagccggcugaacuggcucacacaucugaauuuuaaguauccugcgcuuaacgucaccaugcccaacaaugagcaguucgacaagcuguacaucuggggagugcaccauccugggacagauaaagaccagauuuuucucuaugcccagucuuccggccgcaucaccguuagcacgaagagaucccaacaggcugugauuccgaacaucgggucucggccccgcaucagaaauauuccuagccggaucuccauuuacuggacaaucgucaaacccggagauauucugcugaucaacagcaccggcaaucucaucgccccucgcggguacuucaagauuagaucuggaaaauccagcaucaugcggucugacgcucccauuggcaaguguaagagcgaaugcaucacaccgaacggcuccauuccuaaugacaaacccuuucagaacgugaaucgcaucaccuauggggccuguccuagauacgugaagcagucuacccugaaacuugcgacaggaaugcggaacguccccgagaagcaaacgcgcggcaucuucggggccauugcuggauuuaucgaaaauggcugggaggggaugguugauggaugguauggcuucagacaccagaacagcgagggccgggggcaggccgcugaccugaaauccacccaagccgccauugaucagaucaauggaaagcucaacagacugauuggcaaaacaaaugaaaaguuccaccagaucgagaaggaauuuagcgagguggaagggcgcauucaggaccuugagaaauacguggaggauaccaagaucgaccuguggucuuauaacgcugaacuccuggucgcgcuggagaaccaacauacaaucgaucucaccgacuccgaaaugaauaaacuguucgagaagacgaaaaagcagcuucgggaaaacgccgaggauaugggaaauggcugcuuuaagauuuaccacaaaugugacaacgcuugcaucgggagcauuagaaaugagacauaugaucaugacguguaccgcgacgaagcccugaacaaucgguuccagaucaagggcguugagcucaaaucuggauacaaggauuggauucuguggaucuccuuugccaucagcugcuuccuucuguguguggcucuccugggcuuuauuaugugggccugccagaaagggaacaucagauguaauauuugcaucuga

SEQ ID NO: 202616 - RNA, 1701 nt, Artificial Sequence; identical to SEQ ID NO: 202066
  derived and/or modified CDS sequence (opt5) from hemagglutinin__InfluenzaA__AGW01679

SEQ ID NO: 202617 - RNA, 1701 nt, Artificial Sequence
  derived and/or modified CDS sequence (opt5) from hemagglutinin__InfluenzaA__AGW01691
augaagaccaucauugcccugagcuacauccucugccugguguucgcucagaaacuucccggcaacgacaauuccacagccacgcugugucucgggcaccaugcggucccuaacggaaccauuguuaagacaaucaccaaugauagaauugaggugacaaacgcuaccgaacuggugcaaaauucuagcaucggcgagaucugcgacuccccgcaccagauucuugauggggaaaacuguacacugaucgacgcccuccugggagauccccagugcgacggcuuucagaauaaaaagugggaucuguucgucgagcggucuaaagccuauagcaacuguuacccuuaugacgugcccgauuacgcuucccuccgcucucugguugccagcuccgggacccuugaauuuaauaacgagagcuucaauuggacgggagugacccaaaacggcacaucuuccgcuugcauuagacggagcaauucuuccuuuuucagccgccugaacuggcucacccaucugaauuuuaaguauccugcccuuaacgucacaaugcccaacaaugagcaguucgacaagcuguacaucuggggcgugcaccauccugggaccgauaaagaccagauuuuucucuaugcgcagucuuccggaagaaucacgguuagcacaaagcggucccaacaggccgugauuccgaacaucggcucucgccccagaauccggaauauuccuagccgcaucuccauuuacuggaccaucgucaaacccggggauauucugcugaucaacagcacaggaaaucucaucgcuccuagaggcuacuucaagauucggucugggaaauccagcaucaugcgcucugacgcccccauuggaaaguguaagagcgaaugcaucaccccgaacggcuccauuccuaaugacaaacccuuucagaacgugaauagaaucaccuauggcgcuuguccucgguacgugaagcagucuacacugaaacuugccacggggaugcgcaacguccccgagaagcaaaccagaggaaucuucggcgcgauugccggguuuaucgaaaauggaugggagggcaugguugaugggugguauggauuccggcaccagaacagcgagggcagaggccaggcugccgaccugaaauccacacaagcugccauugaucagaucaaugggaagcucaaccgccugauuggaaaaaccaaugaaaaguuccaccagaucgagaaggaauuuagcgagguggaaggccggauucaggaccuugagaaauacguggaggauacaaagaucgaccuguggucuuauaacgccgaacuccuggucgcucuggagaaccaacauaccaucgaucucacggacuccgaaaugaauaaacuguucgagaagaccaaaaagcagcuuagagaaaacgcggaggauauggggaauggaugcuuuaagauuuaccacaaaugugacaacgccugcaucggcagcauucgcaaugggacauaugaucaugacguguaccgggacgaggcucugaacaauagauuccagaucaagggcguugaacucaaaucuggauacaaggauuggauucuguggaucuccuuugccaucagcugcuuccuucuguguguggcccuccugggcuuugucaugugggcuugccagaaagggaacauucgcuguaauaucugcauuuga

SEQ ID NO: 202618 - RNA, 1701 nt, Artificial Sequence; identical to SEQ ID NO: 201930
  derived and/or modified CDS sequence (opt5) from hemagglutinin__InfluenzaA__AGW01701

SEQ ID NO: 202619 - RNA, 1701 nt, Artificial Sequence; identical to SEQ ID NO: 201930
  derived and/or modified CDS sequence (opt5) from hemagglutinin__InfluenzaA__AGW01713

SEQ ID NO: 202620 - RNA, 1701 nt, Artificial Sequence
  derived and/or modified CDS sequence (opt5) from hemagglutinin__InfluenzaA__AGW01725
augaagaccaucauugcccugagcuacauccucugccugguguucgcucagaaacuucccggcaacgacaauuccacagccacgcugugucucgggcaccaugcggucccuaacggaaccauuguuaagacaaucaccaaugauagaauugaggugacaaacgcuaccgaacuggugcaaaauucuagcaucggcgagaucugcgacuccccgcaccagauucuugauggggaaaacuguacacugaucgacgcccuccugggagauccccagugcgacggcuuucagaauaaaaagugggaucuguucgucgagcggucuaaagccuauagcaacuguuacccuuaugacgugcccgauuacgcuucccuccgcucucugguugccagcuccgggacccuugaauuuaauaacgagagcuucaauuggacgggagugacccaaaacggcacaucuuccgcuugcauuagacggagcaauucuuccuuuuucagccgccugaacuggcucacccaucugaauuuuaaguauccugcccuuaacgucacaaugcccaacaaugagcaguucgacaagcuguacaucuggggcgugcaccauccugggaccgauaaagaccagauuuuucucuaugcgcagucuuccggaagaaucacgguuagcacaaagcggucccaacaggccgugauuccgaacaucggcucucgccccagaauccggaauauuccuagccgcaucuccauuuacuggaccaucgucaaacccggggauauucugcugaucaacagcacaggaaaucucaucgcuccuagaggcuacuucaagauucggucugggaaauccagcaucaugcgcucugacgcccccauuggaaaguguaagagcgaaugcaucaccccgaacggcuccauuccuaaugacaaacccuuucagaacgugaauagaaucaccuauggcgcuuguccucgguacgugaagcagucuacacugaaacuugccacggggaugcgcaacguccccgagaagcaaaccagaggaaucuucggcgcgauugccggguuuaucgaaaauggaugggagggcaugguugaugggugguauggauuccggcaccagaacagcgagggcagaggccaggcugccgaccugaaauccacacaagcugccauugaucagaucaaugggaagcucaaccgccugauuggaaaaaccaaugaaaaguuccaccagaucgagaaggaauuuagcgagguggaaggccggauucaggaccuugagaaauacguggaggauacaaagaucgaccuguggucuuauaacgccgaacuccuggucgcucuggagaaccaacauaccaucgaucucacggacuccgaaaugaauaaacuguucgagaagaccaaaaagcagcuuagagaaaacgcggaggauauggggaauggaugcuuuaagauuuaccacaaaugugacaacgccugcaucggcagcauucgcaaugggacauaugaucauaacguguaccgggacgaggcucugaauaacagauuccagaucaagggcguugaacucaaaucuggauacaaggacuggauucuguggaucuccuuugccaucagcugcuuccuuauuuguguggcccugcucggcuuuaucaugugggcuugccagaaagggaauauucgcuguaacaucugcauuuga

SEQ ID NO: 202621 - RNA, 1701 nt, Artificial Sequence; identical to SEQ ID NO: 201930
  derived and/or modified CDS sequence (opt5) from hemagglutinin__InfluenzaA__AGW01737

SEQ ID NO: 202622 - RNA, 1701 nt, Artificial Sequence; identical to SEQ ID NO: 202066
  derived and/or modified CDS sequence (opt5) from hemagglutinin__InfluenzaA__AGW01749

SEQ ID NO: 202623 - RNA, 1701 nt, Artificial Sequence; identical to SEQ ID NO: 202066
  derived and/or modified CDS sequence (opt5) from hemagglutinin__InfluenzaA__AGW01761

SEQ ID NO: 202624 - RNA, 1701 nt, Artificial Sequence; identical to SEQ ID NO: 201930
  derived and/or modified CDS sequence (opt5) from hemagglutinin__InfluenzaA__AGW01773

SEQ ID NO: 202625 - RNA, 1701 nt, Artificial Sequence; identical to SEQ ID NO: 202066
  derived and/or modified CDS sequence (opt5) from hemagglutinin__InfluenzaA__AGW01785

SEQ ID NO: 202626 - RNA, 1701 nt, Artificial Sequence; identical to SEQ ID NO: 201930
  derived and/or modified CDS sequence (opt5) from hemagglutinin__InfluenzaA__AGW01797

SEQ ID NO: 202627 - RNA, 1701 nt, Artificial Sequence; identical to SEQ ID NO: 202066
  derived and/or modified CDS sequence (opt5) from hemagglutinin__InfluenzaA__AGW01809

SEQ ID NO: 202628 - RNA, 1701 nt, Artificial Sequence; identical to SEQ ID NO: 202066
  derived and/or modified CDS sequence (opt5) from hemagglutinin__InfluenzaA__AGW01821

SEQ ID NO: 202629 - RNA, 1701 nt, Artificial Sequence; identical to SEQ ID NO: 202065
  derived and/or modified CDS sequence (opt5) from hemagglutinin__InfluenzaA__AGW01833

SEQ ID NO: 202630 - RNA, 1701 nt, Artificial Sequence
  derived and/or modified CDS sequence (opt5) from hemagglutinin__InfluenzaA__AGW01845
augaagaccaucauugcccugagcuacauccucugccugguguucgcucagaaacuucccggcaacgacaauuccacagccacgcugugucucgggcaccaugcggucccuaacggaaccauuguuaagacaaucaccaaugauagaauugaggugacaaacgcuaccgaacuggugcaaaauucuagcaucggcgagaucugcgacuccccgcaccagauucuugauggggaaaacuguacacugaucgacgcccuccugggagauccccagugcgacggcuuucagaauaaaaagugggaucuguucgucgagcggucuaaagccuauagcaacuguuacccuuaugacgugcccgauuacgcuucccuccgcucucugguugccagcuccgggacccuugaauuuacgaaugagagcuucaacuggaccggagugacacaaaauggcaccucuuccgcuugcauuagacggagcaacucuuccuuuuucagccgccugaauuggcucacacaucugaacuuuaaguauccugcccuuaaugucaccaugcccaacaacgagcaguucgacaagcuguacaucuggggcgugcaccauccugggacggauaaagaccagauuuuucucuaugcgcagucuuccggaagaaucacaguuagcaccaagcggucccaacaggccgugauuccgaauaucggcucucgccccagaauccggaacauuccuagccgcaucuccauuuacuggacaaucgucaaacccggggauauucugcugaucaauagcaccggaaaccucaucgcuccuagaggcuacuucaagauucggucugggaaauccagcaucaugcgcucugacgcccccauuggaaaguguaagagcgaaugcaucaccccgaauggcuccauuccuaacgacaaacccuuucagaaugugaacagaaucacauauggcgcuuguccucgguacgugaagcagucuacgcugaaacuugccaccgggaugcgcaauguccccgagaagcaaacaagaggaaucuucggcgcgauugccggguuuaucgaaaacggaugggagggcaugguugaugggugguauggauuccggcaccagaauagcgagggcagaggccaggcugccgaccugaaauccacccaagcugccauugaucagaucaacgggaagcucaaucgccugauuggaaaaacaaacgaaaaguuccaccagaucgagaaggaauuuagcgagguggaaggccggauucaggaccuugagaaauacguggaggauaccaagaucgaccuguggucuuauaaugccgaacuccuggucgcucuggagaaccaacauacgaucgaucucacagacuccgaaaugaacaaacuguucgagaagaccaaaaagcagcuuagagaaaaugcggaggauauggggaacggaugcuuuaagauuuaccacaaaugugacaaugccugcaucggcagcauucgcaacgggaccuaugaucauaauguguaccgggacgaggcucugaacaauagauuccagaucaagggcguugaacucaaaucuggauacaaggacuggauucuguggaucuccuuugccaucagcugcuuccuucuguguguggcccuccugggcuuuauuaugugggcuugccagaaagggaacauccgcuguaauauuugcaucuga

SEQ ID NO: 202631 - RNA, 1701 nt, Artificial Sequence; identical to SEQ ID NO: 202066
  derived and/or modified CDS sequence (opt5) from hemagglutinin__InfluenzaA__AGW01857

SEQ ID NO: 202632 - RNA, 1701 nt, Artificial Sequence; identical to SEQ ID NO: 202066
  derived and/or modified CDS sequence (opt5) from hemagglutinin__InfluenzaA__AGW01869

SEQ ID NO: 202633 - RNA, 1701 nt, Artificial Sequence; identical to SEQ ID NO: 202617
  derived and/or modified CDS sequence (opt5) from hemagglutinin__InfluenzaA__AGW01881

SEQ ID NO: 202634 - RNA, 1701 nt, Artificial Sequence; identical to SEQ ID NO: 201940
  derived and/or modified CDS sequence (opt5) from hemagglutinin__InfluenzaA__AGW01893

SEQ ID NO: 202635 - RNA, 1701 nt, Artificial Sequence; identical to SEQ ID NO: 201955
  derived and/or modified CDS sequence (opt5) from hemagglutinin__InfluenzaA__AGW01905

SEQ ID NO: 202636 - RNA, 1701 nt, Artificial Sequence; identical to SEQ ID NO: 202066
  derived and/or modified CDS sequence (opt5) from hemagglutinin__InfluenzaA__AGW01917

SEQ ID NO: 202637 - RNA, 1701 nt, Artificial Sequence; identical to SEQ ID NO: 201930
  derived and/or modified CDS sequence (opt5) from hemagglutinin__InfluenzaA__AGW01929

SEQ ID NO: 202638 - RNA, 1701 nt, Artificial Sequence; identical to SEQ ID NO: 202066
  derived and/or modified CDS sequence (opt5) from hemagglutinin__InfluenzaA__AGW01941

SEQ ID NO: 202639 - RNA, 1701 nt, Artificial Sequence; identical to SEQ ID NO: 201930
  derived and/or modified CDS sequence (opt5) from hemagglutinin__InfluenzaA__AGW01953

SEQ ID NO: 202640 - RNA, 1701 nt, Artificial Sequence
  derived and/or modified CDS sequence (opt5) from hemagglutinin__InfluenzaA__AGW01965
augaagaccaucauugcccugagcuacauccucugccugguguucgcucaggagcuucccggcaacgacgauuccauggccacacugugucucgggcaccaugcggucccuaauggaacgauuguuaaaaccaucacaaacgaccaaauugaagugaccaaugcuacagagcuggugcagucuagcuccaccggcgaaaucugcaacucuccgcaccagauccuugauggggagaauuguacacugauugacgcccuccugggagauccccagugcgacggcuuucaaaacaagaaaugggaucuguucgucgaaagaagcaaggcccauuccaauuguuauccuuacgacgugcccgauuaugcuucucuccggagccugguugccuccagcgggacccuugaguuuaacaaugagucuuucaacuggacgggagugacccagaauggcacauccagcgcuugcauccgcagaucuaacaauuccuuuuucagccggcugaacuggcucacccaccugaauuuuaaauacccugcccuuaacgucacaaugcccaacaaugaacaguucgacaagcuguauauuuggggcgugcaucacccugggaccgauaaggaccagaucuuucucuacgcgcaagccucuggacgcauuacgguuuccacaaaaagaagccagcaggcugugaucccgaacauuggcucccggccccgcgucagaaauaucccuucucgggugagcaucuauuggaccauugugaagcccggggauauccugcugauuaacuccacaggaaaucucaucgccccucgcggcuacuucaaaauuagaagcgggaagucuuccaucaugcggagcgacgcucccaucggaaaauguaacucugccugcauuaccccgaauggcagcaucccuaacgacaagcccuuucagaaugucaaccgcauuaccuacggcgcguguccuagauauguuaagcaaaauacacugaaacuugccacggggaugcggaacgugcccgagaagcagacccgcggaaucuucggcgcuauugccggguuuaucgaaaauggaugggagggcaugguggaugggugguacggauucagacaccagaacuccgagggccggggccaagcugccgaccugaaaucuacacaggccgcuaucgaucagauuaaugggaagcucaacagacugaucggaaaaaccaacgaaaaguuccaucagauugagaaagaauuuagcgaggucgaaggccgcauccaagaccuugagaaguauguggaggauacaaagauugaccugugguccuacaaugcggaacuccugguugcccuggagaaccagcacaccaucgaucucacggacagcgaaaugaauaaacuguucgagaagaccaaaaagcagcuucgggaaaacgcugaggauauggggaauggaugcuuuaaaauuuaucauaagugugacaacgauugcaucggcucuaucagaaaugggacauacgaccacaacguguaucgcgacgaggcccugaauaaccgguuccagauuaagggcaucgaacucaaauccggauacaaggauuggauucuguggaucagcuuugccauuucuugcuuccuucugugugucgcucuccugggcuuuaucaugugggccugccaaaaagggaauaucagauguaacauuugcaucuga

SEQ ID NO: 202641 - RNA, 1701 nt, Artificial Sequence; identical to SEQ ID NO: 202066
  derived and/or modified CDS sequence (opt5) from hemagglutinin__InfluenzaA__AGW01977

SEQ ID NO: 202642 - RNA, 1701 nt, Artificial Sequence; identical to SEQ ID NO: 202066
  derived and/or modified CDS sequence (opt5) from hemagglutinin__InfluenzaA__AGW01989

SEQ ID NO: 202643 - RNA, 1701 nt, Artificial Sequence; identical to SEQ ID NO: 202066
  derived and/or modified CDS sequence (opt5) from hemagglutinin__InfluenzaA__AGW02001

SEQ ID NO: 202644 - RNA, 1701 nt, Artificial Sequence; identical to SEQ ID NO: 202066
  derived and/or modified CDS sequence (opt5) from hemagglutinin__InfluenzaA__AGW02013

SEQ ID NO: 202645 - RNA, 1701 nt, Artificial Sequence; identical to SEQ ID NO: 201930
  derived and/or modified CDS sequence (opt5) from hemagglutinin__InfluenzaA__AGW02025

SEQ ID NO: 202646 - RNA, 1701 nt, Artificial Sequence; identical to SEQ ID NO: 202066
  derived and/or modified CDS sequence (opt5) from hemagglutinin__InfluenzaA__AGW02037

SEQ ID NO: 202647 - RNA, 1701 nt, Artificial Sequence; identical to SEQ ID NO: 202066
  derived and/or modified CDS sequence (opt5) from hemagglutinin__InfluenzaA__AGW02061

SEQ ID NO: 202648 - RNA, 1701 nt, Artificial Sequence; identical to SEQ ID NO: 202066
  derived and/or modified CDS sequence (opt5) from hemagglutinin__InfluenzaA__AGW02073

SEQ ID NO: 202649 - RNA, 1701 nt, Artificial Sequence; identical to SEQ ID NO: 202066
  derived and/or modified CDS sequence (opt5) from hemagglutinin__InfluenzaA__AGW02085

SEQ ID NO: 202650 - RNA, 1701 nt, Artificial Sequence; identical to SEQ ID NO: 201955
  derived and/or modified CDS sequence (opt5) from hemagglutinin__InfluenzaA__AGW02097

SEQ ID NO: 202651 - RNA, 1701 nt, Artificial Sequence; identical to SEQ ID NO: 201930
  derived and/or modified CDS sequence (opt5) from hemagglutinin__InfluenzaA__AGW02109

SEQ ID NO: 202652 - RNA, 1701 nt, Artificial Sequence; identical to SEQ ID NO: 202066
  derived and/or modified CDS sequence (opt5) from hemagglutinin__InfluenzaA__AGW02133

SEQ ID NO: 202653 - RNA, 1701 nt, Artificial Sequence; identical to SEQ ID NO: 202066
  derived and/or modified CDS sequence (opt5) from hemagglutinin__InfluenzaA__AGW02157

SEQ ID NO: 202654 - RNA, 1701 nt, Artificial Sequence; identical to SEQ ID NO: 201930
  derived and/or modified CDS sequence (opt5) from hemagglutinin__InfluenzaA__AGW02169

SEQ ID NO: 202655 - RNA, 1701 nt, Artificial Sequence; identical to SEQ ID NO: 202066
  derived and/or modified CDS sequence (opt5) from hemagglutinin__InfluenzaA__AGW02181

SEQ ID NO: 202656 - RNA, 1701 nt, Artificial Sequence; identical to SEQ ID NO: 201940
  derived and/or modified CDS sequence (opt5) from hemagglutinin__InfluenzaA__AGW02193

SEQ ID NO: 202657 - RNA, 1701 nt, Artificial Sequence; identical to SEQ ID NO: 201907
  derived and/or modified CDS sequence (opt5) from hemagglutinin__InfluenzaA__AGW04171

SEQ ID NO: 202658 - RNA, 1707 nt, Artificial Sequence
  derived and/or modified CDS sequence (opt5) from hemagglutinin__InfluenzaA__AGW27061
auggagaagaucgugcuucucuucgccauugucaaccugguuaaaagcgaccacaucugcauuggcuaccaugcuaauaacuccaccgaacagguggauacaaucauggagaagaaugugacggucacccacgcccaagacauucuugaaaagacacauaacgggaagcugugugaucucaauggagugaaaccccugauccuuaaggacugcucuguugcgggcuggcugcucgggaacccuaugugugaugaguuuaucgacgugccggaauggagcuauauugucgagaaggcuaaucccgccaacgaucugugcuacccuggaaauuucaacgacuaugaggaacugaaacaccuccuguccagaaucaaucauuuugagaagauucggaucauucccaaagauucuuggccugaccacgaagccagccuuggcguguccgcugccuguucuuaccaggggaacagcuccuucuuucgcaauguuguguggcugcucaagaaaaacgaugcuuaucccaucauuaaaaagagcuacaauaacaccaacaaagaggaccugcuuguccuguggggaauccaccauccuaaugaugaggccgaacagaucagacucuaucagaacccgacaaccuacgugucuacaggcaccuccacgcugaaucaacggcuggugccccgcauugcgaccagaagcaaggucaacggccagucugggcggaucgacuucuuuuggacaauucucaaaccuaaugacgccaucaacuucgaguccaauggaaacuuuauugcucccgaauacgccuauaagaucguuaaaaagggcgauagcaccaucaugcgcucugagguggaauacgggaauugcuccacaagaugucagaccccuaugggagcuauuaacagcuccaugcccuuccacaauauccauccgcugacgauuggcgagugcccuaaauaugugaagucuaacaagcugguccuggccacagggcuccggaauagcccccagaucgagcgcagacggcgcaaaagaggacuguuuggcgcgauugccggcuucaucgaagggggauggcaaggcaugguggacgggugguacggauaucaccacuccaacgagcagggcagcggguacgcugccgauaaggaaucuacccagaaagcuaucgacggaguuacaaauaaggugaacuccauuaucgauaaaaugaacacccaguuugaggccgucggccgggaguucaauaaccuugaacgcagaauugagaaucugaacaagaagauggaagacggcuuccucgauguguggaccuauaaugccgagcugcugguucucauggaaaacgagcggacacuggacuuucaugauagcaaugugaaaaaccuuuacgacaaggucagacugcaacuccgcgauaaugcuaaagaacuggggaacggauguuucgaguuuuaccacaagugcgacaaugaguguauggaaucugugcggaacggcacguaugacuacccucaguauagcgaggaagcgagacuuaaacgcgaggagaucuccggggucaagcuggaaucuauuggaaccuaccagauccucagcauuuauuccacaguggccagcucucugguucuguccaucaugguggcuggccucagccuguggaugugcucuaaugggucccuucaaugccggauguguaucuga

SEQ ID NO: 202659 - RNA, 1698 nt, Artificial Sequence
  derived and/or modified CDS sequence (opt5) from hemagglutinin__InfluenzaA__AGY14471
augaaggugaaacugcucauccugcuuugcaccuucacagccacguacgcugacaccauuuguaucggcuaucacgccaacaauagcacagauaccgucgacacaauucuggagaagaacguuaccgugacacauuccgugaaucuccuggaagauucucacaacgggaaacuuugccugcucaagggaaucgcgccccugcagcugggcaauuguagcgucgcuggguggauucucggaaacccugagugcggccugcuuaucccgaaagaauccuggucuuacaucguggagacccccaauccugaaaacgggacguguuaucccggauacuuugacgauuaugaggagcugagagaacaacucagcuccguuucuagcuucgagcgguuugaaauuuucccuaaggaguccagcuggcccaaucauaccgugacaggcgucucugccuccugcagccacaacggcaagucuuccuuuuaccgcaaucugcuuuggcugaccgggaaaaacggacucuauccuaaucugagcaagucuuacgccaacaauaaagagaaggaagugcugauccucuggggcguucaucacccguccaacauugggaaccagagaacacuguaccacaccgagaauacguaugugagcgucguguccucucauuacagccggcgcuucacacccgaaaucaccaaaagaccuaaggugcgggaccaggagggacgcauuaacuauuacuggacacuucuggaacccggcgauaccaucauuuuugaggcuaaugggaaccucaucgccccuugguaugcuuucgcccuguccaagggauuuggcagcggcaucauuaccucuaaugcgcccauggacgagugugaugccaaaugccagacaccgcaaggggcuaucaacuccaaucuuccuuuccagaacguccaccccguuacgauuggagaauguccuaaguacgugagaagcaccaaacugcggauggugacaggccuccgcaauauccccucuauucagagcagagggcuguuuggagccaucgcuggcuucaucgaagggggauggaccggcauggucgacggcugguauggguaccaucaccagaacgaacaaggauccggcuacgccgcggaucaggagucuacacagaaugccauuaacgggaucaccaauaaggugaacagcguuauugagaaaaugaauacgcaguuuacaguggucggaaaggaguucaacaaacuggagcggcgcauggaaaaccucaauaagaagguggacgauggcuuccuggacaucuggaccuauaacgcugagcuucugguucuccuggaaaaugagagaacccuugacuuucacgauuccaacgugaugaaucuguacgaaaaagucaaggggcaacucaaaaacaaugccaaggagauuggcaacggaugcuucgaguuuuaucauaaauguaauaacgaaugcauggagagcgugaagaauggcacauacgacuaucccaaguacucugaagaguccaaacugaaccgggagaagaucgauggggucaaacuggaaagcaugggaguguaucagauccucgcuauuuacucuaccguugccuccagccuggugcuucuggucucccucggcgccaucucuuucuggaugugcagcaaugggucccugcagugucgcauuugcaucuga

SEQ ID NO: 202660 - RNA, 1698 nt, Artificial Sequence; identical to SEQ ID NO: 202659
  derived and/or modified CDS sequence (opt5) from hemagglutinin__InfluenzaA__AGY14477

SEQ ID NO: 202661 - RNA, 1701 nt, Artificial Sequence
  derived and/or modified CDS sequence (opt5) from hemagglutinin__InfluenzaA__AHC57459
augaagaccaucauugcccugagcuacauccucugccugguguucgcucagaaacuucccggcaacgacaauuccacagccacgcugugucucgggcaccaugcggucccuaacggaaccauuguuaagacaaucaccaaugaucaaauugaggugacaaacgcuaccgaacuggugcagucuagcuccacaggcgagaucugcaauucuccgcaccagauccuugacggggaaaacuguacccugauugaugcccuccugggagacccccagugcgauggcuuucaaaauaaaaagugggaccuguucgucgagagaagcaaagcccauuccaacuguuauccuuacgaugugcccgacuaugcuucucuccggagccugguugccuccagcgggacgcuugaauuuaauaacgagucuuucaauuggaccggagugacacagaacggcaccuccagcgcuugcauccgcagaucuaauaacuccuuuuucagccggcugaauuggcucacacaccugaacuuuaaguacccugcccuuaacgucaccaugcccaauaacgagcaguucgauaagcuguauauuuggggcgugcaucacccugggacggacaaagaucagaucuuucucuacgcgcaagccgcuggacgcauuacaguuucuaccaagagaucccagcaggccgugaucccgaauauuggcagccggccccgcaucagaaacaucccuucccgggucucuauuuauuggacaaucgugaaacccggggacauucugcugaucaauagcaccggaaaccucauugcuccucgcggcuacuucaagaucagauccgggaaaagcucuaucaugcgguccgaugcccccauuggaaaguguaauagcgcgugcaucaccccgaacggcucuauuccuaaugacaagcccuuucagaacgugaaucgcaucacauacggcgccuguccuagauaugucaaacaaaacacgcugaaacuugcuaccgggaugcggaauguucccgaaaaacagacacgcggaauuuucggcgccaucgcuggguuuaucgagaacggaugggaaggcaugguggacgggugguacggauucagacaccagaauagcgagggccggggccaagccgccgaucugaaguccacccaggcugcgauugaccagaucaacgggaaacucaacagacugauuggaaagacaaaugagaaauuccaucagaucgaaaaggaguuuucugaaguggagggccgcauucaagaucuugaaaaguaugucgaggacaccaaaaucgaucuguggagcuacaacgccgagcuccugguggcucuggaaaaucagcacacgauugaccucacagauuccgagaugaacaagcuguucgaaaagaccaagaaacagcuucgggagaaugccgaagacauggggaacggaugcuuuaagaucuaucauaagugugauaaugccugcaucggcagcauuagaaacgggaccuacgaccacgauguuuaucgcgacgaggcucugaauaaccgguuccagaucaaaggcguggagcucaagucuggauacaaagacuggauucuguggaucuccuuugccauuagcugcuuccuucugugugucgcgcuccugggcuuuaucaugugggcuugccaaaaggggaauaucagauguaacauuugcaucuga

SEQ ID NO: 202662 - RNA, 1701 nt, Artificial Sequence; identical to SEQ ID NO: 199054
  derived and/or modified CDS sequence (opt5) from hemagglutinin__InfluenzaA__AHC57465

SEQ ID NO: 202663 - RNA, 1701 nt, Artificial Sequence; identical to SEQ ID NO: 198927
  derived and/or modified CDS sequence (opt5) from hemagglutinin__InfluenzaA__AHC57487

SEQ ID NO: 202664 - RNA, 1701 nt, Artificial Sequence; identical to SEQ ID NO: 199854
  derived and/or modified CDS sequence (opt5) from hemagglutinin__InfluenzaA__AHC57499

SEQ ID NO: 202665 - RNA, 1701 nt, Artificial Sequence; identical to SEQ ID NO: 199854
  derived and/or modified CDS sequence (opt5) from hemagglutinin__InfluenzaA__AHC57511

SEQ ID NO: 202666 - RNA, 1701 nt, Artificial Sequence; identical to SEQ ID NO: 199854
  derived and/or modified CDS sequence (opt5) from hemagglutinin__InfluenzaA__AHC57523

SEQ ID NO: 202667 - RNA, 1701 nt, Artificial Sequence; identical to SEQ ID NO: 199054
  derived and/or modified CDS sequence (opt5) from hemagglutinin__InfluenzaA__AHC57675

SEQ ID NO: 202668 - RNA, 1701 nt, Artificial Sequence; identical to SEQ ID NO: 199054
  derived and/or modified CDS sequence (opt5) from hemagglutinin__InfluenzaA__AHC57827

SEQ ID NO: 202669 - RNA, 1701 nt, Artificial Sequence; identical to SEQ ID NO: 198927
  derived and/or modified CDS sequence (opt5) from hemagglutinin__InfluenzaA__AHC57956

SEQ ID NO: 202670 - RNA, 1701 nt, Artificial Sequence
  derived and/or modified CDS sequence (opt5) from hemagglutinin__InfluenzaA__AHC57981
augaagaccaucauugcccugagcuacauccucugccugguguucgcucagaaaauucccggcaacgacaauuccacagccacgcuuugucuggggcaccaugcggucccuaacggaaccaucguuaagacaauuaccaaugaucaaaucgaggugacaaacgcuaccgaacucgugcaaaauucuagcacaggcgagaucugcgacuccccgcaccagauucuggauggggaaaacuguacccuuaucgacgcccugcucggagauccccagugcgacggcuuucagaauaaaaagugggaucuguucgucgagagaucuaaagccuauagcaacuguuacccuuaugacgugcccgauuacgcuucccugcggucucucauugccagcuccgggacgcuggaauuuaauaacgagagcuucaauuggaccggaguuacacagaacggcaccucuuccgcuugcauccgcagaagcaauaacuccuuuuucucucggcuuaauuggcugacacaucucaacuuuaaguauccugcccugaacgugaccaugcccaauaacgagcaguucgacaaacuuuacauuuggggcguccaccauccugggacggauaaggaccagaucuuucuguaugcgcaagccagcggacgcauuacagugucuaccaagagaucccagcaggcuguuaucccgaauaucggcagccggccccgcgugagaaacauuccuucccggaucucuauuuacuggacaaucgucaaacccggggauauucuccugaucaauagcaccggaaaccugaucgccccucgcggcuacuucaagauuagauccgggaaaagcucuaucaugcgguccgacgcucccauuggaaaguguaauagcgaaugcaucaccccgaacggcucuauuccuaaugacaagcccuuucagaacgugaaucgcaucacauauggcgccuguccuagauacgugaaacaaaacacgcucaagcuggcgaccgggaugcggaauguccccgagaaacagacacgcggaaucuucggcgccauugcuggguuuaucgaaaacggaugggagggcaugguugaugggugguauggauucagacaccagaauagcgagggccggggccaagccgcugaccuuaaguccacccaggccgccauugaucagaucaacgggaaccugaauagacucauuggaaaaacaaacgaaaaguuccaccagaucgagaaagaauuuucugagguggaaggccgcauucaagaccuggagaaguacguggaggauaccaagaucgaccuuuggagcuauaaugcugaacugcucgucgcgcuggagaaccagcauacgaucgaucugacagacuccgaaaugaauaaacucuucgagaagaccaaaaagcagcugcgggaaaacgccgaggauauggggaauggaugcuuuaaaauuuaccacaagugugacaacgcuugcaucggcagcauuagaaaugggaccuaugaucaugacguguaccgcgacgaggcccuuaacaaucgguuccagaucaagggcguugaacugaaaucuggauacaaggauuggauucucuggaucuccuuugccaucagcugcuuccugcuuuguguggcucugcucggcuuuauuaugugggccugccaaaaagggaacaucagauguaauauuugcaucuga

SEQ ID NO: 202671 - RNA, 1701 nt, Artificial Sequence; identical to SEQ ID NO: 199854
  derived and/or modified CDS sequence (opt5) from hemagglutinin__InfluenzaA__AHC57993

SEQ ID NO: 202672 - RNA, 1701 nt, Artificial Sequence; identical to SEQ ID NO: 201146
  derived and/or modified CDS sequence (opt5) from hemagglutinin__InfluenzaA__AHC58005

SEQ ID NO: 202673 - RNA, 1701 nt, Artificial Sequence
  derived and/or modified CDS sequence (opt5) from hemagglutinin__InfluenzaA__AHC58017
augaagaccaucauugcccugagcuacauccucugccugguguucgcucagaaacuucccggcaacgacaauuccacagccacgcugugucucgggcaccaugcggucccuaacggaaccauuguuaagacaaucaccaaugaucaaauugaggugacaaacgcuaccgaacuggugcagucuagcuccacaggcgagaucugcaauucuccgcaccagauccuugacggggaaaacuguacccugauugaugcccuccugggagacccccagugcgauggcuuucaaaauaaaaagugggaccuguucgucgagagaagcaaagcccauuccaacuguuauccuuacgaugugcccgacuaugcuucucuccggagccugguugccuccagcgggacgcuugaauuuaauaacgagucuuucaauuggaccggagugacacagaacggcaccuccagcgcuugcauccgcagaucuaauaacuccuuuuucagccggcugaauuggcucacacaccugaacuuuaaguacccugcccuuaacgucaccaugcccaauaacgagcaguucgauaagcuguauauuuggggcgugcaucacccugggacggacaaagaucagaucuuucucuacgcgcaagccgcuggacgcauuacaguuucuaccaagagaucccagcaggccgugaucccgaauauuggcagccggccccgcgucagaaacaucccuucccgggugucuaucuauuggacaauugugaaacccggggacauccugcugauuaauagcaccggaaaccucaucgcuccucgcggcuacuucaagauuagauccgggaaaagcucuaucaugcgguccgaugcccccaucggaaaguguaauagcgcgugcauuaccccgaacggcucuaucccuaaugacaagcccuuucagaacgucaaucgcauuacauacggcgccuguccuagauauguuaaacaaaacacgcugaaacuugcuaccgggaugcggaaugugcccgaaaaacagacacgcggaaucuucggcgccauugcuggguuuaucgagaacggaugggaaggcaugguggacgggugguacggauucagacaccagaauagcgagggccggggccaagccgccgaucugaaguccacccaggcugcgaucgaccagauuaacgggaaacucaacagacugaucggaaagacaaaugagaaauuccaucagauugaaaaggaguuuucugaagucgagggccgcauccaagaucuugaaaaguauguggaggacaccaaaauugaucuguggagcuacaacgccgagcuccugguugcucuggaaaaucagcacacgaucgaccucacagauuccgagaugaacaagcuguucgaaaagaccaagaaacagcuucgggagaaugccgaagacauggggaacggaugcuuuaagauuuaucauaagugugauaaugccugcaucgugagcaucagaaacggcaccuacgaccacgaugucuaucgcgacgaggcucugaauaaccgguuccagauuaaagggguggagcucaagucuggcuacaaagacuggauccuguggauuuccuuugccaucagcugcuuccuucuguguguugcgcuccugggauuuauuaugugggcuugccaaaagggcaauaucagauguaacaucugcauuuga

SEQ ID NO: 202674 - RNA, 1701 nt, Artificial Sequence
  derived and/or modified CDS sequence (opt5) from hemagglutinin__InfluenzaA__AHC58029
augaagaccaucauugcccugagcuacauccucugccugguguucgcucagaaacuucccggcaacgacaauuccacagccacgcugugucucgggcaccaugcggucccuaacggaaccauuguuaagacaaucaccaaugaucaaauugaggugacaaacgcuaccgaacuggugcagucuagcuccacaggcgagaucugcaauucuccgcaccagauccuugacggggaaaacuguacccugauugaugcccuccugggagacccccagugcgauggcuuucaaaauaaaaagugggaccuguucgucgagagaagcaaagcccauuccaacuguuauccuuacgaugugcccgacuaugcuucucuccggagccugguugccuccagcgggacgcuugaauuuaauaacgagucuuucaauuggaccggagugacacagaacggcaccuccagcgcuugcauccgcggcucuaauaacuccuuuuucagcagacugaauuggcucacacagcugaacuuuaaguacccugcccuuaacgucaccaugcccaauaacgagcaguucgauaagcuguauauuuggggagugcaccauccugggacggacaaagaucaaaucuuucucuacgcgcaggccucuggccggauuacaguuuccaccaagcgcagccagcaggcugugaucccgaauauuggguccagaccccggguccgcaacaucccuucuagagugagcaucuauuggacaauugugaaacccggagacauccugcugauuaauuccaccggcaaccucaucgccccucggggguacuucaagauucgcagcggaaaaucuuccaucaugagaagcgaugcucccaucggcaaguguaauucugccugcauuaccccgaacggcagcaucccuaaugacaagcccuuucaaaacgucaaucggauuacauacggggcguguccucgcuauguuaaacagaacacgcugaaacuugccaccggaaugagaaaugugcccgaaaaacagacacggggcaucuucggggcuauugccggauuuaucgagaacggcugggaagggaugguggacggaugguacggcuuccgccaccaaaauuccgagggcagagggcaggcugccgaucugaagucuacccaggccgcuaucgaccagauuaacggaaaacucaaccggcugaucggcaagacaaaugagaaauuccaccaaauugaaaaggaguuuagcgaagucgaggggagaauccaggaucuugaaaaguauguggaggacaccaaaauugaucugugguccuacaacgcggagcuccugguugcccuggaaaaucagcauacgaucgaccucacagauagcgagaugaacaagcuguucgaaaagaccaagaaacagcuucgcgagaaugcugaagacaugggaaacggcugcuuuaagauuuaucacaagugugauaaugccugcaucgggucuauccggaacggcaccuacgaccaugauguguauagagacgaggcccugaauaaccgcuuccaaauuaaaggagucgagcucaaguccggcuacaaagacuggauccuguggauuagcuuugcuaucucuugcuuccuucuguguguggcccuccugggguuuauuaugugggcgugccagaagggaaauauccgguguaacaucugcauuuga

SEQ ID NO: 202675 - RNA, 1701 nt, Artificial Sequence
  derived and/or modified CDS sequence (opt5) from hemagglutinin__InfluenzaA__AHC58050
augaagaccaucauugcccugagcuacauccucugccugguguucgcucagaaacuucccggcaacgacaauuccacagccacgcugugucucgggcaccaugcggucccuaacggaaccauuguuaagacaaucaccaaugaucaaauugaggugacaaacgcuaccgaacuggugcagucuagcuccacaggcgagaucugcgacucuccgcaccagauccuugauggggaaaauuguacccugauugacgcccuccugggagauccccagugcgacggcuuucaaaacaaaaagugggaucuguucgucgagagaagcaaagccuauuccaauuguuacccuuaugacgugcccgauuacgcuucucuccggagccugguugccuccagcgggacgcuugaauuuaacaaugagucuuucaacuggaccggagugacacagaauggcaccuccagcgcuugcauccgcagaucuaacuccagcuuuuucucucggcugaauuggcucacacaucugaacuuuaaguauccugcccuuaaugucaccaugcccaacaacgagcaguucgacaagcuguacauuuggggcgugcaccauccugggacggauaaagaccagaucuuucucuaugcgcaauccagcggacgcauuacaguuuccaccagacggucucagcaggccgugaucccgaauauuggcagccgccccagaauccggaacaucccuucccgcauuagcaucuacuggacaauugucaagcccggggauauccugcugauuaauucuaccggaaaccucaucgcuccuagaggcuacuucaaaauccgguccggaaagagcucuauuaugcgcagcgacgcccccaucgggaaauguaauuccgaaugcauuaccccgaacggcucuaucccuaaugacaagcccuuucagaacgugaauagaauuacauauggcgcuuguccucgguacgugaagcaaagcacgcugaaacuugccaccgggaugcgcaacguccccgagaagcagacaagaggaaucuucggcgcgaucgccggguuuauugaaaauggaugggagggcaugguugaugggugguauggauuccggcaccagaacuccgagggcagaggccaagcugccgaccugaaaagcacccaggcugccaucgaucagauuaaugggaagcucaaccgccugaucggaaaaacaaaugaaaaguuccaccagauugagaaagaauuuucugagguggaaggccggauccaagaccuugagaaguacguggaggauaccaagauugaccugugguccuauaacgccgaacuccuggucgcucuggagaaccagcauacgaucgaucucacagacagcgaaaugaauaaacuguucgagaagaccaaaaagcagcuuagagaaaacgcggaggauauggggaauggaugcuuuaaaaucuaccacaagugugacaacgccugcauuggcucuauccgcaaugggaccuauaaccaugauguguaccgggacgaggcucugaauaacagauuccagauuaagggcguugaacucaaauccggauacaaggacuggauccuguggauuagcuuugccaucuccugcuuccuucuguguguggcccuccugggcuuuaucaugugggcuugccaaaaagggaauauucgcuguaacaucugcauuuga

SEQ ID NO: 202676 - RNA, 1701 nt, Artificial Sequence; identical to SEQ ID NO: 199854
  derived and/or modified CDS sequence (opt5) from hemagglutinin__InfluenzaA__AHC58074

SEQ ID NO: 202677 - RNA, 1701 nt, Artificial Sequence; identical to SEQ ID NO: 199854
  derived and/or modified CDS sequence (opt5) from hemagglutinin__InfluenzaA__AHC58098

SEQ ID NO: 202678 - RNA, 1701 nt, Artificial Sequence; identical to SEQ ID NO: 199854
  derived and/or modified CDS sequence (opt5) from hemagglutinin__InfluenzaA__AHC58110

SEQ ID NO: 202679 - RNA, 1701 nt, Artificial Sequence; identical to SEQ ID NO: 199854
  derived and/or modified CDS sequence (opt5) from hemagglutinin__InfluenzaA__AHC58126

SEQ ID NO: 202680 - RNA, 1701 nt, Artificial Sequence; identical to SEQ ID NO: 199854
  derived and/or modified CDS sequence (opt5) from hemagglutinin__InfluenzaA__AHC58138

SEQ ID NO: 202681 - RNA, 1701 nt, Artificial Sequence; identical to SEQ ID NO: 199854
  derived and/or modified CDS sequence (opt5) from hemagglutinin__InfluenzaA__AHC58162

SEQ ID NO: 202682 - RNA, 1701 nt, Artificial Sequence; identical to SEQ ID NO: 201146
  derived and/or modified CDS sequence (opt5) from hemagglutinin__InfluenzaA__AHC58186

SEQ ID NO: 202683 - RNA, 1701 nt, Artificial Sequence
  derived and/or modified CDS sequence (opt5) from hemagglutinin__InfluenzaA__AHC58198
augaagaccaucauugcccugagcuacauccucugccugguguucgcucagaaacuucccggcaacgacaauuccacagccacgcugugucucgggcaccaugcggucccuaacggaaccauuguuaagacaaucaccaaugaucaaauugaggugacaaacgcuaccgaacuggugcaaaauucuagcacaggcgagaucugcgacuccccgcaccagauccuugauggggaaaacuguacccugauugacgcccuccugggagauccccagugcgacggcuuucagaauaaaaagugggaucuguucgucgagagaucuaaagccuauagcaacuguuacccuuaugacgugcccgauuacgcuucccuccggucucugguugccagcuccgggacgcuugaauuuaauaacgagagcuucaauuggaccggagugacacagaacggcaccucuuccgcuugcauccgcagaagcaauaacuccuuuuucucucggcugaauuggcucacacaucugaacuuuaaguauccugcccuuaacgucaccaugcccaauaacgagcaguucgacaagcuguacauuuggggcgugcaccauccugggacggauaaagaccagaucuuucucuaugcgcaagccagcggacgcauuacaguuucuaccaagagaucccagcaggcugugaucccgaauauuggcagccggccccgcgucagaaacaucccuucccggaucucuauuuacuggacaaucgugaaacccggggauauucugcugaucaauagcaccggaaaccucauugccccucgcggcuacuucaagaucagauccgggaaaagcucuaucaugcgguccgacgcucccauuggaaaguguaauagcgaaugcaucaccccgaacggcucuauuccuaaugacaagcccuuucagaacgugaaucgcaucacauauggcgccuguccuagauacgucaaacaaaacacgcugaaacuugcgaccgggaugcggaauguucccgagaagcagacacgcggaauuuucggcgccaucgcuggguuuaucgaaaacggaugggagggcaugguggaugggugguauggauucagacaccagaauagcgagggccggggccaagccgcugaccugaaguccacccaggccgccauugaucagaucaacgggaaacucaacagacugauuggaaagacaaaugaaaaauuccaccagaucgagaaggaauuuucugagguggaaggccgcauucaaaaccuugagaaguacgucgaggacaccaaaaucgaucuguggagcuauaaugcugaacuccugguggcgcuggagaaccagcauacgauugaccucacagauuccgaaaugaauaagcuguucgagaaaaccaagaaacagcuucgggaaaacgccgaggacauggggaauggaugcuuuaagaucuaccacaagugugauaacgcuugcaucggcagcauuagaaaugggaccuaugaccaugauguuuaccgcgacgaggcccugaacaaucgguuccagaucaaaggcguggaacucaagucuggauacaaagacuggauucuguggaucuccuuugccauuagcugcuuccuucugugugucgcucuccugggcuuuaucaugugggauugccaaaaggggaacaucagauguaauauuugcaucuga

SEQ ID NO: 202684 - RNA, 1701 nt, Artificial Sequence
  derived and/or modified CDS sequence (opt5) from hemagglutinin__InfluenzaA__AHC58210
augaagaccaucauugcccugagcuacauccucugccugguguucgcucagaaacuucccggcaacgacaauuccacagccacgcugugucucgggcaccaugcggucccuaacggaaccauuguuaagacaaucaccaaugaucaaauugaggugacaaacgcuaccgaacuggugcaaaauucuagcacaggcgagaucugcgacuccccgcaccagauccuugauggggaaaacuguacccugauugacgcccuccugggagauccccagugcgacggcuuucagaauaaaaagugggaucuguucgucgagagaucuaaagccuauagcaacuguuacccuuaugacgugcccgauuacgcuucccuccggucucugguugccagcuccgggacgcuugaauuuaauaacgagagcuucaauugggcuggagugacccagaacggcacaucuuccgccugcauccgcagaagcaauaacuccuuuuucucucggcugaauuggcucacccaucugaacuuuaaguauccugcgcuuaacgucacaaugcccaauaacgagcaguucgacaagcuguacauuuggggcgugcaccauccugggaccgauaaagaccagaucuuucucuaugcccaagcuagcggacgcauuacgguuucuacaaagagaucccagcaggccgugaucccgaauauuggcagccggccccgcgucagaaacaucccuucccggaucucuauuuacuggaccaucgugaaacccggggauauucugcugaucaauagcacaggaaaccucauugcuccucgcggcuacuucaagaucagauccgggaaaagcucuaucaugcgguccgacgcccccauuggaaaguguaauagcgaaugcaucaccccgaacggcucuauuccuaaugacaagcccuuucagaacgugaaucgcaucaccuauggcgcguguccuagauacgucaaacaaaacacacugaaacuugccacggggaugcggaauguucccgagaagcagacccgcggaauuuucggcgcuaucgccggguuuaucgaaaacggaugggagggcaugguggaugggugguauggauucagacaccagaauagcgagggccggggccaagcugccgaccugaaguccacacaggccgcuauugaucagaucaacgggaaacucaacagacugauuggaaagaccaaugaaaaauuccaccagaucgagaaggaauuuucugagguggaaggccgcauucaagaccuugagaaguacgucgaggauacaaaaaucgaccuguggagcuauaacgcggaacuccugguggcccuggagaaucagcauaccauugaucucacggacuccgaaaugaacaagcuguucgagaaaacaaagaaacagcuucgggaaaaugcugaggauauggggaacggaugcuuuaagaucuaccacaagugugacaaugccugcaucggcagcauuagaaacgggaccuaugaucaugacguuuaccgcgacgaggcccugaauaaccgguuccagaucaaaggcguggaacucaagucuggauacaaagauuggauucuguggaucuccuuugcuauuagcugcuuccuucugugugucgcccuccugggcuuuaucaugugggcgugccaaaaggggaauaucagauguaacauuugcaucuga

SEQ ID NO: 202685 - RNA, 1701 nt, Artificial Sequence; identical to SEQ ID NO: 199054
  derived and/or modified CDS sequence (opt5) from hemagglutinin__InfluenzaA__AHC58234

SEQ ID NO: 202686 - RNA, 1701 nt, Artificial Sequence; identical to SEQ ID NO: 199854
  derived and/or modified CDS sequence (opt5) from hemagglutinin__InfluenzaA__AHC58246

SEQ ID NO: 202687 - RNA, 1701 nt, Artificial Sequence; identical to SEQ ID NO: 199054
  derived and/or modified CDS sequence (opt5) from hemagglutinin__InfluenzaA__AHC58258

SEQ ID NO: 202688 - RNA, 1701 nt, Artificial Sequence; identical to SEQ ID NO: 198927
  derived and/or modified CDS sequence (opt5) from hemagglutinin__InfluenzaA__AHC58270

SEQ ID NO: 202689 - RNA, 1701 nt, Artificial Sequence
  derived and/or modified CDS sequence (opt5) from hemagglutinin__InfluenzaA__AHC58372
augaagaccaucauugcccugagcuacauccucugccugguguucgcucagaaacuucccggcaacgacaauuccacagccacgcugugucucgggcaccaugcggucccuaacggaaccauuguuaagacaaucaccaaugaucaaauugaggugacaaacgcuaccgaacuggugcagucuagcuccacaggcgagaucugcgacucuccgcaccagauccuugauggggaaaauuguacccugauugacgcccuccugggagauccccagugcgacggcuuucaaaacaaaaagugggaucuguucgucgagagaagcaaagccuauuccaauuguuacccuuaugacgugcccgauuacgcuucucuccggagccugguugccuccagcgggacgcuugaauuuaacaaugagucuuucaacuggaccggagugacacagaauggcaccuccagcgcuugcauccgcagaucuaacuccagcuuuuucucucggcugaauuggcucacacaucugaacuuuaaguauccugcccuuaaugucaccaugcccaacaacgagcaguucgacaagcuguacauuuggggcgugcaccauccugggacggauaaagaccagaucuuucucuaugcgcaauccagcggacgcauuacaguuuccaccaagagaucucagcaggccgugacaccgaauaucggcagccggccccgcauuagaaacaucccuucccggaucagcauuuacuggaccaucgucaaacccggggauauucugcugaucaauucuaccggaaaccucauugcuccucgcggcuacuucaagaucagauccgggaaaagcucuaucaugcggagcgacgcccccauuggaaaguguaauuccgaaugcaucacaccgaacggcucuauuccuaaugacaagcccuuucagaacgugaaucgcaucacguauggcgcuuguccuagauacgugaaacaaagcacccugaagcuggccacagggaugcggaacguccccgagaaacagacccgcggaauuuucggcgcgaucgccggguuuaucgaaaauggaugggagggcaugguugaugggugguauggauucagacaccagaacuccgagggccggggccaagcugccgaccuuaagagcacacaggcugccauugaucagaucaaugggaaacucaacagacugauuggaaagaccaaugaaaaauuccaccagaucgagaaggaauuuucugagguggaaggccgcauucaagaccuugagaaguacguggaggauacgaaaaucgaccugugguccuauaacgccgaacuccuggucgcucuggagaaccagcauacaauugaucucaccgacagcgaaaugaauaagcuguucgagaaaaccaagaaacagcuucgggaaaacgcggaggauauggggaauggaugcuuuaagaucuaccacaagugugacaacgccugcaucggcucuauuagaaaugggacauauaaccaugauguguaccgcgacgaggcucugaauaaccgguuccagaucaaaggcguugaacucaaguccggauacaaagacuggauucuguggaucagcuuugccauuuccugcuuccuucuguguguggcccuccugggcuuuaucaugugggcuugccaaaaggggaauaucagauguaacauuugcaucuga

SEQ ID NO: 202690 - RNA, 1701 nt, Artificial Sequence
  derived and/or modified CDS sequence (opt5) from hemagglutinin__InfluenzaA__AHC58396
augaagaccaucauugcccugagcuacauccucugccugguguucgcucagaaacuucccggcaacgacaauuccacagccacgcugugucucgggcaccaugcggucccuaacggaaccauuguuaagacaaucaccaaugaucaaauugaggugacaaacgcuaccgaacuggugcagucuagcuccacaggcgagaucugcaauucuccgcaccagauccuugacggggaaaacuguacccugauugaugcccuccugggagacccccagugcgauggcuuucaaaauaaaaagugggaccuguucgucgagagaagcaaagcccauuccaacuguuauccuuacgaugugcccgacuaugcuucucuccggagccugguugccuccagcgggacgcuugaauuuaauaacgagucuuucaauuggaccggagugacacagaacggcaccuccagcgcuugcauccgcggcucuaauaacuccuuuuucagcagacugaauuggcucacacaccugaacuuuaaguacccugcccuuaacgucaccaugcccaauaacgagcaguucgauaagcuguauauuuggggagugcaucacccugggacggacaaagaucagaucuuucucuacgcgcaagccucuggccggauuacaguuuccaccaagcgcagccagcaggcugugaucccgaauauuggguccagaccccggguccgcaacaucccuucuagagugagcaucuauuggacaauugugaaacccggagacauccugcugauuaauuccaccggcaaccucaucgccccucggggguacuucaagauucgcagcggaaaaucuuccaucaugagaagcgaugcucccaucggcaaguguaauucugccugcauuaccccgaacggcagcaucccuaaugacaagcccuuucagaacgucaaucggauuacauacggggcguguccucgcuauguuaaacaaaacacgcugaaacuugccaccggaaugagaaaugugcccgaaaaacagacacggggcaucuucggggcuauugccggauuuaucgagaacggcugggaagggaugguggacggaugguacggcuuccgccaccaaaauuccgagggcagagggcaggcugccgaucugaagucuacccaggccgcuaucgaccagauuaacggaaaacucaaccggcugaucggcaagacaaaugagaaauuccaucagauugaaaaggaguuuagcgaagucgaggggagaauccaagaucuugaaaaguauguggaggacaccaaaauugaucugugguccuacaacgcggagcuccugguugcccuggaaaaucagcacacgaucgaccucacagauagcgagaugaacaagcuguucgaaaagaccaagaaacagcuucgcgagaaugcugaagacaugggaaacggcugcuuuaagauuuaucauaagugugauaaugccugcaucgggucuauccggaacggcaccuacgaccacgauguguauagagacgaggcccugaauaaccgcuuccagauuaaaggagucgagcucaaguccggcuacaaagacuggauccuguggauuagcuuugcuaucucuugcuuccuucuguguguggcccuccugggguuuauuaugugggcgugccaaaagggaaauauccgguguaacaucugcauuuga

SEQ ID NO: 202691 - RNA, 1701 nt, Artificial Sequence; identical to SEQ ID NO: 199854
  derived and/or modified CDS sequence (opt5) from hemagglutinin__InfluenzaA__AHC58408

SEQ ID NO: 202692 - RNA, 1701 nt, Artificial Sequence; identical to SEQ ID NO: 201146
  derived and/or modified CDS sequence (opt5) from hemagglutinin__InfluenzaA__AHC58420

SEQ ID NO: 202693 - RNA, 1701 nt, Artificial Sequence; identical to SEQ ID NO: 201146
  derived and/or modified CDS sequence (opt5) from hemagglutinin__InfluenzaA__AHC58432

SEQ ID NO: 202694 - RNA, 1701 nt, Artificial Sequence; identical to SEQ ID NO: 199054
  derived and/or modified CDS sequence (opt5) from hemagglutinin__InfluenzaA__AHC58444

SEQ ID NO: 202695 - RNA, 1701 nt, Artificial Sequence; identical to SEQ ID NO: 202690
  derived and/or modified CDS sequence (opt5) from hemagglutinin__InfluenzaA__AHC58456

SEQ ID NO: 202696 - RNA, 1701 nt, Artificial Sequence
  derived and/or modified CDS sequence (opt5) from hemagglutinin__InfluenzaA__AHC58468
augaaggccauccuggugguccuccuguacaccuucgcuacagccaacgcggacacgcuuugcauuggcuaucacgcuaauaacagcaccgauacaguugacaccgugcuggagaaaaaugugacagucacccauuccgugaaccuccuggaagauaagcacaaugggaaacuuuguaagcugagaggaguugcuccccuccaucugggcaaaugcaacaucgccggguggauucugggaaauccugagugugaaucucucagcacagccuccucuuggagcuacaucguggagaccuccucuagcgacaacggcacgugcuauccgggggauuuuauuaauuacgaggaacugcgggagcagcuuuccagcgucucuuccuucgaacgcuuugagaucuuccccaagaccagcucuuggccuaaccacgacuccaauaagggagugacagccgcuuguccccaagccggcgcgaaaucuuuuuauaagaaccugaucuggcucguuaaaaagggcaauagcuacccuaaacuguccaagagcuauauuaacgauaaggggaaagaagugcuuguccuguggggaauccaucaccccuccaccucugccgaccagcagagccucuaccagaaugcugaugccuacguguucgugggcacauccaaguauagcaaaaaguuuaaaccugagauugcugucagaccgaagguucgggaccaagaggggcgcaugaacuacuauuggacccugguggaacccggagauaaaaucacguucgaggccacaggcaaccugcucgugccuagauacgcguuugccauggaacggaaugcugggucuggaauuaucauuuccgacacccccguccacgauugcaacacaaccugucagaccccuaagggcgccaucaauacaagccugcccuuccagaacauccauccgauuacgaucggcaagugcccuaaauaugugaagucuaccaaacuucgccuggcuacagggcucagaaauguucccagcauucagucccggggacuguuuggcgccaucgccggguucauugagggaggcuggaccgggaugguggacggaugguacggcuaucaccaucaaaacgcucagggcucuggguacgcggccgaccuuaagagcacacagaaugcuaucgauaaaaucaccaacaaggucaauuccgugauugaaaagaugaacacgcaguuuacagccguuggaaaagaguucaaucaccuggagcgcagaaucgaaaaccucaauaagaaaguggacgauggcuuccuggacauuuggaccuacaacgccgagcugcucguccugcuugaaaaugagcggacccuggauuaucacgacagcaacgugaagaaccucuacgaaaaaguccgcucucaacugaagaauaacgcuaaggagaucgggaauggauguuuugaguucuaucauaaaugcgauaacacauguauggaauccgugaagaauggcaccuacgacuauccuaaauacagcgaggaagccaaacuuaacagagaggaaauugaugggguuaagcuggagucuacacggaucuaucagauccucgcgauuuacuccacgguggcuagcucccugguccuggugguuucucucggcgccaucagcuuuuggaugugcuccaauggaucucugcagugccgcauuuguaucuga

SEQ ID NO: 202697 - RNA, 1701 nt, Artificial Sequence
  derived and/or modified CDS sequence (opt5) from hemagglutinin__InfluenzaA__AHC58479
augaagaccaucauugcccugagcuacauccucugccugguguucgcucagaaacuucccggcaacgacaauuccacagccacgcugugucucgggcaccaugcggucccuaacggaaccauuguuaagacaaucaccaaugaucaaauugaggugacaaacgcuaccgaacuggugcaaaauucuagcacaggcgagaucugcgacuccccgcaccagaucauugauggggaaaacuguacccuuaucgacgcccugcucggagauccccagugcgacggcuuucagaauaaaaagugggaucuguucgucgagagaucuaaagccuauagcaacuguuacccuuaugacgugcccgauuacgcuucccugcggucucucguugccagcuccgggacgcuggaauuuaauaacgagagcuucaauuggaccggagugacacagaacggcaccucuuccgcuugcauucgcagaagcaauaacucuuucuucucccggcuuaauuggcugacacaucucaacuuuaaguauccugcccugaacgucaccaugcccaauaacgagcaguucgacaaacuuuacaucuggggcgugcaccauccugggacggauaaggaccagauuuuucuguaugcgcaagccagcggacgcaucacaguuucuaccaagagaucccagcaggcugugauuccgaauaucggcagccggccccgcgucagaaacaucccuucccggauuucuaucuacuggacaauugugaaacccggggauauccuccugauuaauagcaccggaaaccugaucgccccucgcggcuacuucaagaucagauccgggaaaagcucuauuaugcgguccgacgcucccaucggaaaguguaauagcgaaugcauuaccccgaacggcucuaucccuaaugacaagcccuuucagaacgugaaucgcauuacauauggcgccuguccuagauacgucaaacaaaacacgcucaagcuggcgaccgggaugcggaauguucccgagaaacagacacgcggaaucuucggcgccaucgcuggguuuauugaaaacggaugggagggcaugguggaugggugguauggauucagacaccagaauagcgagggccggggccaagccgcugaccuuaaguccacccaggccgccaucaaccagauuaacgggaaacugaauagacucaucggaaagacaaacgaaaaauuccaccagauugagaaggaauuuucugagguggaaggccgcauccaagaucuggagaaguacgucgaggacaccaaaauugaucuuuggagcuauaaugcugaacugcucguggcgcuggagaaccagcauacgaucgaccugacagauuccgaaaugaauaagcucuuugagaaaaccaagaaacagcugcgggaaaacgccgaggacauggggaauggaugcuuuaagaucuaccacaagugugauaacgcuugcauuggcagcaucagaaaugggaccuaugaccaugauguuuaccgcgacgaggcccuuaacaaucgguucaaaauuaagggcguggaacugaaaucuggauacaaggacuggauccucuggauuuccuuugccaucagcugcuuccugcuuugugucgcucugcucggcuuuaucaugugggccugccagaaagggaacauuagauguaauaucugcauuuga

SEQ ID NO: 202698 - RNA, 1701 nt, Artificial Sequence; identical to SEQ ID NO: 202690
  derived and/or modified CDS sequence (opt5) from hemagglutinin__InfluenzaA__AHC58491

SEQ ID NO: 202699 - RNA, 1701 nt, Artificial Sequence; identical to SEQ ID NO: 199054
  derived and/or modified CDS sequence (opt5) from hemagglutinin__InfluenzaA__AHC58515

SEQ ID NO: 202700 - RNA, 1701 nt, Artificial Sequence; identical to SEQ ID NO: 199854
  derived and/or modified CDS sequence (opt5) from hemagglutinin__InfluenzaA__AHC58527

SEQ ID NO: 202701 - RNA, 1701 nt, Artificial Sequence
  derived and/or modified CDS sequence (opt5) from hemagglutinin__InfluenzaA__AHC58563
augaagaccaucauugcccugagcuacauccucugccugguguucgcucagaaacuucccggcaacgacaauuccacagccacgcugugucucgggcaccaugcggucccuaacggaaccauuguuaagacaaucaccaaugaucaaauugaggugacaaacgcuaccgaacuggugcaaaauucuagcacaggcgagaucugcgacuccccgcaccagaucauugauggggaaaacuguacccuuaucgacgcccugcucggagauccccagugcgacggcuuucagaauaaaaagugggaucuguucgucgagagaucuaaagccuauagcaacuguuacccuuaugacgugcccgauuacgcuucccugcggucucucguugccagcuccgggacgcuggaauuuaauaacgagagcuucaauuggaccggagugacacagaacggcaccucuuccgcuugcauucgcagaagcaauaacucuuucuucucccggcuuaauuggcugacacaucucaacuuuaaguauccugcccugaacgucaccaugcccaauaacgagcaguucgacaaacuuuacaucuggggcgugcaccauccugggacggauaaggaccagauuuuucuguaugcgcaagccagcggacgcaucacaguuucuaccaagagaucccagcaggcugugauuccgaauaucggcagccggccccgcgucagaaacaucccuucccggauuucuaucuacuggacaauugugaaacccggggauauccuccugauuaauagcaccggaaaccugaucgccccucgcggcuacuucaagaucagauccgggaaaagcucuauuaugcgguccgacgcucccaucggaaaguguaauagcgaaugcauuaccccgaacggcucuaucccuaaugacaagcccuuucagaacgugaaucgcauuacauauggcgccuguccuagauacgucaaacaaaacacgcucaagcuggcgaccgggaugcggaauguucccgagaaacagacacgcggaaucuucggcgccaucgcuggguuuauugaaaacggaugggagggcaugguggaugggugguauggauucagacaccagaauagcgagggccggggccaagccgcugaccuuaaguccacccaggccgccaucgaucagauuaacgggaaacugaacagacucaucggaaagacaaaugaaaaauuccaccagauugagaaggaauuuucugagguggaaggccgcauccaagaccuggagaaguacgucgaggauaccaaaauugaccuuuggagcuauaacgcugaacugcucguggcgcuggagaaucagcauacgaucgaucugacagacuccgaaaugaacaagcucuuugagaaaaccaagaaacagcugcgggaaaaugccgaggauauggggaacggaugcuuuaagaucuaccacaagugugacaaugcuugcauuggcagcaucagaaacgggaccuaugaucaugacguuuaccgcgacgaggcccuuaauaaccgguuccagauuaaaggcguggaacugaagucuggauacaaagauuggauccucuggauuuccuuugccaucagcugcuuccugcuuugugucgcucugcucggcuuuaucaugugggccugccaaaaggggaauauuagauguaacaucugcauuuga

SEQ ID NO: 202702 - RNA, 1701 nt, Artificial Sequence; identical to SEQ ID NO: 199854
  derived and/or modified CDS sequence (opt5) from hemagglutinin__InfluenzaA__AHC58575

SEQ ID NO: 202703 - RNA, 1701 nt, Artificial Sequence; identical to SEQ ID NO: 198927
  derived and/or modified CDS sequence (opt5) from hemagglutinin__InfluenzaA__AHC58587

SEQ ID NO: 202704 - RNA, 1701 nt, Artificial Sequence; identical to SEQ ID NO: 199054
  derived and/or modified CDS sequence (opt5) from hemagglutinin__InfluenzaA__AHC58599

SEQ ID NO: 202705 - RNA, 1701 nt, Artificial Sequence; identical to SEQ ID NO: 199854
  derived and/or modified CDS sequence (opt5) from hemagglutinin__InfluenzaA__AHC58611

SEQ ID NO: 202706 - RNA, 1701 nt, Artificial Sequence; identical to SEQ ID NO: 199854
  derived and/or modified CDS sequence (opt5) from hemagglutinin__InfluenzaA__AHC58623

SEQ ID NO: 202707 - RNA, 1701 nt, Artificial Sequence; identical to SEQ ID NO: 199854
  derived and/or modified CDS sequence (opt5) from hemagglutinin__InfluenzaA__AHC58647

SEQ ID NO: 202708 - RNA, 1701 nt, Artificial Sequence; identical to SEQ ID NO: 199054
  derived and/or modified CDS sequence (opt5) from hemagglutinin__InfluenzaA__AHC58659

SEQ ID NO: 202709 - RNA, 1701 nt, Artificial Sequence; identical to SEQ ID NO: 198927
  derived and/or modified CDS sequence (opt5) from hemagglutinin__InfluenzaA__AHC58671

SEQ ID NO: 202710 - RNA, 1701 nt, Artificial Sequence; identical to SEQ ID NO: 201146
  derived and/or modified CDS sequence (opt5) from hemagglutinin__InfluenzaA__AHC58683

SEQ ID NO: 202711 - RNA, 1701 nt, Artificial Sequence; identical to SEQ ID NO: 198927
  derived and/or modified CDS sequence (opt5) from hemagglutinin__InfluenzaA__AHC58695

SEQ ID NO: 202712 - RNA, 1701 nt, Artificial Sequence; identical to SEQ ID NO: 201146
  derived and/or modified CDS sequence (opt5) from hemagglutinin__InfluenzaA__AHC58707

SEQ ID NO: 202713 - RNA, 1701 nt, Artificial Sequence; identical to SEQ ID NO: 201146
  derived and/or modified CDS sequence (opt5) from hemagglutinin__InfluenzaA__AHC58719

SEQ ID NO: 202714 - RNA, 1701 nt, Artificial Sequence; identical to SEQ ID NO: 202690
  derived and/or modified CDS sequence (opt5) from hemagglutinin__InfluenzaA__AHC58731

SEQ ID NO: 202715 - RNA, 1701 nt, Artificial Sequence
  derived and/or modified CDS sequence (opt5) from hemagglutinin__InfluenzaA__AHC58743
augaagaccaucauugccuggagcuacauccugugccucguguucgcucagaaacugcccggcaacgacaauuccacagccacgcuuugucuggggcaccaugcggucccuaacggaaccauuguuaagacaaucaccaaugaucaaauugaggugacaaacgcuaccgaacucgugcaaaauucuagcacaggcgagaucugcgacuccccgcaccagauccuggauggggaaaacuguacccuuauugacgcccugcucggagauccccagugcgacggcuuucagaauaaaaagugggaucuguucgucgagagaucuaaagccuauagcaacuguuacccuuaugacgugcccgauuacgcuucccugcggucucucguugccagcuccgggacgcuggaauuuaauaacgagagcuucaauuggaccggagugacacagaacggcaccucuuccgcuugcauccgcagaagcaauaacucuuucuucucccggcuuaauuggcugacacaucucaacuuuaaguauccugcccugaacgucaccaugcccaauaacgagcaguucgacaaacuuuacauuuggggcgugcaccauccugggacggauaaggaccagaucuuucuguaugcgcaagccagcggacgcauuacaguuucuaccaagagaucccagcaggcugugaucccgaauauuggcagccggccccgcgucagaaacaucccuucccggaucucuauuuacuggacaaucgugaaacccggggauauucuccugaucaauagcaccggaaaccugauugccccucgcggcuacuucaagaucagauccgggaaaagcucuaucaugcgguccgacgcucccauuggaaaguguaauagcgaaugcaucaccccgaacggcucuauuccuaaugacaagcccuuucagaacgugaaucgcaucacauauggcgccuguccuagauacgucaaacaaaacacgcucaagcuggcgaccgggaugcggaauguucccgagaaacagacacgcggaauuuucggcgccaucgcuggguuuaucgaaaacggaugggagggcaugguggaugggugguauggauucagacaccagaauagcgagggccggggccaagccgcugaccuuaaguccacccaggccgccauugaucagaucaacgggaaacugaacagacucauuggaaagacaaaugaaaaauuccaccagaucgagaaggaauuuucugagguggaaggccgcauucaagaccuggagaaguacgucgaggauaccaaaaucgaccuuuggagcuauaacgcugaacugcucguggcgcuggagaaucagcauacgauugaucugacagacuccgaaaugaacaagcucuuugagaaaaccaagaaacagcugcgggaaaaugccgaggauauggggaacggaugcuuuaagaucuaccacaagugugacaaugcuugcaucggcagcauuagaaacgggaccuaugaucaugacguuuaccgcgacgaggcccuuaauaaccgguuccagaucaaaggcguggaacugaagucuggauacaaagauuggauucucuggaucuccuuugccauuagcugcuuccugcuuugugucgcucugcucggcuuuaucaugugggccugccaaaaggggaauaucagauguaacauuugcaucuga

SEQ ID NO: 202716 - RNA, 1701 nt, Artificial Sequence; identical to SEQ ID NO: 202690
  derived and/or modified CDS sequence (opt5) from hemagglutinin__InfluenzaA__AHC58755

SEQ ID NO: 202717 - RNA, 1701 nt, Artificial Sequence; identical to SEQ ID NO: 198927
  derived and/or modified CDS sequence (opt5) from hemagglutinin__InfluenzaA__AHC58779

SEQ ID NO: 202718 - RNA, 1701 nt, Artificial Sequence; identical to SEQ ID NO: 202689
  derived and/or modified CDS sequence (opt5) from hemagglutinin__InfluenzaA__AHC58791

SEQ ID NO: 202719 - RNA, 1701 nt, Artificial Sequence
  derived and/or modified CDS sequence (opt5) from hemagglutinin__InfluenzaA__AHC58803
augaagaccaucauugcccugagcuacauccucugccugguguucgcucagaaacuucccggcaacgacaauuccacagccacgcugugucucgggcaccaugcggucccuaacggaaccauuguuaagacaaucaccaaugaucaaauugaggugacaaacgcuaccgaacuggugcaaaauucuagcacaggcgagaucugcgacuccccgcaccagaucauugauggggaaaacuguacccuuaucgacgcccugcucggagauccccagugcgacggcuuucagaauaaaaagugggaucuguucgucgagagaucuaaagccuauagcaacuguuacccuuaugacgugcccgauuacgcuucccugcggucucucguugccagcuccgggacgcuggaauuuaauaacgagagcuucaauuggaccggagugacacagaacggcaccucuuccgcuugcauucgcagaagcaauaacuccuuuuucucucggcuuaauuggcugacacaucucaacuuuaaguauccugcccugaacgucaccaugcccaauaacgagcaguucgacaaacuuuacaucuggggcgugcaccauccugggacggauaaggaccagauuuuucuguaugcgcaagccagcggacgcaucacaguuucuaccaagagaucccagcaggcugugauuccgaauaucggcagccggccccgcgucagaaacaucccuucccggauuucuaucuacuggacaauugugaaacccggggauauccuccugauuaauagcaccggaaaccugaucgccccucgcggcuacuucaagaucagauccgggaaaagcucuauuaugaaguccgacgcucccaucggaaaguguaauagcgaaugcauuaccccgaacggcucuaucccuaaugacaaacccuuucagaacgugaaucggauuacauauggcgccuguccucgcuacgucaagcaaaacacgcucaaacuggcgaccgggaugagaaauguucccgagaagcagacacggggaaucuucggcgccaucgcuggguuuauugaaaacggaugggagggcaugguggaugggugguauggauuccgccaccagaauagcgagggcagaggccaagccgcugaccuuaaauccacccaggccgccaucgaucagauuaacgggaagcugaaccggcucaucggaaaaacaaaugaaaaguuccaccagauugagaaggaauuuucugagguggaaggcagaauccaagaccuggagaaauacgucgaggauaccaagauugaccuuuggagcuauaacgcugaacugcucguggcgcuggagaaucagcauacgaucgaucugacagacuccgaaaugaacaaacucuucgagaagaccaaaaagcagcugcgcgaaaaugccgaggauauggggaacggaugcuuuaagaucuaccacaaaugugacaaugcuugcauuggcagcauccggaacgggaccuaugaucaugacguuuacagagacgaggcccuuaauaaccgcuucaagauuaaaggcguggaacugaagucuggauacaaagauuggauccucuggauuuccuuugccaucagcugcuuccugcuuugugucgcucugcucggcuuuaucaugugggccugccagaaggggaauauucgguguaacaucugcauuuga

SEQ ID NO: 202720 - RNA, 1701 nt, Artificial Sequence
  derived and/or modified CDS sequence (opt5) from hemagglutinin__InfluenzaA__AHC58815
augaagaccaucauugcccugagcuacauccucugccugguguucgcucagaaacuucccggcaacgacaauuccacagccacgcugugucucgggcaccaugcggucccuaacggaaccauuguuaagacaaucaccaaugaucaaauugaggugacaaacgcuaccgaacuggugcagucuagcuccacaggcgagaucugcaauucuccgcaccagauccuugacgggggaaacuguacccugauugaugcccuccugggcgacccccagugcgauggguuucaaaauaaaaagugggaccuguucgucgaaagaagcaaagccuauuccaacuguuacccuuaugaugugcccgacuacgcuucucuccggagccugguugccuccagcggaacgcuugaguuuaauaacgaaucuuucaauuggaccggcgugacacagaacggcaccuccagcgcuugcauccgcagaucuaauaacuccuuuuucagccggcugaauuggcucacacaucugaacuuuaaguauccugcccuuaacgucaccaugcccaauaacgagcaguucgauaagcuguacauuuggggagugcaccauccugggacggacaaagaucagaucuuucucuaugcgcaagccucuggccgcauuacaguuuccaccaagagaagccagcaggcugugaucccgaauauugggucccggccccgcgucagaaacaucccuucucggaucagcauuuacuggacaaucgugaaacccggagacauucugcugaucaauuccaccggcaaccucauugccccucgcggguacuucaagaucagaagcggaaaaucuuccaucaugcggagcgaugcucccauuggcaaguguaauucugagugcaucaccccgaacggcagcauuccuaaugacaagcccuuucagaacgugaaucgcaucacauauggggccuguccuagauacgucaaacaaaacacgcugaaacuugcgaccggaaugcggaauguucccgaaaaacagacacgcggcauuuucggggccaucgcuggauuuaucgagaacggcugggaagggaugguggacggaugguauggcuucagacaccaaaauuccgagggccgggggcaggccgcugaucugaagucuacccaggccgccauugaccagaucaacggaaaacucaacagacugauuggcaagacaaaugagaaauuccaccagaucgaaaaggaguuuagcgaaguggaggggcgcauucaagaucuugaaaaguacgucgaggacaccaaaaucgaucugugguccuauaacgcugagcuccugguggcgcuggaaaaucagcauacgauugaccucacagauagcgagaugaacaagcuguucgaaaagaccaagaaacagcuucgggagaaugccgaagacaugggaaacggcugcuuuaagaucuaccacaagugugauaaugcuugcaucgggucuauuagaaacggcaccuaugaccauaauguuuaccgcgaugaggcccugaacaaucgguuccagaucaaaggaguggagcucaaguccggcuacaaagacuggauucuguggaucagcuuugccauuucuugcuuccuucugugugucgcucuccugggguuuaucaugugggccugccaaaagggaaacaucagauguaauauuugcaucuga

SEQ ID NO: 202721 - RNA, 1701 nt, Artificial Sequence; identical to SEQ ID NO: 198927
  derived and/or modified CDS sequence (opt5) from hemagglutinin__InfluenzaA__AHC58827

SEQ ID NO: 202722 - RNA, 1701 nt, Artificial Sequence; identical to SEQ ID NO: 199854
  derived and/or modified CDS sequence (opt5) from hemagglutinin__InfluenzaA__AHC58839

SEQ ID NO: 202723 - RNA, 1701 nt, Artificial Sequence
  derived and/or modified CDS sequence (opt5) from hemagglutinin__InfluenzaA__AHC58863
augaagaccaucauugcccugagcuacauccucugccugguguucgcucagaaacuucccggcaacgacaauuccacagccacgcugugucucgggcaccaugcggucucuaacggaaccauuguuaagacaaucaccaaugaucaaauugaggugacaaacgcuaccgaacuggugcagagcuccucuacaggcgagaucugcaauagcccucaccagauccuugacggggaaaacuguacccugauugaugcccuccugggagacccgcagugcgauggcuuucaaaauaaaaagugggaccuguucgucgagagauccaaagcccauucuaacuguuaucccuacgaugugccugacuaugcuagccuccggucccugguugccagcucugggacgcuugaauuuaauaacgaguccuucaauuggaccggagugacacagaacggcaccagcucugcuugcauccgcggcuccaauaacagcuuuuucucuagacugaauuggcucacacaccugaacuuuaaguaccccgcccuuaacgucaccaugccuaauaacgagcaguucgauaagcuguauauuuggggagugcaucaccccgggacggacaaagaucagaucuuucucuacgcgcaagccuccggccggauuacaguuagcaccaagcgcucccagcaggcugugaucccuaauauugggucuagaccgcggguccgcaacauccccagcagaguguccaucuauuggacaauugugaaaccuggagacauccugcugauuaauagcaccggcaaccucaucgcuccccggggguacuucaagauucgcucuggaaaauccagcaucaugagaucugaugccccuaucggcaaguguaauagcgccugcauuacccccaacggcuccaucccgaaugacaagccuuuucagaacgucaaucggauuacauacggggcguguccccgcuauguuaaacaaaacacgcugaaacuugccaccggaaugagaaaugugccugaaaaacagacacggggcaucuucggggcuauugccggauuuaucgagaacggcugggaagggaugauggacggaugguacggcuuccgccaccagaauagcgagggcagagggcaagcugccgaucugaagucuacccaggccgcuaucgaccagauuaacggaaaacucaaccggcugaucggcaagacaaaugagaaauuccaucagauugaaaaggaguuuuccgaaguggaggggagaauccaagaucuugaaaaguaugucgaggacaccaaaauugaucuguggagcuacaacgcggagcuccugguggcccuggaaaaucagcacacgaucgaccucacagauucugagaugaacaagcuguucgaaaagaccaagaaacagcuucgcgagaaugcugaagacaugggaaacggcugcuuuaagauuuaucauaagugugauaaugccugcaucggguccauccggaacggcaccuacgaccacgauguuuauagagacgaggcccugaauaaccgcuuccagauuaaaggaguggagcucaagagcggcuacaaagacuggauccuguggauuucuuuugcuaucuccugcuuccuucugugugucgcccuccugggguuuauuaugugggcgugccaaaagggaaauauccgguguaacaucugcauuuga

SEQ ID NO: 202724 - RNA, 1701 nt, Artificial Sequence; identical to SEQ ID NO: 198927
  derived and/or modified CDS sequence (opt5) from hemagglutinin__InfluenzaA__AHC58875

SEQ ID NO: 202725 - RNA, 1701 nt, Artificial Sequence; identical to SEQ ID NO: 199854
  derived and/or modified CDS sequence (opt5) from hemagglutinin__InfluenzaA__AHC58887

SEQ ID NO: 202726 - RNA, 1701 nt, Artificial Sequence; identical to SEQ ID NO: 202690
  derived and/or modified CDS sequence (opt5) from hemagglutinin__InfluenzaA__AHC58899

SEQ ID NO: 202727 - RNA, 1701 nt, Artificial Sequence; identical to SEQ ID NO: 199854
  derived and/or modified CDS sequence (opt5) from hemagglutinin__InfluenzaA__AHC58981

SEQ ID NO: 202728 - RNA, 1701 nt, Artificial Sequence; identical to SEQ ID NO: 199854
  derived and/or modified CDS sequence (opt5) from hemagglutinin__InfluenzaA__AHC58993

SEQ ID NO: 202729 - RNA, 1701 nt, Artificial Sequence; identical to SEQ ID NO: 199854
  derived and/or modified CDS sequence (opt5) from hemagglutinin__InfluenzaA__AHC59005

SEQ ID NO: 202730 - RNA, 1701 nt, Artificial Sequence
  derived and/or modified CDS sequence (opt5) from hemagglutinin__InfluenzaA__AHC59017
augaagaccaucauugcccugagcuacauccucugccugguguucgcucagaaacuucccggcaacgacaauuccacagccacgcugugucucgggcaccaugcggucccuaacggaaccauuguuaagacaaucaccaaugaucaaauugaggugacaaacgcuaccgaacuggugcagucuagcuccacaggcgagaucugcaauucuccgcaccagauccuugacggggaaaacuguacccugauugaugcccuccugggagacccccagugcgauggcuuucaaaauaaaaagugggaccuguucgucgagagaagcaaagcccauuccaacuguuauccuuacgaugugcccgacuaugcuucucuccggagccugguugccuccagcgggacgcuugaauuuaauaacgagucuuucaauuggaccggagugacacagaacggcaccuccagcgcuugcauccgcggcucuaauaacuccuuuuucagcagacugaauuggcucacacaccugaacuuuaaguacccugcccuuaacgucaccaugcccaauaacgagcaguucgauaagcuguauauuuggggagugcaucacccugggacggacaaagaucagaucuuucucuacgcgcaagccucuggccggauuacaguuuccaccaagcgcagccagcaggcugugaucccgaauauuggguccagaccccggguccgcaacaucccuucuagagugagcaucuauuggacaauugugaaacccggagacauccugcugauuaauuccaccggcaaccucaucgccccucggggguacuucaagauucgcagcggaaaaucuuccaucaugagaagcgaugcucccaucggcaaguguaauucugccugcauuaccccgaacggcagcaucccuaaugacaagcccuuucagaacgucaaucggauuacauacggggcguguccucgcuauguuaaacaaaacacgcugaaacuugccaccggaaugagaaaugugcccgaaaaacagacacggggcaucuucggggcuauugccggauuuaucgagaacggcugggaagggaugguggacggaugguacggcuuccgccaccaaaauuccgagggcagagggcaggcugccgaucugaagucuacccaggccgcuaucgaccagauuaacggaaaacucaaccggcugaucggcaagacaaaugagaaauuccaucagauugaaaaggaguuuagcgaagucgaggggagaauccaagaucuugaaaaguauguggaggacaccaaaauugaucugugguccuacaacgcggagcuccugguugcccuggaaaaucagcacacgaucgaccucacagauagcgagaugucuaagcuguucgaaaagaccaagaaacagcuucgcgagaacgcugaagacaugggaaauggcugcuuuaagauuuaucauaagugugauaacgccugcaucggguccauccggaauggcaccuacgaccacgauguguauagagacgaggcccugaacaaucgcuuccagauuaaaggagucgagcucaagagcggcuacaaagacuggauccuguggauuucuuuugcuaucuccugcuuccuucuguguguggcccuccugggguuuauuaugugggcgugccaaaagggaaacauccgguguaauaucugcauuuga

SEQ ID NO: 202731 - RNA, 1701 nt, Artificial Sequence; identical to SEQ ID NO: 202690
  derived and/or modified CDS sequence (opt5) from hemagglutinin__InfluenzaA__AHC59029

SEQ ID NO: 202732 - RNA, 1701 nt, Artificial Sequence; identical to SEQ ID NO: 199054
  derived and/or modified CDS sequence (opt5) from hemagglutinin__InfluenzaA__AHC59041

SEQ ID NO: 202733 - RNA, 1701 nt, Artificial Sequence
  derived and/or modified CDS sequence (opt5) from hemagglutinin__InfluenzaA__AHC59053
augaagaccaucauugcccugagcuacauccucugccugguguucgcucagaaacuucccggcaacgacaauuccacagccacgcugugucucgggcaccaugcggucccuaacggaaccauuguuaagacaaucaccaaugaucaaauugaggugacaaacgcuaccgaacuggugcagucuagcuccacaggcgagaucugcaauucuccgcaccagauccuugacggggaaaacuguacccugauugaugcccuccugggagacccccagugcgauggcuuucaaaauaaaaagugggaccuguucgucgagagaagcaaagcccauuccaacuguuauccuuacgaugugcccgacuaugcuucucuccggagccugguugccuccagcgggacgcuugaauuuaauaacgagucuuucaauuggaccggagugacacagaacggcaccuccagcgcuugcauccgcagaucuaauaacuccuuuuucagccggcugaauuggcucacacaccugaacuuuaaguacccugcccuuaacgucaccaugcccaauaacgagcaguucgauaagcuguauauuuggggcgugcaucacccugggacggacaaagaucagaucuuucucuacgcgcaagccgcuggacgcauuacaguuucuaccaagagaucccagcaggccgugaucccgaauauuggcagccggccccgcgucagaaacaucccuucccgggugucuaucuauuggacaauugugaaacccggggacauccugcugauuaauagcaccggaaaccucaucgcuccucgcggcuacuucaagauucaguccgggaaaagcucuaucaugagauccgaugcccccaucggaaaguguaauagcgcgugcauuaccccgaacggcucuaucccuaaugacaagcccuuucaaaacgucaaucggauuacauacggcgccuguccucgcuauguuaaacagaacacgcugaaacuugcuaccgggaugagaaaugugcccgaaaaacagacacggggaaucuucggcgccauugcuggguuuaucgagaacggaugggaaggcaugguggacgggugguacggauuccgccaccaaaauagcgagggcagaggccaggccgccgaucugaaguccacccaggcugcgaucgaccagauuaacgggaaacucaaccggcugaucggaaagacaaaugagaaauuccaucaaauugaaaaggaguuuucugaagucgagggcagaauccaggaucuugaaaaguauguggaggacaccaaaauugaucuguggagcuacaacgccgagcuccugguugcucuggaaaaucagcacacgaucgaccucacagauuccgagaugaacaagcuguucgaaaagaccaagaaacagcuucgcgagaaugccgaagacauggggaacggaugcuuuaagauuuaucauaagugugauaaugccugcaucggcagcauccggaacgggaccuacgaccacgauguguauagagacgaggcucugaauaaccgcuuccaaauuaaaggcgucgagcucaagucuggauacaaagacuggauccuguggauuuccuuugccaucagcugcuuccuucuguguguggcgcuccugggcuuuauuauguggacaugccagaaggggaauauccgguguaacaucugcauuuga

SEQ ID NO: 202734 - RNA, 1701 nt, Artificial Sequence
  derived and/or modified CDS sequence (opt5) from hemagglutinin__InfluenzaA__AHC59077
augaagaccaucauugcccugagcuacauccucugccugguguucgcucagaaacuucccggcaacgacaauuccacagccacgcugugucucgggcaccaugcggucccuaacggaaccauuguuaagacaaucaccaaugaucaaauugaggugacaaacgcuaccgaacuggugcaaaauucuagcacaggcgagaucugcgacuccccgcaccagauccuugauggggaaaacuguacccugauugacgcccuccugggagauccccagugcgacggcuuucagaauaaaaagugggaucuguucgucgagagaucuaaagccuauagcaacuguuacccuuaugacgugcccgauuacgcuucccuccggucucugguugccagcuccgggacgcuugaauuuaauaacgagagcuucaauuggaccggagugacacagaacggcaccucuuccgcuugcauccgcagaagcaauaacuccuuuuucucucggcugaauuggcucacacaucugaacuuuaaguauccugcccuuaacgucaccaugcccaauaacgagcaguucgacaagcuguacauuuggggcgugcaccauccugggacggauaaagaccagaucuuucucuaugcgcaagccagcggacgcauuacaguuucuaccaagagaucccagcaggcugugaucccgaauauuggcagccggccccgcgucagaaacaucccuucccggaucucuauuuacuggacaaucgugaaacccggggauauucugcugaucaauagcaccggaaaccucauugccccucgcggcuacuucaagaucagauccgggaaaagcucuaucaugcgguccgacgcucccauuggaaaguguaauagcgaaugcaucaccccgaacggcucuauuccuaaugacaagcccuuucagaacgugaaucgcaucacauauggcgccuguccuagauacgucaaacaaaacacgcugaaacuugcgaccgggaugcggaauguucccgagaagcagacacgcggaauuuucggcgccaucgcuggguuuaucgaaaacggaugggagggcaugguggaugggugguauggauucagacaccagaauagcgagggccggggccaagccgcugaccugaaguccacccaggccgccauugaucagaucaacgggaaacucaacagacugauuggaaagacaaaugaaaaauuccaccagaucgagaaggaauuuucugagguggaaggccgcauucaagaccuugagaaguacgucgaggauaccaaaaucgaccuguggagcuauaacgcugaacuccugguggcgcuggagaaucagcauacgauugaucucacagacuccgaaaugaacaagcuguucgagaaaaccaagaaacagcuucgggaaaaugccgaggauauggggaacggaugcuuuaagaucuaccacaagugugacaaugcuugcaucggcagcauuagaaacgggaccuaugaucaugacguuuaccgcgacgaggcccugaauaaccgguuccagaucaaaggcguggaacucaagucuggauacaaagauuggauucuguggaucuccuuugccauuagcugcuuccuucugugugucgugcuccugggcuuuaucaugugggcuugccaaaaggggaauaucagauguaacauuugcaucuga

SEQ ID NO: 202735 - RNA, 1701 nt, Artificial Sequence; identical to SEQ ID NO: 201146
  derived and/or modified CDS sequence (opt5) from hemagglutinin__InfluenzaA__AHC59089

SEQ ID NO: 202736 - RNA, 1701 nt, Artificial Sequence; identical to SEQ ID NO: 199854
  derived and/or modified CDS sequence (opt5) from hemagglutinin__InfluenzaA__AHC59101

SEQ ID NO: 202737 - RNA, 1701 nt, Artificial Sequence; identical to SEQ ID NO: 199054
  derived and/or modified CDS sequence (opt5) from hemagglutinin__InfluenzaA__AHC59113

SEQ ID NO: 202738 - RNA, 1701 nt, Artificial Sequence; identical to SEQ ID NO: 199854
  derived and/or modified CDS sequence (opt5) from hemagglutinin__InfluenzaA__AHC59125

SEQ ID NO: 202739 - RNA, 1701 nt, Artificial Sequence
  derived and/or modified CDS sequence (opt5) from hemagglutinin__InfluenzaA__AHC59137
augaagaccaucauugcccugagcuacauccucugccugguguucgcucagaaaauucccggcaacgacaauuccacagccacgcuuugucuggggcaccaugcggucucuaacggaaccaucguuaagacaauuaccaaugaucaaaucgaggugacaaacgcuaccgaacucgugcagagcuccucuacaggcgagaucugcaauagcccucaccagauucuggacggggaaaacuguacccuuaucgaugcccugcucggagacccgcagugcgauggcuuucaaaauaaaaagugggaccuguucgucgagagauccaaagcccauucuaacuguuaucccuacgaugugccugacuaugcuagccugcggucccucguugccagcucugggacgcuggaauuuaauaacgaguccuucaauuggaccggagugacacagaacggcaccagcucugcuugcauucgcggcuccaauaacagcuuuuucucuagacuuaauuggcugacacaccucaacuuuaaguaccccgcccugaacgucaccaugccuaauaacgagcaguucgauaagcuguauaucuggggagugcaucaccccgggacggacaaagaucagauuuuucuguacgcgcaagccuccggccggaucacaguuagcaccaagcgcucccagcaggcugugauuccuaauaucgggucuagaccgcggguccgcaacauccccagcagaguguccauuuauuggacaaucgugaaaccuggagacauucuccugaucaauagcaccggcaaccugauugcccccagaggguacuucaagauccgcucuggaaaauccagcaucaugagaucugaugcuccuauuggcaaguguaauagcgccugcaucacccccaacggcuccauuccgaaugacaagccuuuucagaacgucaaucggaucacauacggggcguguccccgcuauguuaaacaaaacacgcucaagcuggccaccggaaugagaaaugugccugaaaaacagacacggggcauuuucggggcuaucgccggauuuaucgagaacggcugggaagggaugauggacggaugguacggcuuccgccaccaaaauucugagggcagagggcaggcugccgaucuuaagagcacccaggccgcuauugaccagaucaacggaaaacugaaccggcucauuggcaagacaaaugagaaauuccaucagaucgaaaaggaguuuuccgaaguggaggggcggauucaagaucuggaaaaguaugucgaggacaccaaaaucgaucuuuggagcuacaacgcggagcugcucguggcccuggaaaaucagcacacgauugaccugacagauucugagaugaacaaacucuucgaaaagaccaagaaacagcugcgcgagaaugcugaagacaugggaaacggcugcuuuaagaucuaucauaagugugauaaugccugcaucggguccauucggaacggcaccuacgaccacgauguuuauagagacgaggcccuuaauaaccgcuuccagaucaaaggaguggagcuuaagagcggcuacaaagacuggauucucuggaucucuuuugcuauuuccugcuuccugcuuugugucgcccugcucggguuuaucaugugggcgugccaaaagggaaauauccgguguaacauuugcaucuga

SEQ ID NO: 202740 - RNA, 1701 nt, Artificial Sequence; identical to SEQ ID NO: 199054
  derived and/or modified CDS sequence (opt5) from hemagglutinin__InfluenzaA__AHC59149

SEQ ID NO: 202741 - RNA, 1701 nt, Artificial Sequence
  derived and/or modified CDS sequence (opt5) from hemagglutinin__InfluenzaA__AHC59185
augaagaccaucauugcccugagcuacauccucugccugguguucgcucagaaacuucccggcaacgacaauuccacagccacgcugugucucgggcaccaugcggucccuaacggaaccauuguuaagacaaucaccaaugaucaaauugaggugacaaacgcuaccgaacuggugcagucuagcuccacaggcgagaucugcgacucuccgcaccagauccuugauggggaaaauuguacccugauugacgcccuccugggagauccccagugcgacggcuuucaaaacaaaaagugggaucuguucgucgagagaagcaaagccuauuccaauuguuacccuuaugacgugcccgauuacgcuucucuccggagccugguugccuccagcgggacgcuugaauuuaacaaugagucuuucaacuggaccggagugacacagaauggcaccuccagcgcuugcauccgcagaucuaacuccagcuuuuucucucggcugaauuggcucacacaucugaacuuuaaguauccugcccuuaaugucaccaugcccaacaacgagcaguucgacaagcuguacauuuggggcgugcaccauccugggacggauaaagaccagaucuuucucuaugcgcaauccagcggacgcauuacaguuuccaccaagagaucucagcaggccgugaucccgaauauuggcagccggccccgcaucagaaacaucccuucccggauuagcaucuacuggacaauugucaaacccggggauauccugcugauuaauucuaccggaaaccucaucgcuccucgcggcuacuucaagaucagauccgggaaaagcucuauuaugcggagcgacgcccccaucggaaaguguaauuccgaaugcauuaccccgaacggcucuaucccuaaugacaagcccuuucagaacgugaaucgcauuacauauggcgcuuguccuagauacgugaaacaaagcacgcugaagcuggccaccgggaugcggaacguccccgagaaacagacacgcggaaucuucggcgcgaucgccggguuuauugaaaauggaugggagggcaugguugaugggugguauggauucagacaccagaacuccgagggccggggccaagcugccgaccuuaagagcacccaggcugccaucgaucagauuaaugggaaacucaacagacugaucggaaagacaaaugaaaaauuccaccagauugagaaggaauuuucugagguggaaggccgcauccaagaccuugagaaguacguggaggauaccaaaauugaccugugguccuauaacgccgaacuccuggucgcucuggagaaccagcauacgaucgaucucacagacagcgaaaugaauaagcuguucgagaaaaccaagaaacagcuucgggaaaacgcggaggauauggggaauggaugcuuuaagaucuaccacaagugugacaacgccugcauuggcucuaucagaaaugggaccuaugaucauaacguguaccgcgacgaggcucugaauaaccgguuccagauuaaaggcguugaacucaaguccggauacaaagacuggauccuguggauuagcuuugccaucuccugcuuccuucuguguguggcccuccugggcuuuaucaugugggcuugccaaaaggggaauauuagauguaacaucugcauuuga

SEQ ID NO: 202742 - RNA, 1701 nt, Artificial Sequence; identical to SEQ ID NO: 198927
  derived and/or modified CDS sequence (opt5) from hemagglutinin__InfluenzaA__AHC59197

SEQ ID NO: 202743 - RNA, 1701 nt, Artificial Sequence
  derived and/or modified CDS sequence (opt5) from hemagglutinin__InfluenzaA__AHC59209
augaagaccaucauugcccugagcuacauccucugccugguguucgcucaggagauucccggcaacgacaauuccacagccacgcuuugucuggggcaccaugcggucccuaacggaaccaucguuaaaacaauuaccaaugaucaaaucgaagugacaaacgcuaccgagcucgugcagucuagcuccacaggcgaaaucugcaauucuccgcaccagauucuggacggggagaacuguacccuuaucgaugcccugcucggagacccccagugcgaugacuuucaaaauaagaaaugggaucuguucgucgaaagaagcaaggcccauuccaacuguuauccuuacgacgugcccgauuaugcuucucugcggagccucguugccuccagcggcacgcuggaguuuaauaacgagucuuucaauuggaccggggugacacagaacggaaccuccagcgcuugcauucgcagaucuaauaacuccuuuuucagccggcuuaauuggcugacacaccucaacuuuaaauacccugcccugaacgucaccaugcccaauaacgaacaguucgacaaacuuuauaucuggggcgugcaucacccuggcacggauaaggaccagauuuuucuguacgcgcaagccucugggcgcaucacaguuuccaccaaaagaagccagcaggcugugauuccgaauaucggaucccggccccgcgucagaaacaucccuucucgggugagcauuuauuggacaaucgugaagcccggcgauauucuccugaucaauuccaccgggaaccugauugccccucgcggauacuucaaaaucagaagcggcaagucuuccaucaugcggagcgacgcucccauuggggaguguaauucugccugcaucaccccgaacggaagcauuccuaaugacaaacccuuucagaacgucaaucgcaucacauacggcgcguguccuagauauguuaagcaaaacacgcucaagcuggccaccggcaugcggaaugugcccgaaaaacagacacgcgggauuuucggagcuaucgccggcuuuaucgagaacgggugggagggaaugguggauggcugguacggguucagacaccaaaauuccgaaggacggggccaggcugccgaccuuaagucuacccaggccgcuauugaucagaucaacggcaaacugaacagacucauugggaagacaaaugagaaauuccaucagaucgaaaaggaguuuagcgaagucgagggacgcauucaagaccuggagaaauauguggaagauaccaagaucgaccuuugguccuacaacgcggagcugcucguugcccuggaaaaucagcacacgauugaucugacagacagcgagaugaacaaacucuucgaaaagaccaagaagcagcugcgggagaaugcugaggauaugggcaacgggugcuuuaagaucuaucauaaaugugacaaugccugcaucggaucuauuagaaacggcaccuacgaucacgccguguaucgcgacgaagcucuuaauaaccgguuccagaucaagggggucgagcugaaguccggcuacaaagacuggauucucuggaucagcuuugccauuucuugcuuccugcuuuguguggcgcugcucggauuuaucaugugggcuugccaaaagggcaauaucagauguaacauuugcaucuga

SEQ ID NO: 202744 - RNA, 1701 nt, Artificial Sequence; identical to SEQ ID NO: 199054
  derived and/or modified CDS sequence (opt5) from hemagglutinin__InfluenzaA__AHC59221

SEQ ID NO: 202745 - RNA, 1701 nt, Artificial Sequence; identical to SEQ ID NO: 202723
  derived and/or modified CDS sequence (opt5) from hemagglutinin__InfluenzaA__AHC59245

SEQ ID NO: 202746 - RNA, 1701 nt, Artificial Sequence; identical to SEQ ID NO: 202690
  derived and/or modified CDS sequence (opt5) from hemagglutinin__InfluenzaA__AHC59257

SEQ ID NO: 202747 - RNA, 1701 nt, Artificial Sequence; identical to SEQ ID NO: 199854
  derived and/or modified CDS sequence (opt5) from hemagglutinin__InfluenzaA__AHC59269

SEQ ID NO: 202748 - RNA, 1701 nt, Artificial Sequence; identical to SEQ ID NO: 202690
  derived and/or modified CDS sequence (opt5) from hemagglutinin__InfluenzaA__AHC59281

SEQ ID NO: 202749 - RNA, 1701 nt, Artificial Sequence; identical to SEQ ID NO: 199054
  derived and/or modified CDS sequence (opt5) from hemagglutinin__InfluenzaA__AHC59293

SEQ ID NO: 202750 - RNA, 1701 nt, Artificial Sequence
  derived and/or modified CDS sequence (opt5) from hemagglutinin__InfluenzaA__AHC59305
augaagaccaucauugcccugagcuacauccucugccugguguucgcucagaaacuucccggcaacgacaauuccacagccacgcugugucucgggcaccaugcggucccuaacggaaccauuguuaagacaaucaccaaugaucaaauugaggugacaaacgcuaccgaacuggugcagucuagcuccacaggcgagaucugcucuagcccgcaccagauccuugacggggaaaauuguacccugauugaugcccuccugggagacccccagugcgauggcuuucaaaacaaaaagugggaccuguucgucgagagauccaaagcccauucuaauuguuauccuuacgaugugcccgacuaugcuagccuccggucccugguugccagcucugggacgcuugaauuuaacaaugaguccuucaacuggaccggagugacacagaauggcaccagcucugcuugcauccgcagauccaacaauagcuuuuucucucggcugaacuggcucacacaccugaauuuuaaguacccugcccuuaacgucaccaugcccaacaaugagcaguucgauaagcuguauauuuggggcgugcaucacccugggacggacaaagaucagaucuuucucuacgcgcaagccuccggacgcauuacaguuagcaccaagagaucccagcaggcugugaucccgaacauuggcucucggccccgcgucagaaauaucccuagccggguguccaucuauuggacaauugugaaacccggggacauccugcugauuaacagcaccggaaaucucaucgccccucgcggcuacuucaagauuagaucugggaaauccagcaucaugcggucugaugcucccaucggaaaguguaacagcgccugcauuaccccgaauggcuccaucccuaacgacaagcccuuucagaaugucaaccgcauuacauacggcgcguguccuagauauguuaaacaaaauacgcugaaacuugccaccgggaugcggaacgugcccgaaaaacagacacgcggaaucuucggcgcuauugccggguuuaucgagaauggaugggaaggcaugguggacgggugguacggauucagacaccagaacucugagggccggggccaagcugccgaucucaagagcacccaggccgcuaucgaccagauuaaugggaaacugaacagacugaucggaaagacaaacgagaaauuccaucagauugaaaaggaguuuuccgaagucgagggccgcauccaagaucuugaaaaguauguggaggacaccaaaauugaucuguggagcuacaaugcggagcuccugguugcccuggaaaaccagcacacgaucgaccucacagauucugagaugaauaagcuguucgaaaagaccaagaaacagcuucgggagaacgcugaagacauggggaauggaugcuuuaagauuuaucauaagugugauaacgccugcaucggcuccaucagaaaugggaccuacgaccacgauguguaucgcgacgaggcccugaacaaucgguuccagauuaaaggcgucgagcucaagagcggauacaaagacuggauccuguggauuucuuuugcuaucuccugcuuccuucuguguguggcccuccugggcuuuauuaugugggcgugccaaaaggggaacaucagauguaauaucugcauuuga

SEQ ID NO: 202751 - RNA, 1701 nt, Artificial Sequence
  derived and/or modified CDS sequence (opt5) from hemagglutinin__InfluenzaA__AHC59329
augaagaccaucauugcccugagcuacauccucugccugguguucgcucagaaacuucccggcaacgacaauuccacagccacgcugugucucgggcaccaugcggucccuaacggaaccauuguuaagacaaucaccaaugauagaauugaggugacaaacgcuaccgaacuggugcaaaauucuagcaucggcgagaucugcgacuccccgcaccagauucuugauggggaaaacuguacacugaucgacgcccuccugggagauccccagugcgacggcuuucagaauaaaaagugggaucuguucgucgagcggucuaaagccuauagcaacuguuacccuuaugacgugcccgauuacgcuucccuccgcucucugguugccagcuccgggacccuugaauuuaauaacgagagcuucaauuggacgggagugacccaaaacggcacaucuuccgcuugcauuagacggagcaauaacuccuuuuucucucgccugaauuggcucacccaucugaacuuuaaguauccugcccuuaacgucacaaugcccaauaacgagcaguucgacaagcuguacaucuggggcgugcaccauccugggaccgaaaaagaucagauuuuucucuaugcgcagagcucuggaagaaucacgguuuccacaaagcggagccaacaggccgugauuccgaauaucggcucccgccccagaauccggaacauuccuucucgcaucagcauuuacuggaccaucgucaaacccggggacauucugcugaucaauuccacaggaaaccucaucgcuccuagaggcuacuucaagauucggagcgggaaaucuuccaucaugcgcagcgaugcccccauuggaaaguguaagucugagugcaucaccccgaauggcagcauuccuaacgacaaacccuuucagaaugugaacagaaucaccuauggcgcuuguccucgguacgugaagcaguccacacugaaacuugccacggggaugcgcaauguccccgaaaagcaaaccagaggaaucuucggcgcgauugccggguuuaucgagaacggaugggagggcaugguugacgggugguauggauuccggcaccaaaauucugaaggcagaggccaggcugccgaucugaaaagcacacaggcugccauugaccagaucaacgggaagcucaaucgccugauuggaaaaaccaacgagaaguuccaccagaucgaaaaggaguuuuccgaaguggagggccggauucaggaucuugagaaauacguggaagacacaaagaucgaucuguggagcuauaacgccgagcuccuggucgcucuggaaaaucaacauaccaucgaccucacggauucugagaugaacaaacuguucgaaaagaccaaaaagcagcuuagagagaaugcggaggacauggggaacggaugcuuuaagauuuaccacaaaugugauaaugccugcaucggcuccauucgcaacgggacauaugaccaugauguguaccgggacgaagcucugaauaacagauuccagaucaagggcguugagcucaaaagcggauacaaggacuggauucuguggaucucuuuugccaucuccugcuuccuucuguguguggcccuccugggcuuuauuaugugggcuugccagaaagggaauauccgcuguaacauuugcaucuga

SEQ ID NO: 202752 - RNA, 1701 nt, Artificial Sequence; identical to SEQ ID NO: 201146
  derived and/or modified CDS sequence (opt5) from hemagglutinin__InfluenzaA__AHC59341

SEQ ID NO: 202753 - RNA, 1701 nt, Artificial Sequence; identical to SEQ ID NO: 202690
  derived and/or modified CDS sequence (opt5) from hemagglutinin__InfluenzaA__AHC59365

SEQ ID NO: 202754 - RNA, 1701 nt, Artificial Sequence
  derived and/or modified CDS sequence (opt5) from hemagglutinin__InfluenzaA__AHC59377
augaagaccaucauugcccugagcuacauccucugccugguguucgcucagaaacuucccggcaacgacaauuccacagccacgcugugucucgggcaccaugcggucccuaacggaaccguugugaagacaauuaccaaugaucaaaucgaggugacaaacgcuaccgaacugguccaaaauucuagcacaggcgagauuugcgacuccccgcaccagauccuugauggggaaaacuguacccugaucgacgcccuccugggagauccccagugcgacggcuuucagaauaaaaagugggaucuguucguggagagaucuaaagccuauagcaacuguuacccuuaugacguucccgauuacgcuucccuccggucucugguggccagcuccgggacgcuugaauuuaauaacgagagcuucaauuggaccggagucacacagaacggcaccucuuccgcuugcauucgcagaagcaauaacuccuuuuucucucggcugaauuggcucacacaucugaacuuuaaguauccugcccuuaacgugaccaugcccaauaacgagcaguucgacaagcuguacaucuggggcguucaccauccugggacggauaaagaccagauuuuucucuaugcgcaagccagcggacgcaucacagugucuaccaagagaucccagcaggcugucauuccgaauaucggcagccggccccgcgugagaaacauuccuucccggaucucuaucuacuggacaauugugaaacccggggauauccugcugauuaauagcaccggaaaccucaucgccccucgcggcuacuucaagauuagauccgggaaaagcucuaucaugcgguccgacgcucccaucggaaaguguaauagcgaaugcauuaccccgaacggcucuaucccuaaugacaagcccuuucagaacgucaaucgcauuacauauggcgccuguccuagauacguuaaacaaaacacgcugaaacuugcgaccgggaugcggaaugugcccgagaagcagacacgcggaaucuucggcgccauugcuggguuuaucgaaaacggaugggagggcaugguggaugggugguauggauucagacaccagaauagcgagggccggggccaagccgcugaccugaaguccacccaggccgccaucgaucagauuaacgggaaacucaacagacugaucggaaagacaaaugaaaaauuccaccagauugagaaggaauuuucugaggucgaaggccgcauccaaaaccuugagaaguacguggaggacaccaaaauugaucuguggagcuauaaugcugaacuccugguugcgcuggagaaccagcauacgaucgaccucacagauuccgaaaugaauaagcuguucgagaaaaccaagaaacagcuucgggaaaacgccgaggacauggggaauggaugcuuuaagauuuaccacaagugugauaacgcuugcaucggcagcaucagaaaugggaccuaugaccaugauguguaccgcgacgaggcccugaacaaucgguuccagauuaaaggcgucgaacucaagucuggauacaaagacuggauccuguggauuuccuuugccaucagcugcuuccuucuguguguggcucuccugggcuuuauuaugugggccugccaaaaggggaacaucagauguaauaucugcauuuga

SEQ ID NO: 202755 - RNA, 1701 nt, Artificial Sequence; identical to SEQ ID NO: 199054
  derived and/or modified CDS sequence (opt5) from hemagglutinin__InfluenzaA__AHC59413

SEQ ID NO: 202756 - RNA, 1701 nt, Artificial Sequence; identical to SEQ ID NO: 199854
  derived and/or modified CDS sequence (opt5) from hemagglutinin__InfluenzaA__AHC59425

SEQ ID NO: 202757 - RNA, 1701 nt, Artificial Sequence; identical to SEQ ID NO: 201146
  derived and/or modified CDS sequence (opt5) from hemagglutinin__InfluenzaA__AHC59437

SEQ ID NO: 202758 - RNA, 1701 nt, Artificial Sequence
  derived and/or modified CDS sequence (opt5) from hemagglutinin__InfluenzaA__AHC59449
augaagaccaucauugcccugagcuacauccucugccugguguucgcucagaaacuucccggcaacgacaauuccacagccacgcugugucucgggcaccaugcggucccuaacggaaccauuguuaagacaaucaccaaugaucaaauugaggugacaaacgcuaccgaacuggugcagucuagcuccacaggcgagaucugcaauucuccgcaccagauccuugacggggaaaacuguacccugauugaugcccuccugggagacccccagugcgauggcuuucaaaauaaaaagugggaccuguucgucgagagaagcaaagcccauuccaacuguuauccuuacgaugugcccgacuaugcuucucuccggagccugguugccuccagcgggacgcuugaauuuaauaacgagucuuucaauuggaccggagugacacagaacggcaccuccagcgcuugcauccgcggcucuaauaacuccuuuuucagcagacugaauuggcucacacaccugaacuuuaaguacccugcccuuaacgucaccaugcccaauaacgagcaguucgauaagcuguauauuuggggagugcaucacccugggacggacaaagaucagaucuuucucuacgcgcaagccucuggccggauuacaguuuccaccaagcgcagccagcaggcugugaucccgaauauuggguccagaccccggguccgcaacaucccuucuagagugagcaucuauuggacaauugugaaacccggagacauccugcugauuaauuccaccggcaaccucaucgccccucggggguacuucaagauucgcagcggaaaaucuuccaucaugagaagcgaugcucccaucggcaaguguaauucugccugcauuaccccgaacggcagcaucccuaaugacaagcccuuucagaacgucaaucggauuacauacggggcguguccucgcuauguuaaacaaaacacgcugaaacuugccaccggaaugagaaaugugcccgaaaagcagacacggggcaucuucggggcuauugccggauuuaucgagaacggcugggaagggaugguggacggaugguacggcuuccgccaccaaaauuccgagggcagagggcaggcugccgaucugaagucuacccaggccgcuaucgaccagauuaacggaaaacucaaccggcugaucggcagaacaaaugagaaguuccaucagauugaaaaagaguuuagcgaagucgaggggcgcauccaagaucuugaaaaguauguggaggacaccaagauugaucugugguccuacaacgcggagcuccugguugcccuggaaaaucagcacacgaucgaccucacagauagcgagaugaacaaacuguucgaaaagaccaaaaagcagcuucgggagaaugcugaagacaugggaaacggcugcuuuaaaauuuaucauaagugugauaaugccugcaucgggucuaucagaaacggcaccuacgaccacgauguguaucgcgacgaggcccugaauaaccgguuccagauuaagggagucgagcucaaauccggcuacaaggacuggauccuguggauuagcuuugcuaucucuugcuuccuucuguguguggcccuccugggguuuauuaugugggcgugccaaaaaggaaauaucagauguaacaucugcauuuga

SEQ ID NO: 202759 - RNA, 1701 nt, Artificial Sequence; identical to SEQ ID NO: 198927
  derived and/or modified CDS sequence (opt5) from hemagglutinin__InfluenzaA__AHC59461

SEQ ID NO: 202760 - RNA, 1701 nt, Artificial Sequence; identical to SEQ ID NO: 202751
  derived and/or modified CDS sequence (opt5) from hemagglutinin__InfluenzaA__AHC59473

SEQ ID NO: 202761 - RNA, 1701 nt, Artificial Sequence; identical to SEQ ID NO: 199054
  derived and/or modified CDS sequence (opt5) from hemagglutinin__InfluenzaA__AHC59485

SEQ ID NO: 202762 - RNA, 1701 nt, Artificial Sequence; identical to SEQ ID NO: 199054
  derived and/or modified CDS sequence (opt5) from hemagglutinin__InfluenzaA__AHC59497

SEQ ID NO: 202763 - RNA, 1701 nt, Artificial Sequence; identical to SEQ ID NO: 198927
  derived and/or modified CDS sequence (opt5) from hemagglutinin__InfluenzaA__AHC59509

SEQ ID NO: 202764 - RNA, 1701 nt, Artificial Sequence; identical to SEQ ID NO: 198927
  derived and/or modified CDS sequence (opt5) from hemagglutinin__InfluenzaA__AHC59521

SEQ ID NO: 202765 - RNA, 1701 nt, Artificial Sequence
  derived and/or modified CDS sequence (opt5) from hemagglutinin__InfluenzaA__AHC59533
augaagaccaucauugcccugagcuacauccucugccugguguucgcucagaaacuucccggcaacgacaauuccacagccacgcugugucucgggcaccaugcggucccuaacggaaccauuguuaagacaaucaccaaugaucaaauugaggugacaaacgcuaccgaacuggugcagucuagcuccacaggcgagaucugcaauucuccgcaccagauccuugacggggaaaacuguacccugauugaugcccuccugggagacccccagugcgauggcuuucaaaauaaaaagugggaccuguucgucgagagaagcaaagcccauuccaacuguuauccuuacgaugugcccgacuaugcuucucuccggagccugguugccuccagcgggacgcuugaauuuaagaaugagucuuucaacuggaccggagugacacagaauggcaccuccagcgcuugcauccgcagaucuaacaauuccuuuuucagccggcugaacuggcucacacaccugaauuuuaaguacccugcccuuaacgucaccaugcccaacaaugagcaguucgauaaacuguauauuuggggcgugcaucacccugggacggacaaggaucagaucuuucucuacgcgcaagccucuggacgcauuacaguuuccaccaaaagaagccagcaggcugugaucccgaacauuggcucccggccccgcgucagaaauaucccuucucgggugagcaucuauuggacaauugugaagcccggggacauccugcugauuaacuccaccggaaaucucaucgccccucgcggcuacuucaaaauuagaagcgggaagucuuccaucaugcggagcgaugcucccaucggaaaguguaacucugccugcauuaccccgaauggcagcaucccuaacgacaaacccuuucagaaugucaaccgcauuacauacggcgcguguccuagauauguuaagcaaaauacgcugaaacuugccaccgggaugcggaacgugcccgaaaagcagacacgcggaaucuucggcgcuauugccggguuuaucgagaauggaugggaaggcaugguggacgggugguacggauucagacaccagaacuccgagggccggggccaagcugccgaucugaaaucuacccaggccgcuaucgaccagauuaaugggaagcucaacagacugaucggaaaaacaaacgagaaguuccaucagauugaaaaggaguuuagcgaagucgagggccgcauccaagaucuugaaaaauauguggaggacaccaagauugaucugugguccuacaaugcggagcuccugguugcccuggaaaaccagcacacgaucgaccucacagauagcgagaugaauaaacuguucgaaaagaccaaaaagcagcuucgggagaacgcugaagacauggggaauggaugcuuuaagauuuaucauaaaugugauaacgccugcaucggcucuaucagaaaugggaccuacgaccacgauguguaucgcgacgaggcccugaacaaucgguuccagauuaagggcgucgagcucaaauccggauacaaggacuggauccuguggauuagcuuugcuaucucuugcuuccuucuguguguggcccuccugggcuuuauuaugugggcgugccaaaaagggaacaucagauguaauaucugcauuuga

SEQ ID NO: 202766 - RNA, 1701 nt, Artificial Sequence; identical to SEQ ID NO: 199054
  derived and/or modified CDS sequence (opt5) from hemagglutinin__InfluenzaA__AHC59545

SEQ ID NO: 202767 - RNA, 1701 nt, Artificial Sequence; identical to SEQ ID NO: 202690
  derived and/or modified CDS sequence (opt5) from hemagglutinin__InfluenzaA__AHC59557

SEQ ID NO: 202768 - RNA, 1701 nt, Artificial Sequence
  derived and/or modified CDS sequence (opt5) from hemagglutinin__InfluenzaA__AHC59569
augaagaccaucauugcccugagcuacauccucugccugguguucgcucagaaacuucccggcaacgacaauuccacagccacgcugugucucgggcaccaugcggucccuaacggaaccauuguuaagacaaucaccaaugaucaaauugaggugacaaacgcuaccgaacuggugcaaaauucuagcacaggcgagaucugcgacuccccgcaccagauccuugauggggaaaacuguacccugauugacgcccuccugggagauccccagugcgacggcuuucagaauaaaaagugggaucuguucgucgagagaucuaaagccuauagcaacuguuacccuuaugacgugcccgauuacgcuucccuccggucucugguugccagcuccgggacgcuugaauuuaauaacgagagcuucaauuggaccggagugacacagaacggcaccucuuccgcuugcauccgcagaagcaauaacuccuuuuucucucggcugaauuggcucacacaucugaacuuuaaguauccugcccuuaacgucaccaugcccaauaacgagcaguucgacaagcuguacauuuggggcgugcaccauccugggacggauaaagaccagaucuuucucuaugcgcaagccagcggacgcauuacaguuucuaccaagagaucccagcaggcugugaucccgaauauuggcagccggccccgcgucagaaacaucccuucccggaucucuauuuacuggacaaucgugaaacccggggauauucugcugaucaauagcaccggaaaccucauugccccucgcggcuacuucaagaucagauccgggaaaagcucuaucaugcgguccgacgcucccauuggaaaguguaauagcgaaugcaucaccccgaacggcucuauuccuaaugacaagcccuuucagaacgugaaucgcaucacauauggcgccuguccuagauacgucaaacaaaacacgcugaaacuugcgaccgggaugcggaauguucccgagaagcagacacgcggaauuuucggcgccaucgcuggguuuaucgaaaacggaugggagggcaugauggaugggugguauggauucagacaccagaauagcgagggccggggccaagccgcugaccugaaguccacccaggccgccauugaucagaucaacgggaaacucaacagacugauuggaaagacaaaugaaaaauuccaccagaucgagaaggaauuuucugagguggaaggccgcauucaagaccuugagaaguacguggaggauaccaaaaucgaccuguggagcuauaacgcugaacuccuggucgcgcuggagaaucagcauacgauugaucucacagacuccgaaaugaacaagcuguucgagaaaaccaagaaacagcuucgggaaaaugccgaggauauggggaacggaugcuuuaagaucuaccacaagugugacaaugcuugcaucggcagcauuagaaacgggaccuaugaucaugacguguaccgcgacgaggcccugaauaaccgguuccagaucaaaggcguugaacucaagucuggauacaaagauuggauucuguggaucuccuuugccauuagcugcuuccuucuguguguggcucuccugggcuuuaucaugugggccugccaaaaggggaauaucagauguaacauuugcaucuga

SEQ ID NO: 202769 - RNA, 1701 nt, Artificial Sequence; identical to SEQ ID NO: 199054
  derived and/or modified CDS sequence (opt5) from hemagglutinin__InfluenzaA__AHC59581

SEQ ID NO: 202770 - RNA, 1701 nt, Artificial Sequence; identical to SEQ ID NO: 198927
  derived and/or modified CDS sequence (opt5) from hemagglutinin__InfluenzaA__AHC59593

SEQ ID NO: 202771 - RNA, 1701 nt, Artificial Sequence; identical to SEQ ID NO: 201146
  derived and/or modified CDS sequence (opt5) from hemagglutinin__InfluenzaA__AHC59605

SEQ ID NO: 202772 - RNA, 1701 nt, Artificial Sequence; identical to SEQ ID NO: 199054
  derived and/or modified CDS sequence (opt5) from hemagglutinin__InfluenzaA__AHC59617

SEQ ID NO: 202773 - RNA, 1701 nt, Artificial Sequence; identical to SEQ ID NO: 199054
  derived and/or modified CDS sequence (opt5) from hemagglutinin__InfluenzaA__AHC59629

SEQ ID NO: 202774 - RNA, 1701 nt, Artificial Sequence; identical to SEQ ID NO: 202690
  derived and/or modified CDS sequence (opt5) from hemagglutinin__InfluenzaA__AHC59641

SEQ ID NO: 202775 - RNA, 1701 nt, Artificial Sequence
  derived and/or modified CDS sequence (opt5) from hemagglutinin__InfluenzaA__AHC59653
augaagaccaucauugcccugagcuacauccucugccugguguucgcucagaaacuucccggcaacgacaauuccacagccacgcugugucucgggcaccaugcggucccuaacggaaccauuguuaagacaaucaccaaugaucaaauugaggugacaaacgcuaccgaacuggugcagucuagcuccacaggcgagaucugcaauucuccgcaccagauccuugacggggaaaacuguacccugauugaugcccuccugggagacccccagugcgauggcuuucaaaauaaaaagugggaccuguucgucgagagaagcaaagcccauuccaacuguuauccuuacgaugugcccgacuaugcuucucuccggagccugguugccuccagcgggacgcuugaauuuaauaacgagucuuucaauuggaccggagugacacagaacggcaccuccagcgcuugcauccgcagaucuaauaacuccuuuuucagccggcugaauuggcucacacaccugaacuuuaaguacccugcccuuaacgucaccaugcccaauaacgagcaguucgauaagcuguauauuuggggcgugcaucacccugggacggacaaagaucagaucuuucucuacgcgcaagccucuggacgcauuacaguuuccacccagagaagccagcaggcugugaucccgaauauuggcucccggccccgcgucagaaacaucccuucucgggugagcaucuauuggacaauugugaagcccggggacauccugcugauuaauuccaccggaaaccucaucgccccucgcggcuacuucaaaauuagaagcgggaagucuuccaucaugcggagcgaugcucccaucggaaaauguaauucugccugcauuaccccgaacggcagcaucccuaaugacaagcccuuucaaaacgucaaucgcauuacauacggcgcguguccuagauauguuaagcagaacacgcugaaacuugccaccgggaugcggaaugugcccgaaaagcagacacgcggaaucuucggcgcuauugccggguuuaucgagaacggaugggaaggcaugguggacgggugguacggauucagacaccaaaauuccgagggccggggccaggcugccgaucugaaaucuacccaggccgcuaucgaccagauuaacgggaagcucaacagacugaucggaaaaacaaaugagaaguuccaucaaauugaaaaagaguuuagcgaagucgagggccgcauccaggaucuugaaaaguauguggaggacaccaagauugaucugugguccuacaacgcggagcuccugguugcccuggaaaaucagcacacgaucgaccucacagauagcgagaugaacaaacuguucgaaaagaccaaaaagcagcuucgggagaaugcugaagacauggggaacggaugcuuuaaaauuuaucauaagugugauaaugccugcaucggcucuaucagaaacgggaccuacgaccacgauguguaucgcgacgaggcccugaauaaccgguuccaaauuaagggcgucgagcucaaauccggauacaaggacuggauccuguggauuagcuuugcuaucucuugcuuccuucuguguguggcccuccugggcuuuauuaugugggcgugccagaaagggaauaucagauguaacaucugcauuuga

SEQ ID NO: 202776 - RNA, 1701 nt, Artificial Sequence; identical to SEQ ID NO: 198927
  derived and/or modified CDS sequence (opt5) from hemagglutinin__InfluenzaA__AHC59665

SEQ ID NO: 202777 - RNA, 1701 nt, Artificial Sequence; identical to SEQ ID NO: 199054
  derived and/or modified CDS sequence (opt5) from hemagglutinin__InfluenzaA__AHC59677

SEQ ID NO: 202778 - RNA, 1701 nt, Artificial Sequence; identical to SEQ ID NO: 202775
  derived and/or modified CDS sequence (opt5) from hemagglutinin__InfluenzaA__AHC59689

SEQ ID NO: 202779 - RNA, 1701 nt, Artificial Sequence; identical to SEQ ID NO: 202690
  derived and/or modified CDS sequence (opt5) from hemagglutinin__InfluenzaA__AHC59701

SEQ ID NO: 202780 - RNA, 1701 nt, Artificial Sequence; identical to SEQ ID NO: 198927
  derived and/or modified CDS sequence (opt5) from hemagglutinin__InfluenzaA__AHC59713

SEQ ID NO: 202781 - RNA, 1701 nt, Artificial Sequence; identical to SEQ ID NO: 202701
  derived and/or modified CDS sequence (opt5) from hemagglutinin__InfluenzaA__AHC59737

SEQ ID NO: 202782 - RNA, 1701 nt, Artificial Sequence; identical to SEQ ID NO: 198927
  derived and/or modified CDS sequence (opt5) from hemagglutinin__InfluenzaA__AHC59749

SEQ ID NO: 202783 - RNA, 1701 nt, Artificial Sequence; identical to SEQ ID NO: 199054
  derived and/or modified CDS sequence (opt5) from hemagglutinin__InfluenzaA__AHC59761

SEQ ID NO: 202784 - RNA, 1701 nt, Artificial Sequence; identical to SEQ ID NO: 199054
  derived and/or modified CDS sequence (opt5) from hemagglutinin__InfluenzaA__AHC59773

SEQ ID NO: 202785 - RNA, 1701 nt, Artificial Sequence; identical to SEQ ID NO: 199854
  derived and/or modified CDS sequence (opt5) from hemagglutinin__InfluenzaA__AHC59785

SEQ ID NO: 202786 - RNA, 1701 nt, Artificial Sequence; identical to SEQ ID NO: 199054
  derived and/or modified CDS sequence (opt5) from hemagglutinin__InfluenzaA__AHC59797

SEQ ID NO: 202787 - RNA, 1701 nt, Artificial Sequence; identical to SEQ ID NO: 201146
  derived and/or modified CDS sequence (opt5) from hemagglutinin__InfluenzaA__AHC59809

SEQ ID NO: 202788 - RNA, 1701 nt, Artificial Sequence
  derived and/or modified CDS sequence (opt5) from hemagglutinin__InfluenzaA__AHC59821
augaagaccaucauugcccugagcuacauccucugccugguguucgcucagaaacuucccggcaacgacaauuccacagccacgcugugucucgggcaccaugcggucccuaacggaaccauuguuaagacaaucaccaaugaucaaauugaggugacaaacgcuaccgaacuggugcaaaauucuagcacaggcgagaucugcgacuccccgcaccagauccuugauggggaaaacuguacccugauugacgcccuccugggagauccccagugcgacggccugcagaauaaaaagugggaucucuuugucgagagaucuaaagccuauagcaacuguuacccuuaugacgugcccgauuacgcuucccugcggucucuuguugccagcuccgggacgcuggaauuuaauaacgagagcuucaauuggaccggagugacacagaacggcaccucuuccgcuugcauccgcagaagcaauaacucuuucuuuucccggcucaauuggcugacacaucuuaacuucaaguauccugcccugaacgucaccaugcccaauaacgagcaguuugacaagcucuacauuuggggcgugcaccauccugggacggauaaagaccagaucuuccuguaugcgcaagccagcggacgcauuacaguuucuaccaagagaucccagcaggcugugaucccgaauauuggcagccggccccgcgucagaaacaucccuucccggaucucuauuuacuggacaaucgugaaacccggggauauucugcucaucaauagcaccggaaaccugauugccccucgcggcuacuuuaagaucagauccgggaaaagcucuaucaugcgguccgacgcucccauuggaaaguguaauagcgaaugcaucaccccgaacggcucuauuccuaaugacaagcccuuccagaacgugaaucgcaucacauauggcgccuguccuagauacgucaaacaaaacacgcuuaagcuggcgaccgggaugcggaauguucccgagaaacagacacgcggaauuuuuggcgccaucgcuggguucaucgaaaacggaugggagggcaugguggaugggugguauggauuuagacaccagaauagcgagggccggggccaagccgcugaccucaaguccacccaggccgccauugaucagaucaacgggaaacugaacagacuuauuggaaagacaaaugaaaaauuccaccagaucgagaaggaguucucugaaguggaaggccgcauucaagaccuggagaaguacgucgaggauaccaaaaucgaccucuggagcuauaacgcugaacugcugguggcgcucgagaaucagcauacgauugaucugacagacuccgaaaugaacaaacuuguugagaagaccaagaaacagcugcgggaaaaugccgaggauauggggaacggaugcuuuaagaucuaccacaagugugacaaugcuugcaucggcagcauuagaaacgggaccuaugaucaugacguguaccgcgacgaggcccucaauaaccgguuccagaucaaaggcgucgaacugaagucuggauacaaagauuggauucuuuggaucuccuuugccauuagcugcuuccugcucuguguggcucugcugggcuuuaucaugugggccugccaaaaggggaauaucagauguaacauuugcaucuga

SEQ ID NO: 202789 - RNA, 1701 nt, Artificial Sequence; identical to SEQ ID NO: 202690
  derived and/or modified CDS sequence (opt5) from hemagglutinin__InfluenzaA__AHC59833

SEQ ID NO: 202790 - RNA, 1701 nt, Artificial Sequence; identical to SEQ ID NO: 202689
  derived and/or modified CDS sequence (opt5) from hemagglutinin__InfluenzaA__AHC59845

SEQ ID NO: 202791 - RNA, 1701 nt, Artificial Sequence; identical to SEQ ID NO: 199854
  derived and/or modified CDS sequence (opt5) from hemagglutinin__InfluenzaA__AHC59857

SEQ ID NO: 202792 - RNA, 1701 nt, Artificial Sequence; identical to SEQ ID NO: 199054
  derived and/or modified CDS sequence (opt5) from hemagglutinin__InfluenzaA__AHC59869

SEQ ID NO: 202793 - RNA, 1701 nt, Artificial Sequence; identical to SEQ ID NO: 199054
  derived and/or modified CDS sequence (opt5) from hemagglutinin__InfluenzaA__AHC59881

SEQ ID NO: 202794 - RNA, 1701 nt, Artificial Sequence; identical to SEQ ID NO: 198927
  derived and/or modified CDS sequence (opt5) from hemagglutinin__InfluenzaA__AHC59892

SEQ ID NO: 202795 - RNA, 1701 nt, Artificial Sequence
  derived and/or modified CDS sequence (opt5) from hemagglutinin__InfluenzaA__AHC59904
augaagaccaucauugcccugagcuacauccucugccugguguucgcucagaaacuucccggcaacgacaauuccacagccacgcugugucucgggcaccaugcggucccuaacggaaccauuguuaagacaaucaccaaugaucaaauugaggugacaaacgcuaccgaacuggugcagucuagcuccacaggcgagaucugcaauucuccgcaccagauccuugacggggaaaacuguacccugauugaugcccuccugggagacccccagugcgauggcuuucaaaauaaaaagugggaccuguucgucgagagaagcaaagcccauuccaacuguuauccuuacgaugugcccgacuaugcuucucuccggagccugguugccuccagcgggacgcuugaauuuaauaacgagucuuucaauuggaccggagugacacagaacggcaccuccagcgcuugcauccgcggcucuaauaacuccuuuuucagcagacugaauuggcucacacaccugaacuuuaaguacccugcccuuaacgucaccaugcccaauaacgagcaguucgauaagcuguauauuuggggagugcaucacccugggacggacaaagaucagaucuuucucuacgcgcaagccucuggccggauuacaguuuccaccaagcgcagccagcaggcugugaucccgaauauuggguccagaccccggguccgcaacaucccuucuagagugagcaucuauuggacaauugugaaacccggagacauccugcugauuaauuccaccggcaaccucaucgccccucggggguacuucaagauucgcagcggaaaaucuuccaucaugagaagcgaugcucccaucggcaaguguaauucugccugcauuaccccgaacggcagcaucccuaaugacaagcccuuucagaacgucaaucggauuacauacggggcguguccucgcuauguuaaacaaaacacgcugaaacuugccaccggaaugagaaaugugcccgaaaaacagacacggggcaucuucggggcuauugccggauuuaucgagaacggcugggaagggaugauggacggaugguacggcuuccgccaccaaaauuccgagggcagagggcaggcugccgaucugaagucuacccaggccgcuaucgaccagauuaacggaaaacucaaccggcugaucggcaagacaaaugagaaauuccaucagauugaaaaggaguuuagcgaaguggaggggagaauccaagaucuugaaaaguaugucgaggacaccaaaauugaucugugguccuacaacgcggagcuccugguggcccuggaaaaucagcacacgaucgaccucacagauagcgagaugaacaagcuguucgaaaagaccaagaaacagcuucgcgagaaugcugaagacaugggaaacggcugcuuuaagauuuaucauaagugugauaaugccugcaucgggucuauccggaacggcaccuacgaccacgauguuuauagagacgaggcccugaauaaccgcuuccagauuaaaggaguggagcucaaguccggcuacaaagacuggauccuguggauuagcuuugcuaucucuugcuuccuucugugugucgcccuccugggguuuauuaugugggcgugccaaaagggaaauauccgguguaacaucugcauuuga

SEQ ID NO: 202796 - RNA, 1701 nt, Artificial Sequence
  derived and/or modified CDS sequence (opt5) from hemagglutinin__InfluenzaA__AHC59915
augaagaccgugaucgcccugagcuacauucucugccuggcuuucgcccagaaacuucccggcaacgacaauuccacagcgacgcugugucucgggcaccaugcugucccuaacggaaccaucguuaagacaauuaccaaugaucaaaucgaggugacaaacgccaccgaacuggugcagucuagcuccacaggcgagauuugcgacucuccgcaccagauccuugauggggaaaauuguacccugaucgacgcccuccugggagauccccagugcgacggcuuucaaaacaaaaagugggaucuguucgucgagagaagcaaggcuuauuccaauuguuacccuuaugacgugcccgauuacgccucucuccggagccugguugcuuccagcgggacgcuugaauuuaacaaugagucuuucaacuggaccggagugacacagaauggcaccuccagcgccugcauucgcagaucuaacaauuccuuuuucagccggcugaacuggcucacacaucugaauuuuaaguauccugcgcuuaacgucaccaugcccaacaaugagcaguucgacaagcuguacaucuggggcgugcaccauccugggacggauaaagaccagauuuuucucuaugcccaggcuucuggacgcaucacaguuuccaccaagagaagccaacaggccgugauuccgaacaucggcucccggccccgcgucagaaauauuccuucucggaucagcaucuacuggacaauugugaaacccggggauauccugcugauuaacuccaccggaaaucucaucgcuccucgcggcuacuucaagauuagaagcgggaaaucuuccaucaugcggagcgacgcccccaucggaaaguguaacucugaaugcauuaccccgaauggcagcaucccuaacgacaagcccuuucagaaugugaaccgcauuacauauggcgcguguccuagauacgucaaacaaaauacgcugaaacuugccaccgggaugcggaacguucccgagaaacagacacgcggaaucuucggcgcuauugccggguuuaucgaaaauggaugggagggcaugguggaugggugguauggauucagacaccagaacuccgagggccggggccaagcugccgaccugaagucuacccaggccgcuaucgaucagauuaaugggaaacucaacagacugaucggaaagacaaacgaaaaauuccaccagauugagaaggaauuuagcgagguggaaggccgcauccaagaccuugagaaguacgucgaggauaccaaaauugaccugugguccuauaaugcggaacuccugguggcccuggagaaccagcauacgaucgaucucacagacagcgaaaugaauaagcuguucgagaaaaccaagaaacagcuucgggaaaacgcugaggauauggggaauggaugcuuuaagauuuaccacaagugugacaacgccugcaucggcucuaucagaaaugggaccuaugaucaugacguuuaccgcgacgaggcccugaacaaucgguuccagauuaaaggcguggaacucaaguccggauacaaagauuggauccuguggauuagcuuugcuaucucuugcuuccuucugugugucgcccuccugggcuuuauuaugugggcgugccaaaaggggaacaucagauguaauaucugcauuuga

SEQ ID NO: 202797 - RNA, 1701 nt, Artificial Sequence; identical to SEQ ID NO: 199054
  derived and/or modified CDS sequence (opt5) from hemagglutinin__InfluenzaA__AHC59939

SEQ ID NO: 202798 - RNA, 1701 nt, Artificial Sequence
  derived and/or modified CDS sequence (opt5) from hemagglutinin__InfluenzaA__AHC59963
augaagaccaucauugcccugagcuacauccucugccugguguucgcucagaaacuucccggcaacgacaauuccacagccacgcugugucucgggcaccaugcggucccuaacggaaccauuguuaagacaaucaccaaugaucaaauugaggugacaaacgcuaccgaacuggugcagucuagcuccacaggcgagaucugcgacucuccgcaccagauccuugauggggaaaauuguacccugauugacgcccuccugggagauccccagugcgacggcuuucaaaacaaaaagugggaucuguucgucgagagaagcaaagccuauuccaauuguuacccuuaugacgugcccgauuacgcuucucuccggagccugguugccuccagcgggacgcuugaauuuaacaaugagucuuucaacuggaccggagugacacagaauggcaccuccagcgcuugcauccgcagaucuaacuccagcuuuuucucucggcugaauuggcucacacaucugaacuuuaaguauccugcccuuaaugucaccaugcccaacaacgagcaguucgacaagcuguacauuuggggcgugcaccauccugggacggauaaagaccagaucuuucucuaugcgcaauccagcggacgcauuacaguuuccaccaagagaucucagcaggccgugaucccgaauauuggcagccggccccgcaucagaaacaucccuucccggauuagcaucuacuggacaauugucaaacccggggauauccugcugauuaauucuaccggaaaccucaucgcuccucgcggcuacuucaagaucagauccgggaaaagcucuauuaugcggagcgacgcccccaucggaaaguguaauuccgaaugcauuaccccgaacggcucuaucccuaaugacaagcccuuucagaacgugaaucgcauuacauauggcgcuuguccuagauacaucaaacaaagcacgcugaagcuggccaccgggaugcggaacgugcccgagaaacagacacgcggaaucuucggcgcgauugccggguuuaucgaaaauggaugggagggcauggucgaugggugguauggauucagacaccagaacuccgagggccggggccaagcugccgaccuuaagagcacccaggcugccauugaucagaucaaugggaaacucaacagacugauuggaaagacaaaugaaaaauuccaccagaucgagaaggaauuuucugagguugaaggccgcauucaagaccuugagaaguacguggaggauaccaaaaucgaccugugguccuauaacgccgaacuccugguggcucuggagaaccagcauacgaucgaucucacagacagcgaaaugaauaagcuguucgagaaaaccaagaaacagcuucgggaaaacgcggaggauauggggaauggaugcuuuaagauuuaccacaagugugacaacgccugcaucggcucuauuagaaaugggaccuauaaccaugaugucuaccgcgacgaggcucugaauaaccgguuccagaucaaaggcguggaacucaaguccggauacaaagacuggauucuguggaucagcuuugccaucuccugcuuccuucuguguguugcccuccugggcuuuauuaugugggcuugccaaaaggggaauaucagauguaacauuugcaucuga

SEQ ID NO: 202799 - RNA, 1701 nt, Artificial Sequence; identical to SEQ ID NO: 198927
  derived and/or modified CDS sequence (opt5) from hemagglutinin__InfluenzaA__AHC59987

SEQ ID NO: 202800 - RNA, 1701 nt, Artificial Sequence; identical to SEQ ID NO: 198927
  derived and/or modified CDS sequence (opt5) from hemagglutinin__InfluenzaA__AHC59999

SEQ ID NO: 202801 - RNA, 1701 nt, Artificial Sequence; identical to SEQ ID NO: 199054
  derived and/or modified CDS sequence (opt5) from hemagglutinin__InfluenzaA__AHC60011

SEQ ID NO: 202802 - RNA, 1701 nt, Artificial Sequence; identical to SEQ ID NO: 198927
  derived and/or modified CDS sequence (opt5) from hemagglutinin__InfluenzaA__AHC60023

SEQ ID NO: 202803 - RNA, 1701 nt, Artificial Sequence; identical to SEQ ID NO: 199854
  derived and/or modified CDS sequence (opt5) from hemagglutinin__InfluenzaA__AHC60035

SEQ ID NO: 202804 - RNA, 1701 nt, Artificial Sequence; identical to SEQ ID NO: 199854
  derived and/or modified CDS sequence (opt5) from hemagglutinin__InfluenzaA__AHC60047

SEQ ID NO: 202805 - RNA, 1701 nt, Artificial Sequence
  derived and/or modified CDS sequence (opt5) from hemagglutinin__InfluenzaA__AHC60059
augaagaccaucauugcccugagcuacauccucugccugguguucgcucagaaacuucccggcaacgacaauuccacagccacgcugugucucgggcaccaugcggucccuaacggaaccauuguuaagacaaucaccaaugaucaaauugaggugacaaacgcuaccgaacuggugcaaaauucuagcacaggcgagaucugcgacuccccgcaccagauccuugauggggaaaacuguacccugauugacgcccuccugggagauccccagugcgacggcuuucagaauaaaaagugggaucuguucgucgagagaucuaaagccuauagcaacuguuacccuuaugacgugcccgauuacgcuucccuccggucucugguugccagcuccgggacgcuugaauuuaauaacgagagcuucaauuggaccggagugacacagaacggcaccucuuccgcuugcauccgcagaagcaauaacuccuuuuucucucggcugaauuggcucacacaucugaacuuuaaguauccugcccuuaacgucaccaugcccaauaacgagcaguucgacaagcuguacauuuggggcgugcaccauccugggacggauaaagaccagaucuuucucuaugcgcaagccagcggacgcauuacaguuucuaccaagagaucccagcaggcugugaucccgaauauuggcagccggccccgcgucagaaacaucccuucccggaucucuauuuacuggacaaucgugaaacccggggauauucugcugaucaauagcaccggaaaccucauugccccucgcggcuacuucaagaucagauccgggaaaagcucuaucaugcgguccgacgcucccauuggaaaguguaauagcgccugcaucaccccgaacggcucuauuccuaaugacaagcccuuucagaacgugaaucgcaucacauauggcgcguguccuagauacgucaaacaaaacacgcugaaacuugccaccgggaugcggaauguucccgaaaaacagacacgcggaauuuucggcgcuaucgccggguuuaucgagaacggaugggaaggcaugguggaugggugguauggauucagacaccagaauagcgagggccggggccaagcugccgaccugaaguccacccaggccgcuauugaucagaucaacgggaaacucaacagacugauuggaaagacaaaugagaaauuccaccagaucgaaaaggaguuuucugaaguggagggccgcauucaagaccuugaaaaguacgucgaggauaccaaaaucgaccuguggagcuauaacgcggagcuccugguggcccuggaaaaucagcauacgauugaucucacagacuccgagaugaacaagcuguucgaaaagaccaagaaacagcuucgggagaaugcugaagauauggggaacggaugcuuuaagaucuaccacaagugugacaaugccugcaucggcagcauuagaaacgggaccuauaaucaugauguuuaccgcgacgaggcccugaacaaucgguuccagaucaaaggcguggagcucaagucuggauacaaagacuggauucuguggaucuccuuugcuauuagcugcuuccuucugugugucgcccuccugggcuuuaucaugugggcgugccaaaaggggaacaucagauguaauauuugcaucuga

SEQ ID NO: 202806 - RNA, 1701 nt, Artificial Sequence; identical to SEQ ID NO: 201146
  derived and/or modified CDS sequence (opt5) from hemagglutinin__InfluenzaA__AHC60071

SEQ ID NO: 202807 - RNA, 1701 nt, Artificial Sequence; identical to SEQ ID NO: 202690
  derived and/or modified CDS sequence (opt5) from hemagglutinin__InfluenzaA__AHC60083

SEQ ID NO: 202808 - RNA, 1701 nt, Artificial Sequence; identical to SEQ ID NO: 199854
  derived and/or modified CDS sequence (opt5) from hemagglutinin__InfluenzaA__AHC60095

SEQ ID NO: 202809 - RNA, 1701 nt, Artificial Sequence
  derived and/or modified CDS sequence (opt5) from hemagglutinin__InfluenzaA__AHC60107
augaagaccaucauugcccugagcuacauccucugccugguguucgcucagaaacuucccggcaacgacaauuccacagccacgcugugucucgggcaccaugcggucccuaacggaaccauuguuaagacaaucaccaaugaucaaauugaggugacaaacgcuaccgaacuggugcaaaauucuagcacaggcgagaucugcgacuccccgcaccagaucauugauggggaaaacuguacccuuaucgacgcccugcucggagauccccagugcgacggcuuucagaauaaaaagugggaucuguucgucgagagaucuaaagccuauagcaacuguuacccuuaugacgugcccgauuacgcuucccugcggucucucguugccagcuccgggacgcuggaauuuaauaacgagagcuucaauuggaccggagugacacagaacggcaccucuuccgcuugcauucgcagaagcaauaacucuuucuucucccggcuuaauuggcugacacaucucaacuuuaaguauccugcccugaacgucaccaugcccaauaacgagcaguucgacaaacuuuacaucuggggcgugcaccauccugggacggauaaggaccagauuuuucuguaugcgcaagccagcggacgcaucacaguuucuaccaagagaucccagcaggcugugauuccgaauaucggcagccggccccgcgucagaaacaucccuucccggauuucuaucuacuggacaauugugaaacccggggauauccuccugauuaauagcaccggaaaccugaucgccccucgcggcuacuucaagaucagauccgggaaaagcucuauuaugcgguccgacgcucccaucggaaaguguaauagcgaaugcauuaccccgaacggcucuaucccuaaugacaagcccuuucagaacgugaaucgcauuacauauggcgccuguccuagauacgucaaacaaaacacgcucaagcuggcgaccgggaugcggaauguucccgagaaacagacacgcggaaucuucggcgccaucgcuggguuuauugaaaacggaugggagggcaugguggaugggugguauggauucagacaccagaauagcgagggccggggccaagccgcugaccuuaaguccacccaggccgccaucgaucagauuaacgggaaacugaacagacucaucggaaagacaaaugaaaaauuccaccagauugagaaggaauuuucugagguggaaggccgcauccaagaccuggagaaguacgucgaggauaccaaaauugaccuuuggagcuauaacgcugaacugcucguggcgcuggagaaucagcauacgaucgaucugacagacuccgaaaugaacaagcucuuugagaaaaccaagaaacagcugcgggaaaaugccgaggauauggggaacggaugcuuuaagaucuaccacaagugugacaaugcuugcauuggcagcaucagaaacgggaccuaugaucaugacguuuaccgcgacgaggcccuuaauaaccgguucaaaauuaagggcguggaacugaaaucuggauacaaggauuggauccucuggauuuccuuugccaucagcugcuuccugcuuugugucgcucugcucggcuuuaucaugugggccugccagaaagggaauauuagauguaacaucugcauuuga

SEQ ID NO: 202810 - RNA, 1701 nt, Artificial Sequence; identical to SEQ ID NO: 199054
  derived and/or modified CDS sequence (opt5) from hemagglutinin__InfluenzaA__AHC60119

SEQ ID NO: 202811 - RNA, 1701 nt, Artificial Sequence; identical to SEQ ID NO: 199054
  derived and/or modified CDS sequence (opt5) from hemagglutinin__InfluenzaA__AHC60131

SEQ ID NO: 202812 - RNA, 1701 nt, Artificial Sequence; identical to SEQ ID NO: 202720
  derived and/or modified CDS sequence (opt5) from hemagglutinin__InfluenzaA__AHC60143

SEQ ID NO: 202813 - RNA, 1701 nt, Artificial Sequence
  derived and/or modified CDS sequence (opt5) from hemagglutinin__InfluenzaA__AHC60155
augaagaccgugaucgcccugagcuacauucucugccuggcuuucgcccagaaacuucccggcaacgacaauuccacagcgacgcugugucucgggcaccaugcugucccuaacggaaccaucguuaagacaauuaccaaugaucaaaucgaggugacaaacgccaccgaacuggugcagucuagcccgacaggcgagauuugcgacucuccccaccagauccuugauggggaaaauuguacccugaucgacgcccuccugggagauccucagugcgacggcuuucaaaacaaaaagugggaucuguucgucgagagaucuaaggcuuauagcaauuguuaccccuaugacgugccugauuacgccucccuccggucucugguugcuagcuccgggacgcuugaauuuaacaaugagagcuucaacuggaccggagugacacagaauggcaccucuuccgccugcauucgcagaagcaacaauuccuuuuucucccggcugaacuggcucacacaucugaauuuuaaguaucccgcgcuuaacgucaccaugccuaacaaugagcaguucgacaagcuguacaucuggggcgugcaccauccggggacggauaaagaccagauuuuucucuaugcccaagcuagcggacgcaucacaguuucuaccaagagaucccagcaggccgugauucccaacaucggcagccggccucgcgucagaaauauucccucccggaucucuaucuacuggacaauugugaaaccuggggauauccugcugauuaacagcaccggaaaucucaucgcuccccgcggcuacuucaagauuagauccgggaaaagcucuaucaugcgguccgacgccccgaucggaaaguguaacagcgaaugcauuaccccuaauggcucuauccccaacgacaagccuuuucagaaugugaaccgcauuacauauggcgcgugucccagauacgucaaacaaaauacgcugaaacuugccaccgggaugcggaacguucccgagaaacagacacgcggaaucuucggcgcuauugccggguuuaucgaaaauggaugggagggcaugguggaugggugguauggauucagacaccagaacagcgagggccggggccaagcugccgaccugaaguccacccaggccgcuaucgaucagauuaaugggaaacucaacagacugaucggaaagacaaacgaaaaauuccaccagauugagaaggaauuuucugagguggaaggccgcauccaagaccuugagaaguacgucgaggauaccaaaauugaccuguggagcuauaaugcggaacuccugguggcccuggagaaccagcauacgaucgaucucacagacuccgaaaugaauaagcuguucgagaaaaccaagaaacagcuucgggaaaacgcugaggauauggggaauggaugcuuuaagauuuaccacaagugugacaacgccugcaucggcagcaucagaaaugggaccuaugaucaugacguuuaccgcgacgaggcccugaacaaucgguuccagauuaaaggcguggaacucaagucuggauacaaagauuggauccuguggauuuccuuugcuaucagcugcuuccuucugugugucgcccuccugggcuuuauuaugugggcgugccaaaaggggaacaucagauguaauaucugcauuuga

SEQ ID NO: 202814 - RNA, 1701 nt, Artificial Sequence; identical to SEQ ID NO: 198927
  derived and/or modified CDS sequence (opt5) from hemagglutinin__InfluenzaA__AHC60167

SEQ ID NO: 202815 - RNA, 1701 nt, Artificial Sequence; identical to SEQ ID NO: 199854
  derived and/or modified CDS sequence (opt5) from hemagglutinin__InfluenzaA__AHC60179

SEQ ID NO: 202816 - RNA, 1701 nt, Artificial Sequence; identical to SEQ ID NO: 202765
  derived and/or modified CDS sequence (opt5) from hemagglutinin__InfluenzaA__AHC60191

SEQ ID NO: 202817 - RNA, 1701 nt, Artificial Sequence; identical to SEQ ID NO: 202765
  derived and/or modified CDS sequence (opt5) from hemagglutinin__InfluenzaA__AHC60203

SEQ ID NO: 202818 - RNA, 1701 nt, Artificial Sequence; identical to SEQ ID NO: 201146
  derived and/or modified CDS sequence (opt5) from hemagglutinin__InfluenzaA__AHC60215

SEQ ID NO: 202819 - RNA, 1701 nt, Artificial Sequence; identical to SEQ ID NO: 199854
  derived and/or modified CDS sequence (opt5) from hemagglutinin__InfluenzaA__AHC60239

SEQ ID NO: 202820 - RNA, 1701 nt, Artificial Sequence; identical to SEQ ID NO: 199854
  derived and/or modified CDS sequence (opt5) from hemagglutinin__InfluenzaA__AHC60251

SEQ ID NO: 202821 - RNA, 1701 nt, Artificial Sequence
  derived and/or modified CDS sequence (opt5) from hemagglutinin__InfluenzaA__AHC60263
augaagaccaucauugcccugagcuacauccucugccugguguucgcucagaaacuucccggcaacgaaaauuccacagccacgcugugucucgggcaccaugcggucccuaacggaaccauuguuaagacaaucaccaaugaccaaauugaagugacaaacgcuaccgagcuggugcaaaauucuagcacaggcgaaaucugcgauuccccgcaccagauccuugacggggagaacuguacccugauugaugcccuccugggagacccccagugcgauggcuuucagaauaaaaagugggaccuguucgucgaaagaucuaaagccuauagcaacuguuacccuuaugaugugcccgacuacgcuucccuccggucucugguugccagcuccgggacgcuugaguuuaauaacgagagcuucaauuggaccggagugacacagaacggcaccucuuccgcuugcauccgcagaagcaauaacuccuuuuucucucggcugaauuggcucacacaucugaacuuuaaguauccugcccuuaacgucaccaugcccaauaacgaacaguucgauaagcuguacauuuggggcgugcaccauccugggacggacaaagaucagaucuuucucuaugcgcaagccagcggacgcauuacaguuucuaccaagagaucccagcaggcugugaucccgaauauuggcagccggccccgcgucagaaacaucccuucccggaucucuauuuacuggacaaucgugaaacccggggacauucugcugaucaauagcaccggaaaccucauugccccucgcggcuacuucaagaucagauccgggaaaagcucuaucaugcgguccgaugcucccauuggaaaguguaauagcgagugcaucaccccgaacggcucuauuccuaaugacaagcccuuucagaacgugaaucgcaucacauauggcgccuguccuagauacgucaaacaaaacacgcugaaacuugcgaccgggaugcggaauguucccgaaaagcagacacgcggaauuuucggcgccaucgcuggguuuaucgagaacggaugggagggcaugguggacgggugguauggauucagacaccagaauagcgaaggccggggccaagccgcugaucugaaguccacccaggccgccauugaccagaucaacgggaaacucaacagacugauuggaaagacaaaugagaaauuccaccagaucgaaaaggaguuuucugaaguggagggccgcauucaagaucuugagaaguacgucgaagacaccaaaaucgaucuguggagcuauaacgcugagcuccugguggcgcuggaaaaucagcauacgauugaccucacagauuccgagaugaacaagcuguucgagaaaaccaagaaacagcuucgggagaaugccgaggacauggggaacggaugcuuuaagaucuaccacaagugugauaaugcuugcaucggcagcauuagaaacgggaccuaugaccaugauguuuaccgcgacgaagcccugaauaaccgguuccagaucaaaggcguggagcucaagucuggauacaaagacuggauucuguggaucuccuuugccauuagcugcuuccuucugugugucgcucuccugggcuuuaucaugugggccugccaaaaggggaauaucagauguaacauuugcaucuga

SEQ ID NO: 202822 - RNA, 1701 nt, Artificial Sequence; identical to SEQ ID NO: 198927
  derived and/or modified CDS sequence (opt5) from hemagglutinin__InfluenzaA__AHC60275

SEQ ID NO: 202823 - RNA, 1701 nt, Artificial Sequence; identical to SEQ ID NO: 202809
  derived and/or modified CDS sequence (opt5) from hemagglutinin__InfluenzaA__AHC60287

SEQ ID NO: 202824 - RNA, 1701 nt, Artificial Sequence; identical to SEQ ID NO: 202690
  derived and/or modified CDS sequence (opt5) from hemagglutinin__InfluenzaA__AHC60299

SEQ ID NO: 202825 - RNA, 1701 nt, Artificial Sequence
  derived and/or modified CDS sequence (opt5) from hemagglutinin__InfluenzaA__AHC60311
augaagaccaucauugcccugagcuacauccucugccugguguucgcucagaaacuucccggcaacgacaauuccacagccacgcugugucucgggcaccaugcggucccuaacggaaccauuguuaagacaaucaccaaugaucaaauugaggugacaaacgcuaccgaacuggugcaaaauucuagcacaggcgagaucugcgacuccccgcaccagauccuugauggggaaaacuguacccugauugacgcccuccugggagauccccagugcgacggcuuucagaauaaaaagugggaucuguucgucgagagaucuaaagccuauagcaacuguuacccuuaugacgugcccgauuacgcuucccuccggucucugguugccagcuccgggacgcuugaauuugacaaugagagcuucaacuggaccggagugacacagaauggcaccucuuccgcuugcauccgcagaagcaacaauuccuuuuucucucggcugaacuggcucacacaucugaauuuuaaguauccugcccuuaacgucaccaugcccaacaaugagcaguucgauaagcuguacauuuggggcgugcaccauccugggacggacaaagaucagaucuuucucuaugcgcaagccagcggacgcauuacaguuucuaccaagagaucccagcaggcugugaucccgaacauuggcagccggccccgcgucagaaauaucccuucccggaucucuauuuacuggacaaucgugaaacccggggacauucugcugaucaacagcaccggaaaucucauugccccucgcggcuacuucaagaucagauccgggaaaagcucuaucaugcgguccgacgcucccauuggaaaguguaacagcgaaugcaucaccccgaauggcucuauuccuaacgauaagcccuuucagaaugugaaccgcaucacauauggcgccuguccuagauacgucaaacaaaauacgcugaaacuugcgaccgggaugcggaacguucccgagaagcagacacgcggaauuuucggcgccaucgcuggguuuaucgaaaauggaugggagggcaugguggacgggugguauggauucagacaccagaacagcgagggccggggccaagccgcugaucugaaguccacccaggccgccauugaccagaucaaugggaaacucaacagacugauuggaaagacaaacgaaaaauuccaccagaucgagaaggaauuuucugagguggaaggccgcauucaagaucuugagaaguacgucgaggacaccaaaaucgaucuguggagcuauaaugcugaacuccugguggcgcuggagaaccagcauacgauugaccucacagauuccgaaaugaauaagcuguucgagaaaaccaagaaacagcuucgggaaaacgccgaggacauggggaauggaugcuuuaagaucuaccacaagugugauaacgcuugcaucggcagcauuagaaaugggaccuaugaccaugacguuuaccgcgaugaggcccugaacaaucgguuccagaucaaaggcguggaacucaagucuggauacaaagacuggauucuguggaucuccuuugccauuagcugcuuccuucugugugucgcucuccugggcuuuaucaugugggccugccaaaaggggaacaucagauguaauauuugcaucuga

SEQ ID NO: 202826 - RNA, 1701 nt, Artificial Sequence; identical to SEQ ID NO: 199854
  derived and/or modified CDS sequence (opt5) from hemagglutinin__InfluenzaA__AHC60323

SEQ ID NO: 202827 - RNA, 1701 nt, Artificial Sequence; identical to SEQ ID NO: 201146
  derived and/or modified CDS sequence (opt5) from hemagglutinin__InfluenzaA__AHC60335

SEQ ID NO: 202828 - RNA, 1701 nt, Artificial Sequence; identical to SEQ ID NO: 198927
  derived and/or modified CDS sequence (opt5) from hemagglutinin__InfluenzaA__AHC60347

SEQ ID NO: 202829 - RNA, 1701 nt, Artificial Sequence; identical to SEQ ID NO: 199054
  derived and/or modified CDS sequence (opt5) from hemagglutinin__InfluenzaA__AHC60359

SEQ ID NO: 202830 - RNA, 1701 nt, Artificial Sequence; identical to SEQ ID NO: 202751
  derived and/or modified CDS sequence (opt5) from hemagglutinin__InfluenzaA__AHC60371

SEQ ID NO: 202831 - RNA, 1701 nt, Artificial Sequence; identical to SEQ ID NO: 198927
  derived and/or modified CDS sequence (opt5) from hemagglutinin__InfluenzaA__AHC60383

SEQ ID NO: 202832 - RNA, 1701 nt, Artificial Sequence; identical to SEQ ID NO: 199054
  derived and/or modified CDS sequence (opt5) from hemagglutinin__InfluenzaA__AHC60395

SEQ ID NO: 202833 - RNA, 1701 nt, Artificial Sequence; identical to SEQ ID NO: 202765
  derived and/or modified CDS sequence (opt5) from hemagglutinin__InfluenzaA__AHC60407

SEQ ID NO: 202834 - RNA, 1701 nt, Artificial Sequence; identical to SEQ ID NO: 198927
  derived and/or modified CDS sequence (opt5) from hemagglutinin__InfluenzaA__AHC60419

SEQ ID NO: 202835 - RNA, 1701 nt, Artificial Sequence; identical to SEQ ID NO: 199054
  derived and/or modified CDS sequence (opt5) from hemagglutinin__InfluenzaA__AHC60431

SEQ ID NO: 202836 - RNA, 1701 nt, Artificial Sequence; identical to SEQ ID NO: 198927
  derived and/or modified CDS sequence (opt5) from hemagglutinin__InfluenzaA__AHC60455

SEQ ID NO: 202837 - RNA, 1701 nt, Artificial Sequence; identical to SEQ ID NO: 198927
  derived and/or modified CDS sequence (opt5) from hemagglutinin__InfluenzaA__AHC60467

SEQ ID NO: 202838 - RNA, 1701 nt, Artificial Sequence; identical to SEQ ID NO: 202689
  derived and/or modified CDS sequence (opt5) from hemagglutinin__InfluenzaA__AHC60479

SEQ ID NO: 202839 - RNA, 1701 nt, Artificial Sequence; identical to SEQ ID NO: 199854
  derived and/or modified CDS sequence (opt5) from hemagglutinin__InfluenzaA__AHC60491

SEQ ID NO: 202840 - RNA, 1701 nt, Artificial Sequence
  derived and/or modified CDS sequence (opt5) from hemagglutinin__InfluenzaA__AHC60503
augaagaccaucauugcccugagcuacauccucugccugguguucgcucagaaacuucccggcaacgacaauuccacagccacgcugugucucgggcaccaugcggucccuaacggaaccauuguuaagacaaucaccaaugaucaaauugaggugacaaacgcuaccgaacuggugcagucuagcuccacaggcgagaucugcaauucuccgcaccagauccuugacggggaaaacuguacccugauugaugcccuccugggagacccccagugcgauggcuuucaaaauaaaaagugggaccuguucgucgagagaagcaaagccuauuccaacuguuacccuuaugaugugcccgacuacgcuucucuccggagccugguugccuccagcgggacgcuugaauuuaauaacgagucuuucaauuggaccggagugacacagaacggcaccuccagcgcuugcauccgcagaucuaauaacuccuuuuucagccggcugaauuggcucacacaucugaacuuuaaguauccugcccuuaacgucaccaugcccaauaacgagcaguucgauaagcuguacauuuggggcgugcaccauccugggacggacaaagaucagaucuuucucuaugcgcaagccucuggacgcauuacaguuuccaccaagagaagccagcaggcugugaucccgaauauuggcucccggccccgcgucagaaacaucccuucucggaucagcauuuacuggacaaucgugaaacccggggacauucugcugaucaauuccaccggaaaccucauugccccucgcggcuacuucaagaucagaagcgggaaaucuuccaucaugcggagcgaugcucccauuggaaaguguaauucugccugcaucaccccgaacggcagcauuccuaaugacaagcccuuucagaacgugaaucgcaucacauauggcgcguguccuagauacgucaaacaaaacacgcugaaacuugccaccgggaugcggaauguucccgaaaaacagacacgcggaauuuucggcgcuaucgccggguuuaucgagaacggaugggaaggcaugguggacgggugguauggauucagacaccaaaauuccgagggccggggccaggcugccgaucugaagucuacccaggccgcuauugaccagaucaacgggaaacucaacagacugauuggaaagacaaaugagaaauuccaccagaucgaaaaggaguuuagcgaaguggagggccgcauucaagaucuugaaaaguacgucgaggacaccaaaaucgaucugugguccuauaacgcggagcuccugguggcccuggaaaaucagcauacgauugaccucacagauagcgagaugaacaagcuguucgaaaagaccaagaaacagcuucgggagaaugcugaagacauggggaacggaugcuuuaagaucuaccacaagugugauaaugccugcaucggcucuauuagaaacgggaccuaugaccaugauguuuaccgcgacgaggcccugaauaaccgguuccagaucaaaggcguggagcucaaguccggauacaaagacuggauucuguggaucagcuuugcuauuucuugcuuccuucugugugucgugcuccugggcuuuaucaugugggccugccaaaaggggaauaucagauguaacauuugcaucuga

SEQ ID NO: 202841 - RNA, 1701 nt, Artificial Sequence; identical to SEQ ID NO: 199054
  derived and/or modified CDS sequence (opt5) from hemagglutinin__InfluenzaA__AHC60515

SEQ ID NO: 202842 - RNA, 1701 nt, Artificial Sequence; identical to SEQ ID NO: 199854
  derived and/or modified CDS sequence (opt5) from hemagglutinin__InfluenzaA__AHC60527

SEQ ID NO: 202843 - RNA, 1701 nt, Artificial Sequence; identical to SEQ ID NO: 199054
  derived and/or modified CDS sequence (opt5) from hemagglutinin__InfluenzaA__AHC60539

SEQ ID NO: 202844 - RNA, 1701 nt, Artificial Sequence; identical to SEQ ID NO: 202701
  derived and/or modified CDS sequence (opt5) from hemagglutinin__InfluenzaA__AHC60551

SEQ ID NO: 202845 - RNA, 1701 nt, Artificial Sequence; identical to SEQ ID NO: 201146
  derived and/or modified CDS sequence (opt5) from hemagglutinin__InfluenzaA__AHC60563

SEQ ID NO: 202846 - RNA, 1701 nt, Artificial Sequence; identical to SEQ ID NO: 201146
  derived and/or modified CDS sequence (opt5) from hemagglutinin__InfluenzaA__AHC60575

SEQ ID NO: 202847 - RNA, 1701 nt, Artificial Sequence
  derived and/or modified CDS sequence (opt5) from hemagglutinin__InfluenzaA__AHC60587
augaagaccaucauugcccugagcuacauccucugccugguguucgcucagaaacuucccggcaacgacaauuccacagccacgcugugucucgggcaccaugcggucccuaacggaaccauuguuaagacaaucaccaaugaucaaauugaggugacaaacgcuaccgaacuggugcaaaauucuagcacaggcgagaucugcgacuccccgcaccagauccuugauggggaaaacuguacccugauugacgcccuccugggagauccccagugcgacggcuuucagaauaaaaagugggaucuguucgucgagagaucuaaagccuauagcaacuguuacccuuaugacgugcccgauuacgcuucccuccggucucugguugccagcuccgggacgcuugaauuuaauaacgagagcuucaauuggaccggagugacacagaacggcaccucuuccgcuugcauccgcagaagcaauaacuccuuuuucucucggcugaauuggcucacacaucugaacuuuaaguauccugcccuuaacgucaccaugcccaauaacgagcaguucgacaagcuguacauuuggggcgugcaccauccugggacggauaaagaccagaucuuucucuaugcgcaagccagcggacgcauuacaguuucuaccaagagaucccagcaggcugugaucccgaauauuggcagccggccccgcgucagaaacaucccuucccggaucucuauuuacuggacaaucgugaaacccggggauauucugcugaucaauagcaccggaaaccucauugccccucgcggcuacuucaagaucagauccgggaaaagcucuaucaugcgguccgacgcucccauuggaaaguguaauagcgaaugcaucaccccgaacggcucuauuccuaaugacaagcccuuucagaacgugaaucgcaucacauauggcgccuguccuagauacgucaaacaaaacacgcugaaacuugcgaccgggaugcggaauguucccgagaagcagacacgcggaauuuucggcgccaucgcuggguuuaucgaaaacggaugggagggcaugguggaugggugguauggauucagacaccagaauagcgagggccggggccaagccgcugaccugaaguccacccaggccgccauugaucagaucaacgggaaacucaacagacugauuggaaagacaaaugaaaaauuccaccagaucgagaaggaauuuucugagguggaaggccgcauucaaaaccuugagaaguacgucgaggacaccaaaaucgaucuguggagcuauaaugcugaacuccugguggcgcuggagaaccagcauacgauugaccucacagauuccgaaaugaauaagcuguucgagaaaaccaagaaacagcuucgggaaaacgccgaggacauggggaauggaugcuuuaagaucuaccacaagugugauaacgcuugcaucggcagcauuagaaaugggaccuaugaccaugauguuuaccgcgacgaggcccugaacaaucgguuccagaucaaaggcguggaacucaagucuggauacaaagacuggauucuguggaucuccuuugccauuagcugcuuccuucugugugucgcucuccugggcuuuaucaugugggccugccaaaaggggaacaucagauguaauauuugcaucuga

SEQ ID NO: 202848 - RNA, 1701 nt, Artificial Sequence; identical to SEQ ID NO: 201146
  derived and/or modified CDS sequence (opt5) from hemagglutinin__InfluenzaA__AHC60599

SEQ ID NO: 202849 - RNA, 1701 nt, Artificial Sequence; identical to SEQ ID NO: 198927
  derived and/or modified CDS sequence (opt5) from hemagglutinin__InfluenzaA__AHC60611

SEQ ID NO: 202850 - RNA, 1701 nt, Artificial Sequence
  derived and/or modified CDS sequence (opt5) from hemagglutinin__InfluenzaA__AHC60623
augaagaccaucauugcccugagcuacauccucugccugguguucgcucagaaacuucccggcaacgacaauuccacagccacgcugugucucgggcaccaugcggucccuaacggaaccauuguuaagacaaucaccaaugaucaaauugaggugacaaacgcuaccgaacuggugcagucuagcuccacaggcgagaucugcgacucuccgcaccagauccuugauggggaaaauuguacccugauugacgcccuccugggagauccccagugcgacggcuuucaaaacaaaaagugggaucuguucgucgagagaagcaaagccuauuccaauuguuacccuuaugacgugcccgauuacgcuucucuccggagccugguugccuccagcgggacgcuugaauuuaacaaugagucuuucaacuggaccggagugacacagaauggcaccuccagcgcuugcauccgcagaucuaacuccagcuuuuucucucggcugaauuggcucacacaucugaacuuuaaguauccugcccuuaaugucaccaugcccaacaacgagcaguucgacaagcuguacauuuggggcgugcaccauccugggacggauaaagaccagaucuuucucuaugcgcaauccagcggacgcauuacaguuuccaccaagagaucucagcaggccgugaucccgaauauuggcagccggccccgcaucagaaacaucccuucccggauuagcaucuacuggacaauugucaaacccggggauauccugcugauuaauucuaccggaaaccucaucgcuccucgcggcuacuucaagaucagaaaugggaaauccagcauuaugcggucugacgcccccaucggaaaguguaacagcgaaugcauuaccccgaauggcuccaucccuaacgacaagcccuuucagaaugugaaccgcauuacauauggcgcuuguccuagauacgugaaacaaucuacgcugaaacuugccaccgggaugcggaauguccccgagaagcagacacgcggaaucuucggcgcgaucgccggguuuauugaaaacggaugggagggcaugguugaugggugguauggauucagacaccagaauagcgagggccggggccaagcugccgaccugaaguccacccaggcugccaucgaucagauuaacgggaaacucaauagacugaucggaaagacaaacgaaaaauuccaccagauugagaaggaauuuagcgagguggaaggccgcauccaagaccuugagaaguacguggaggauaccaaaauugaccuguggucuuauaacgccgaacuccuggucgcucuggagaaucagcauacgaucgaucucacagacuccgaaaugaacaagcuguucgagaaaaccaagaaacagcuucgggaaaaugcggaggauauggggaacggaugcuuuaagaucuaccacaagugugacaaugccugcauuggcagcaucagaaacgggaccuauaaucaugauguguaccgcgacgaggcucugaacaaucgguuccagauuaaaggcguugaacucaagucuggauacaaagacuggauccuguggauuuccuuugccaucagcugcuuccuucuguguguggcccuccugggcuuuaucaugugggcuugccaaaaggggaacauuagauguaauaucugcauuuga

SEQ ID NO: 202851 - RNA, 1701 nt, Artificial Sequence; identical to SEQ ID NO: 201146
  derived and/or modified CDS sequence (opt5) from hemagglutinin__InfluenzaA__AHC60635

SEQ ID NO: 202852 - RNA, 1701 nt, Artificial Sequence
  derived and/or modified CDS sequence (opt5) from hemagglutinin__InfluenzaA__AHC60647
augaagaccaucauugcccugagcuacauccucugccugguguucacacagaaacuucccggcaacgacaauuccacggcuacccugugucucgggcaccaugccgucccuaacggaacaauuguuaagaccaucacaaaugaucaaauugaggugaccaacgcgacagaacuggugcaaaauucuagcaccggcgagaucugcgacuccccgcaccagauccuugauggggaaaacuguacgcugauugacgcucuccugggagauccccagugcgacggcuuucagaauaaaaagugggaucuguucgucgagagaucuaaagccuauagcaacuguuacccuuaugacgugcccgauuacgccucccuccggucucugguugcuagcuccgggacccuugaauuuaauaacgagagcuucaauuggacaggagugacccagaacggcacaucuuccgccugcauccgcagaagcaauaacuccuuuuucucucggcugaauuggcucacccaucugaacuuuaaguauccugcucuuaacgucacgaugcccaauaacgagcaguucgacaagcuguacauuuggggcgugcaccauccugggacagauaaagaccagaucuuucucuaugcccaagcgagcggacgcauuaccguuucuacaaagagaucccagcaggccgugaucccgaauauuggcagccggccccgcgucagaaacaucccuucccggaucucuauuuacuggaccaucgugaaacccggggauauucugcugaucaauagcaccggaaaccucauugcuccucgcggcuacuucaagaucagauccgggaaaagcucuaucaugcgguccgacgcccccauuggaaaguguaauagcgaaugcaucacaccgaacggcucuauuccuaaugacaagcccuuucagaacgugaaucgcaucacguauggcgcuuguccuagauacgucaaacaaaacacccugaaacuugccacagggaugcggaauguucccgagaagcagacccgcggaauuuucggcgcgaucgccggguuuaucgaaaacggaugggagggcaugguggaugggugguauggauucagacaccagaauagcgagggccggggccaagcugccgaccugaaguccacacaggcugccauugaucagaucaacgggaaacucaacagacugauuggaaagaccaaugaaaaauuccaccagaucgagaaggaauuuucugagguggaaggccgcauucaagaccuugagaaguacgucgaggauacgaaaaucgaccuguggagcuauaacgccgaacuccugguggcucuggagaaucagcauacaauugaucucaccgacuccgaaaugaacaagcuguucgagaaaaccaagaaacagcuucgggaaaaugcggaggauauggggaacggaugcuuuaagaucuaccacaagugugacaaugccugcaucggcagcauuagaaacgggacauaugaucaugacguuuaccgcgacgaggcucugaauaaccgguuccagaucaaaggcguggaacucaagucuggauacaaagauuggauucuguggaucuccuuugccauuagcugcuuccuucugugugucgcccuccugggcuuuaucaugugggcuugccaaaaggggaauaucagauguaacauuugcaucuga

SEQ ID NO: 202853 - RNA, 1701 nt, Artificial Sequence
  derived and/or modified CDS sequence (opt5) from hemagglutinin__InfluenzaA__AHC60659
augaagaccaucauugcccugagcuacauccucugccugguguucacacagaaacuucccggcaacgacaauuccacggcuacccugugucucgggcaccaugccgucccuaacggaacaauuguuaagaccaucacaaaugaucaaauugaggugaccaacgcgacagaacuggugcagucuagcuccaccggcgagaucugcaauucuccgcaccagauccuugacggggaaaacuguacgcugauugaugcucuccugggagacccccagugcgauggcuuucaaaauaaaaagugggaccuguucgucgagagaagcaaagcccauuccaacuguuauccuuacgaugugcccgacuaugccucucuccggagccugguugcuuccagcgggacccuugaauuuaauaacgagucuuucaauuggacaggagugacccagaacggcacauccagcgccugcauccgcagaucuaauaacuccuuuuucagccggcugaauuggcucacccaccugaacuuuaaguacccugcucuuaacgucacgaugcccaauaacgagcaguucgauaagcuguauauuuggggcgugcaucacccugggacagacaaagaucagaucuuucucuacgcccaagcggccggacgcauuaccguuucuacaaagagaucccagcaggcugugaucccgaauauuggcagccggccccgcgucagaaacaucccuucccgggugucuaucuauuggaccauugugaaacccggggacauccugcugauuaauagcaccggaaaccucaucgccccucgcggcuacuucaagauuagauccgggaaaagcucuaucaugcgguccgaugcucccaucggaaaguguaauagcgccugcauuacaccgaacggcucuaucccuaaugacaagcccuuucagaacgucaaucgcauuacguacggcgcguguccuagauauguuaaacaaaacacccugaaacuugccacagggaugcggaaugugcccgaaaaacagacccgcggaaucuucggcgcuauugccggguuuaucgagaacggaugggaaggcaugguggacgggugguacggauucagacaccagaauagcgagggccggggccaagcugccgaucugaaguccacacaggccgcuaucgaccagauuaacgggaaacucaacagacugaucggaaagaccaaugagaaauuccaucagauugaaaaggaguuuucugaagucgagggccgcauccaagaucuugaaaaguauguggaggacacgaaaauugaucuguggagcuacaacgcggagcuccugguugcccuggaaaaucagcacacaaucgaccucaccgauuccgagaugaacaagcuguucgaaaagaccaagaaacagcuucgggagaaugcugaagacauggggaacggaugcuuuaagauuuaucauaagugugauaaugccugcaucggcagcaucagaaacgggacauacgaccacgauguguaucgcgacgaggcccugaauaaccgguuccagauuaaaggcgucgagcucaagucuggauacaaagacuggauccuguggauuuccuuugcuaucagcugcuuccuucuguguguggcccuccugggcuuuauuaugugggcgugccaaaaggggaauaucagauguaacaucugcauuuga

SEQ ID NO: 202854 - RNA, 1701 nt, Artificial Sequence
  derived and/or modified CDS sequence (opt5) from hemagglutinin__InfluenzaA__AHC60671
augaagaccaucauugcccugagcuacauccucugccugguguucgcucagaaacuucccggcaacgacaauuccacagccacgcugugucucgggcaccaugcggucccuaacggaaccauuguuaagacaaucaccaaugaucaaauugaggugacaaacgcuaccgaacuggugcagucuagcuccacaggcgagaucugcaauucuccgcaccagauccuugacggggaaaacuguacccugauugaugcccuccugggagacccccagugcgauggcuuucaaaauaaagagugggaccuguucgucgaaagaagcaaggcccauuccaacuguuauccuuacgaugugcccgacuaugcuucucuccggagccugguugccuccagcgggacgcuugaguuuaauaacgagucuuucaauuggaccggagugacacagaacggcaccuccagcgcuugcauccgcagaucuaauaacuccuuuuucagccggcugaauuggcucacacaccugaacuuuaaauacccugcccuuaacgucaccaugcccaauaacgaacaguucgauaagcuguauauuuggggcgugcaucacccugggacggacaaggaucagaucuuucucuacgcgcaagccucuggacgcauuacaguuuccaccaaaagaagccagcaggcugugaucccgaauauuggcucccggccccgcgucagaaacaucccuucucgggugagcaucuauuggacaauugugaagcccggggacauccugcugauuaauuccaccggaaaccucaucgccccucgcggcuacuucaaaauuagaagcgggaagucuuccaucaugcggagcgaugcucccaucggaaaauguaauucugccugcauuaccccgaacggcagcaucccuaaugacaagcccuuucagaacgucaaucgcauuacauacggcgcguguccuagauauguuaagcaaaacacgcugaaacuugccaccgggaugcggaaugugcccgagaagcagacacgcggaaucuucggcgcuauugccggguuuaucgaaaacggaugggagggcaugguggacgggugguacggauucagacaccaaaauuccgagggccggggccaggcugccgaucugaaaucuacccaggccgcuaucgaccagauuaacgggaagcucaacagacugaucggaaaaacaaaugaaaaguuccaucagauugagaaagaauuuagcgaggucgaaggccgcauccaagaucuugagaaguauguggaggacaccaagauugaucugugguccuacaacgcggaacuccugguugcccuggagaaucagcacacgaucgaccucacagauagcgaaaugaacaaacuguucgagaagaccaaaaagcagcuucgggaaaaugcugaggacauggggaacggaugcuuuaaaauuuaucauaagugugauaaugccugcaucggcucuaucagaaacgggaccuacgaccacgauguguaucgcgacgaggcccugaauaaccgguuccagauuaagggcgucgaacucaaauccggauacaaggacuggauccuguggauuagcuuugcuaucucuugcuuccuucuguguguggcccuccugggcuuuauuaugugggcgugccaaaaagggaauaucagauguaacaucugcauuuga

SEQ ID NO: 202855 - RNA, 1701 nt, Artificial Sequence
  derived and/or modified CDS sequence (opt5) from hemagglutinin__InfluenzaA__AHC60683
augaagaccaucauugcccugagcuacauccucugccugguguucgcucagaaacuucccggcaacgacaauuccacagccacgcugugucucgggcaccaugcggucccuaacggaaccauuguuaagacaaucaccaaugaucaaauugaggugacaaacgcuaccgaacuggugcagucuagcuccacaggcgagaucugcaauucuccgcaccagauccuugacggggaaaacuguacccugauugaugcccuccugggagacccccagugcgauggcuuucaaaauaaaaagugggaccuguucgucgagagaagcaaagcccauuccaacuguuauccuuacgaugugcccgacuaugcuucucuccggagccugguugccuccagcgggacgcuugaauuuaauaacgagucuuucaauuggaccggagugacacagaacggcaccuccagcgcuugcauccgcagaucuaauaacuccuuuuucagccggcugaauuggcucacacaccugaacuuuaaguacccugcccuuaacgucaccaugcccaauaacgagcaguucgauaagcuguauauuuggggcgugcaucacccugggacggacaaagaucagaucuuucucuacgcgcaagccgcuggacgcauuacaguuucuaccaagagaucccagcaggccgugaucccgaauauuggcagccggccccgcgucagaaacaucccuucccgggugucuaucuauuggacaauugugaaacccggggacauccugcugauuaauagcaccggaaaccucaucgcuccucgcggcuacuucaagauuagauccgggaaaagcucuaucauccgguccgaugcccccauuggaaaguguaauagcgcgugcaucaccccgaacggcucuauuccuaaugacaagcccuuucagaacgucaaucgcaucacauacggcgccuguccuagauauguuaaacaaaacacgcugaaacuugcuaccgggaugcggaaugugcccgaaaaacagacacgcggaauuuucggcgccaucgcuggguuuaucgagaacggaugggaaggcaugguggacgggugguacggauucagacaccagaauagcgagggccggggccaagccgccgaucugaaguccacccaggcugcgauugaccagaucaacgggaaacucaacagacugauuggaaagacaaaugagaaauuccaucagaucgaaaaggaguuuucugaagucgagggccgcauucaagaucuugaaaaguauguggaggacaccaaaaucgaucuguggagcuacaacgccgagcuccugguugcucuggaaaaucagcacacgauugaccucacagauuccgagaugaacaagcuguucgaaaagaccaagaaacagcuucgggagaaugccgaagacauggggaacggaugcuuuaagaucuaucauaagugugauaaugccugcaucggcagcauuagaaacgggaccuacgaccacgauguguaucgcgacgaggcucugaauaaccgguuccagaucaaaggcgucgagcucaagucuggauacaaagacuggauucuguggaucuccuuugccauuagcugcuuccuucuguguguggcgcuccugggcuuuaucaugugggcuugccaaaaggggaauaucagauguaacauuugcaucuga

SEQ ID NO: 202856 - RNA, 1701 nt, Artificial Sequence
  derived and/or modified CDS sequence (opt5) from hemagglutinin__InfluenzaA__AHC60695
augaagaccaucauugcccugagcuacauccucugccugguguucgcucagaaacuucccggcaacgacaauuccacagccacgcugugucucgggcaccaugcggucccuaacggaaccauuguuaagacaaucaccaaugaucaaauugaggugacaaacgcuaccgaacuggugcagucuagcuccacaggcgagaucugcaauucuccgcaccagauccuugacggggaaaacuguacccugauugaugcccuccugggagacccccagugcgauggcuuucaaaauaaaaagugggaccuguucgucgagagaagcaaagcccauuccaacuguuauccuuacgaugugcccgacuaugcuucucuccggagccugguugccuccagcgggacgcuugaauuuaauaacgagucuuucaauuggaccggagugacacagaacggcaccuccagcgcuugcaugcgcggcucuaauaacuccuuuuucagcagacugaauuggcucacacaccugaacuuuaaguacccugcccuuaacgucaccaugcccaauaacgagcaguucgauaagcuguauaucuggggagugcaucacccugggacggacaaagaucagauuuuucucuacgcgcaagccucuggccggaucacaguuuccaccaagcgcagccagcaggcugugauuccgaauaucggguccagaccccggguccgcaacauuccuucuagagugagcaucuauuggacaaucgugaaacccggagacauucugcugaucaauuccaccggcaaccucauugccccucggggguacuucaagauccgcagcggaaaaucuuccauuaugagaagcgaugcucccaucggcaaguguaauucugccugcaucaccccgaacggcagcauuccuaaugacaagcccuuucagaacgucaaucggaucacauacggggcguguccucgcuauguuaaacaaaacacgcugaaacuugccaccggaaugagaaaugugcccgaaaaacagacacggggcauuuucggggcuaucgccggauuuauugagaacggcugggaagggaugguggacggaugguacggcuuccgccaccaaaauuccgagggcagagggcaggcugccgaucugaagucuacccaggccgcuaucgaccagaucaacggaaaacucaaccggcugauuggcaagacaaaugagaaauuccaucagaucgaaaaggaguuuagcgaagucgaggggcgcauucaagaucuugaaaaguauguggaggacaccaaaaucgaucugugguccuacaacgcggagcuccugguugcccuggaaaaucagcacacgauugaccucacagauagcgagaugaacaagcuguucgaaaagaccaagaaacagcuuagagagaaugcugaagacaugggaaacggcugcuuuaagaucuaucauaagugugauaaugccugcauugggucuauccggaacggcaccuacgaccacgauguguauagagacgaggcccugaauaaccgcuuccagaucaaaggagucgagcucaaguccggcuacaaagacuggauucuguggaucagcuuugcuauuucuugcuuccuucuguguguggcccuccugggguuuaucaugugggcgugccaaaagggaaauauucgguguaacaucugcaucuga

SEQ ID NO: 202857 - RNA, 1701 nt, Artificial Sequence
  derived and/or modified CDS sequence (opt5) from hemagglutinin__InfluenzaA__AHC60707
augaagaccaucauugcccugagcuacauccucugccugguguucgcucagaaacuucccggcaacgacaauuccacagccacgcugugucucgggcaccaugcggucccuaacggaaccauuguuaagacaaucaccgaugaccaaauugaggugacaaaugcuaccgaacuggugcagaacucuagcacaggcgagaucugcgauuccccgcaccagauccuugacggggaaaauuguacccugauugaugcccuccugggagacccccagugcgauggcuuucaaaacaaaaagugggaccuguucgucgagagaucuaaagccuauagcaauuguuacccuuaugaugugcccgacuacgcuucccuccggucucugguugccagcuccgggacgcuugaauuuaacaaugagagcuucaacuggaccggagugacacagaauggcaccucuuccgcuugcauccgcagaagcaacaauuccuuuuucucucggcugaacuggcucacacaucugaauuuuaaguauccugcccuuaacgucaccaugcccaacaaugagcaguucgauaagcuguacauuuggggcgugcaccauccugggacggacaaagaucagaucuuucucuaugcgcaagccagcggacgcauuacaguuucuaccaagagaucccagcaggcugugaucccgaacauuggcagccggccccgcgucagaaauaucccuucccggaucucuauuuacuggacaaucgugaaacccggggacauucugcugaucaacagcaccggaaaucucauugccccucgcggcuacuucaagaucagauccgggaaaagcucuaucaugcgguccgacgcucccauuggaaaguguaacagcgaaugcaucaccccgaauggcucuauuccuaacgauaagcccuuucagaaugugaaccgcaucacauauggcgccuguccuagauacgucaaacaaaauacgcugaaacuugcgaccgggaugcggaacguucccgagaagcagacacgcggaauuuucggcgccaucgcuggguuuaucgaaaauggaugggagggcaugguggacgggugguauggauucagacaccagaacagcgagggccggggccaagccgcugaucugaaguccacccaggccgccauugaccagaucaaugggaaacucaacagacugauuggaaagacaaacgaaaaauuccaccagaucgagaaggaauuuucugagguggaaggccgcauucaagaucuugagaaguacgucgaggacaccaaaaucgaucuguggagcuauaaugcugaacuccugguggcgcuggagaaccagcauacgauugaccucacagauuccgaaaugaauaagcuguucgagaaaaccaagaaacagcuucgggaaaacgccgaggacauggggaauggaugcuuuaagaucuaccacaagugugauaacgcuugcaucggcagcauuagaaaugggaccuaugaccaugacguuuaccgcgaugaggcccugaacaaucgguuccagaucaaaggcguggaacucaagucuggauacaaagacuggauuaucuggauuuccuuugccaucagcugcuuccugcuuugugucgcucugcucggcuuuaucaugugggccugccaaaaggggaacauuagauguaauaucugcauuuga

SEQ ID NO: 202858 - RNA, 1701 nt, Artificial Sequence; identical to SEQ ID NO: 198927
  derived and/or modified CDS sequence (opt5) from hemagglutinin__InfluenzaA__AHC60719

SEQ ID NO: 202859 - RNA, 1701 nt, Artificial Sequence; identical to SEQ ID NO: 199054
  derived and/or modified CDS sequence (opt5) from hemagglutinin__InfluenzaA__AHC60731

SEQ ID NO: 202860 - RNA, 1701 nt, Artificial Sequence; identical to SEQ ID NO: 202765
  derived and/or modified CDS sequence (opt5) from hemagglutinin__InfluenzaA__AHC60743

SEQ ID NO: 202861 - RNA, 1701 nt, Artificial Sequence; identical to SEQ ID NO: 195483
  derived and/or modified CDS sequence (opt5) from hemagglutinin__InfluenzaA__AHC60767

SEQ ID NO: 202862 - RNA, 1701 nt, Artificial Sequence
  derived and/or modified CDS sequence (opt5) from hemagglutinin__InfluenzaA__AHC60779
augaagaccaucauugcccugagcuacauccucugccugguguucgcucagaaacuucccggcaacgacaauuccacagccacgcugugucucgggcaccaugcggucccuaacggaaccauuguuaagacaaucaccaaugaucaaauugaggugacaaacgcuaccgaacuggugcagucuagcuccacaggcgagaucugcaauucuccgcaccagauccuugacggggaaaacuguacccugauugaugcccuccugggagacccccagugcgauggcuuucaaaauaaaaagugggaccuguucgucgagagaagcaaagcccauuccaacuguuauccuuacgaugugcccgacuaugcuucucuccggagccugguugccuccagcgggacgcuugaauuuaauaacgagcgcuucaauuggaccggagugacacagaacggcaccucuuccgcuugcaucagacggagcaauaacagcuuuuucucccgccugaauuggcucacacaccugaacuuuaaguacccugcccuuaacgucaccaugcccaauaacgagcaguucgauaagcuguauauuuggggcgugcaucacccugggacggacaaagaucagaucuuucucuacgcgcaagccgcuggaagaauuacaguuagcaccaagcggucucagcaggccgugaucccgaauauuggcucccgccccagaguccggaacaucccuagccgcguguccaucuauuggacaauugugaaacccggggacauccugcugauuaauucuaccggaaaccucaucgcuccuagaggcuacuucaagauucggagcgggaaauccagcaucaugcgcucugaugcccccaucggaaaguguaauuccgcgugcauuaccccgaacggcagcaucccuaaugacaagcccuuucagaacgucaauagaauuacauacggcgccuguccucgguauguuaaacaaaacacgcugaaacuugcuaccgggaugcgcaaugugcccgaaaaacagacaagaggaaucuucggcgccauugcuggguuuaucgagaacggaugggaaggcaugguggacgggugguacggauuccggcaccaaaauucugagggcagaggccaggccgccgaucugaagucuacccaggcugcgaucgaccagauuaacgggaaacucaaccgccugaucggaaagacaaaugagaaauuccaucagauugaaaaggaguuuuccgaagucgagggccggauccaagaucuugaaaaguauguggaggacaccaaaauugaucuguggucuuacaacgccgagcuccugguugcucuggaaaaucagcacacgaucgaccucacagauagcgagaugaacaagcuguucgaaaagaccaagaaacagcuuagagagaaugccgaagacauggggaacggaugcuuuaagauuuaucauaagugugauaaugccugcaucggcuccauccgcaacgggaccuacgaccacgauguguaucgggacgaggcucugaauaacagauuccagauuaaaggcgucgagcucaagagcggauacaaagacuggauccuguggauuucuuuugccaucuccugcuuccuucuguguguggcgcuccugggcuuuauuaugugggcuugccaaaaggggaauauccgcuguaacaucugcauuuga

SEQ ID NO: 202863 - RNA, 1701 nt, Artificial Sequence; identical to SEQ ID NO: 199054
  derived and/or modified CDS sequence (opt5) from hemagglutinin__InfluenzaA__AHC60791

SEQ ID NO: 202864 - RNA, 1701 nt, Artificial Sequence; identical to SEQ ID NO: 202723
  derived and/or modified CDS sequence (opt5) from hemagglutinin__InfluenzaA__AHC60803

SEQ ID NO: 202865 - RNA, 1701 nt, Artificial Sequence; identical to SEQ ID NO: 198927
  derived and/or modified CDS sequence (opt5) from hemagglutinin__InfluenzaA__AHC60815

SEQ ID NO: 202866 - RNA, 1701 nt, Artificial Sequence
  derived and/or modified CDS sequence (opt5) from hemagglutinin__InfluenzaA__AHC60827
augaagaccaucauugcccugagcuacauccucugccugguguucgcucagaaacuucccggcaacgacaauuccacagccacgcugugucucgggcaccaugcggucccuaacggaaccauuguuaagacaaucaccaaugaucaaauugaggugacaaacgcuaccgaacuggugcagucuagcuccacagacgagaucugcaauucuccgcaccagauccuugauggcgaaaacuguacccugauugacgcccuccugggggauccccagugcgacggauuucaaaauaaaaagugggaucuguucgucgagagaagcaaagcccauuccaacuguuauccuuacgacgugcccgauuaugcuucucuccggagccugguugccuccagcggcacgcuugaauuuaauaacgagucuuucaauuggaccggggugacacagaacggaaccuccagcgcuugcauccgcggcucuaauaacuccuuuuucagcagacugaauuggcucacacaccugaacuuuaaguacccugcccuuaacgucaccaugcccaauaacgagcaguucgacaagcuguauauuuggggcgugcaucacccugggacggauaaagaccagaucuuucucuacgcgcaagccucuggacggauuacaguuuccaccaagcgcagccagcaggcugugaucccgaauauuggcuccagaccccggguccgcaacaucccuucuagagugagcaucuauuggacaauugugaaacccggggauauccugcugauuaauuccaccggaaaccucaucgccccucggggcuacuucaagauucgcagcgggaaaucuuccaucaugagaagcgacgcucccaucggaaaguguaauucugccugcauuaccccgaacggcagcaucccuaaugacaagcccuuucagaacgucaaucggauuacauacggcgcguguccucgcuauguuaaacaaaacacgcugaaacuugccaccgggaugagaaaugugcccgaaaaacagacacggggaaucuucggcgcuauugccggguuuaucgagaacggaugggaaggcaugguggaugggugguacggauuccgccaccaaaauuccgagggcagaggccaggcugccgaccugaagucuacccaggccgcuaucgaucagauuaacgggaaacucaaccggcugaucggaaagacaaaugagaaauuccaucagauugaaaaggaguuuagcgaagucgagggcagaauccaagaccuugaaaaguauguggaggauaccaaaauugaccugugguccuacaacgcggagcuccugguugcccuggaaaaucagcacacgaucgaucucacagacagcgagaugaacaagcuguucgaaaagaccaagaaacagcuucgcgagaaugcugaagauauggggaacggaugcuuuaagauuuaucauaagugugacaaugccugcaucggcucuauccggaacgggaccuacgaucacgacguguauagagacgaggcccugaauaaccgcuuccagauuaaaggcgucgagcucaaguccggauacaaagauuggauccuguggauuagcuuugcuaucucuugcuuccuucuguguguggcccuccugggcuuuauuaugugggcgugccaaaaggggaauauccgguguaacaucugcauuuga

SEQ ID NO: 202867 - RNA, 1701 nt, Artificial Sequence; identical to SEQ ID NO: 202701
  derived and/or modified CDS sequence (opt5) from hemagglutinin__InfluenzaA__AHC60839

SEQ ID NO: 202868 - RNA, 1701 nt, Artificial Sequence; identical to SEQ ID NO: 199054
  derived and/or modified CDS sequence (opt5) from hemagglutinin__InfluenzaA__AHC60851

SEQ ID NO: 202869 - RNA, 1701 nt, Artificial Sequence
  derived and/or modified CDS sequence (opt5) from hemagglutinin__InfluenzaA__AHC60863
augaagaccaucauugcccugagcuacauccucugccugguguucgcucagaaacuucccggcaacgacaauuccacagccacgcugugucucgggcaccaugcggucccuaacggaaccauuguuaagacaaucaccaaugaucaaauugaggugacaaacgcuaccgaacuggugcagucuagcuccacaggcgagaucugcaauucuccgcaccagauccuugacggggaaaacuguacccugauugaugcccuccugggagacccccagugcgauggcuuucaaaauaaaaagugggaccuguucgucgagagaagcaaagcccauuccaacuguuauccuuacgaugugcccgacuaugcuucucuccggagccugguugccuccagcgggacgcuugaauuuaauaacgagucuuucaauuggaccggagugacacagaacggcaccuccagcgcuugcauccgcagaucuaauaacuccuuuuucagccggcugaauuggcucacacaccugaacuuuaaguacccugcccuuaacgucaccaugcccaauaacgagcaguucgauaagcuguauauuuggggcgugcaucacccugggacggacaaagaucagaucuuucucuacgcgcaagccgcuggacgcauuacaguuucuaccaagagaucccagcaggccgugaucccgaauauuggcagccggccccgcgucagaaacaucccuucccgggugucuaucuauuggacaauugugaaacccggggacauccugcugauuaauagcaccggaaaccucaucgcuccucgcggcuacuucaagauuagauccgggaaaagcucuaucaugcgguccgaugcccccaucggaaaguguaauagcgcgugcauuaccccgaacggcucuaucccuaaugacaagcccuuucagaacgucaaucgcauuacauacggcgccuguccuagauauguuaaacaaaacacgcugaaacuugcuaccgggaugcggaaugugcccgaaaaacagacacgcggaaucuucggcgccauugcuggguuuaucgagaacggaugggaaggcaugguggacgggugguacggauucagacaccagaauagcgagggccggggccaagccgccgaucugaaguccacccaggcugcgaucgaccagauuaacgggaaacucaacagacugaucggaaagacaaaugagaaauuccaucagauugaaaaggaguuuucugaagucgagggccgcauccaagaucuugaaaaguauguggaggacaccaaaauugaucuguggagcuacaacgccgagcuccugguugcucuggaaaaucagcacacgaucgaccucacagauuccgagaugaacaagcuguucgaaaagaccaagaaacagcuucgggagaaugccgaagacauggggaacggaugcuuuaagauuuaucauaagugugauaaugccugcaucggcagcaucagaaacgggaccuacgaccacgauguguaucgcgacgaggcucugaauaaccgguuccagauuaaaggcgucgagcucaaggccggauacaaagacuggauccuguggauuucuuuugcgaucuccugcuuccuucuguguguggcucuccugggcuuuauuaugugggccugccaaaaggggaauaucagauguaacaucugcauuuga

SEQ ID NO: 202870 - RNA, 1701 nt, Artificial Sequence; identical to SEQ ID NO: 199054
  derived and/or modified CDS sequence (opt5) from hemagglutinin__InfluenzaA__AHC60875

SEQ ID NO: 202871 - RNA, 1701 nt, Artificial Sequence; identical to SEQ ID NO: 199054
  derived and/or modified CDS sequence (opt5) from hemagglutinin__InfluenzaA__AHC60887

SEQ ID NO: 202872 - RNA, 1701 nt, Artificial Sequence; identical to SEQ ID NO: 195483
  derived and/or modified CDS sequence (opt5) from hemagglutinin__InfluenzaA__AHC60899

SEQ ID NO: 202873 - RNA, 1701 nt, Artificial Sequence; identical to SEQ ID NO: 199854
  derived and/or modified CDS sequence (opt5) from hemagglutinin__InfluenzaA__AHC60911

SEQ ID NO: 202874 - RNA, 1701 nt, Artificial Sequence; identical to SEQ ID NO: 202690
  derived and/or modified CDS sequence (opt5) from hemagglutinin__InfluenzaA__AHC60923

SEQ ID NO: 202875 - RNA, 1701 nt, Artificial Sequence; identical to SEQ ID NO: 199854
  derived and/or modified CDS sequence (opt5) from hemagglutinin__InfluenzaA__AHC60935

SEQ ID NO: 202876 - RNA, 1701 nt, Artificial Sequence; identical to SEQ ID NO: 199054
  derived and/or modified CDS sequence (opt5) from hemagglutinin__InfluenzaA__AHC60947

SEQ ID NO: 202877 - RNA, 1701 nt, Artificial Sequence; identical to SEQ ID NO: 199854
  derived and/or modified CDS sequence (opt5) from hemagglutinin__InfluenzaA__AHC60959

SEQ ID NO: 202878 - RNA, 1701 nt, Artificial Sequence; identical to SEQ ID NO: 198927
  derived and/or modified CDS sequence (opt5) from hemagglutinin__InfluenzaA__AHC60971

SEQ ID NO: 202879 - RNA, 1701 nt, Artificial Sequence; identical to SEQ ID NO: 199854
  derived and/or modified CDS sequence (opt5) from hemagglutinin__InfluenzaA__AHC60983

SEQ ID NO: 202880 - RNA, 1701 nt, Artificial Sequence; identical to SEQ ID NO: 199054
  derived and/or modified CDS sequence (opt5) from hemagglutinin__InfluenzaA__AHC61007

SEQ ID NO: 202881 - RNA, 1701 nt, Artificial Sequence; identical to SEQ ID NO: 198927
  derived and/or modified CDS sequence (opt5) from hemagglutinin__InfluenzaA__AHC61019

SEQ ID NO: 202882 - RNA, 1701 nt, Artificial Sequence
  derived and/or modified CDS sequence (opt5) from hemagglutinin__InfluenzaA__AHC61031
augaagaccaucauugcccugagcuacauccucugccugguguucgcucagaaacuucccggcaacgacaauuccacagccacgcugugucucgggcaccaugcggucccuaacggaaccauuguuaagacaaucaccaaugaucaaauugaggugacaaacgcuaccgaacuggugcagucuagcuccacaggcgagaucugcaauucuccgcaccagauccuugacggggaaaacuguacccugauugaugcccuccugggagacccccagugcgauggcuuucaaaauaaaaagugggaccuguucgucgagagaagcaaagcccauuccaacuguuauccuuacgaugugcccgacuaugcuucucuccggagccugguugccuccagcgggacgcuugaauuuaauaacgagucuuucaauuggaccggagugacacagaacggcaccuccagcgcuugcauccgcagaucuaauaacuccuuuuucagccggcugaauuggcucacacaccugaacuuuaaguacccugcccuuaacgucaccaugcccaauaacgagcaguucgauaagcuguauauuuggggcgugcaucacccugggacggacaaagaucagaucuuucucuacgcgcaagccgcuggacgcauuacaguuucuaccaagagaucccagcaggccgugaucccgaauauuggcagccggccccgcgucagaaacaucccuucccgggugucuaucuauuggacaauugugaaacccggggacauccugcugauuaauagcaccggaaaccucaucgcuccucgcggcuacuucaagauuagauccgggaaaagcucuaucaugcgguccgaugcccccaucggaaaguguaauagcgcgugcauuaccccgaacggcucuaucccuaaugacaagcccuuucagaacgucaaucgcauuacauacggcgccuguccuagauauguuaaacaaaacacgcugaaacuugcuaccgggaugcggaaugugcccgaaaaacagacacgcggaaucuucggcgccauugcuggguuuaucgagaacggaugggaaggcaugguggacgggugguacggauucagacaccagaauagcgagggccggggccaagccgccgaucugaaguccacccaggcugcgaucgaccagauuaacgggaaacucaacagacugaucggaaagacaaaugagaaauuccaucagauugaaaaggaguuuucugaagucgagggccgcauccaagaucuugaaaaguauguggaggacaccaaaauugaucuguggagcuacaacgccgagcuccugguugcucuggaaaaucagcacacgaucgaccucacagauuccgagaugaacaagcuguucgaaaagaccaagaaacagcuucgggagaaugccgaagacauggggaacggaugcuuuaagauuuaucauaagugugauaaugccugcaucggcagcaucagaaacgggaccuacgaccacgauguguaucgcgacgaggcucugaauaaccgguuccagauuaaaggcgucgagcucaagucuggauacaaagacuggauccuguggauuuccuuugccaucagcugcuuccuucugugugugguucuccugggcuuuauuaugugggcgugccaaaaggggaauaucagauguaacaucugcauuuga

SEQ ID NO: 202883 - RNA, 1701 nt, Artificial Sequence; identical to SEQ ID NO: 199854
  derived and/or modified CDS sequence (opt5) from hemagglutinin__InfluenzaA__AHC61043

SEQ ID NO: 202884 - RNA, 1701 nt, Artificial Sequence
  derived and/or modified CDS sequence (opt5) from hemagglutinin__InfluenzaA__AHC61055
augaagaccaucauugcccugagcuacauccucugccugguguucgcucagaaacuucccggcaacgacaauuccacagccacgcugugucucgggcaccaugcggucccuaacggaaccauuguuaagacaaucaccaaugaucaaauugaggugacaaacgcuaccgaacuggugcagucuagcuccacaggcgagaucugcaauucuccgcaccagauccuugacggggaaaacuguacccugauugaugcccuccugggagacccccagugcgauggcuuucaaaauaaaaagugggaccuguucgucgagagaagcaaagcccauuccaacuguuauccuuacgaugugcccgacuaugcuucucuccggagccugguugccuccagcgggacgcuugaauuuaauaacgagucuuucaauuggaccggagugacacagaacggcaccuccagcgcuugcauccgcagaucuaauaacuccuuuuucagccggcugaauuggcucacacaccugaacuuuaaguacccugcccuuaacgucaccaugcccaauaacgagcaguucgauaagcuguauauuuggggcgugcaucacccugggacggacaaagaucagaucuuucucuacgcgcaagccgcuggacgcauuacaguuucuaccaagagaucccagcaggccgugaucccgaauauuggcagccggccccgcgucagaaacaucccuucccgggugucuaucuauuggacaauugugaaacccggggacauccugcugauuaauagcaccggaaaccucaucgcuccucgcggcuacuucaagauuagauccgggaaaagcucuaucaugcgguccgaugcccccaucggaaaguguaauagcgcgugcauuaccccgaacggcucuaucccuaaugacaagcccuuucagaacgucaaucgcauuacauacggcgccuguccuagauauguuaaacaaaacacgcugaaacuugcuaccgggaugcggaaugugcccgaaaaacagacacgcggaaucuucggcgccauugcuggguuuaucgagaacggaugggaaggcaugguggacgggugguacggauucagacaccagaauagcgagggccggggccaagccgccgaucugaaguccacccaggcugcgaucgaccagauuaacgggaaacucaacagacugaucggaaagacaaaugagaaauuccaucagauugaaaaggaguuuucugaagucgagggccgcauccaaaaccuugaaaaguauguggaggauaccaaaauugaccuguggagcuacaaugccgagcuccugguugcucuggaaaaccagcacacgaucgaucucacagacuccgagaugaauaagcuguucgaaaagaccaagaaacagcuucgggagaacgccgaagauauggggaauggaugcuuuaagauuuaucauaagugugacaacgccugcaucggcagcaucagaaaugggaccuacgaucacgacguguaucgcgaugaggcucugaacaaucgguuccagauuaaaggcgucgagcucaagucuggauacaaagacuggauccuguggauuuccuuugccaucagcugcuuccuucuguguguggcgcuccugggcuuuauuaugugggcuugccaaaaggggaacaucagauguaauaucugcauuuga

SEQ ID NO: 202885 - RNA, 1701 nt, Artificial Sequence; identical to SEQ ID NO: 202751
  derived and/or modified CDS sequence (opt5) from hemagglutinin__InfluenzaA__AHC61067

SEQ ID NO: 202886 - RNA, 1701 nt, Artificial Sequence; identical to SEQ ID NO: 201146
  derived and/or modified CDS sequence (opt5) from hemagglutinin__InfluenzaA__AHC61079

SEQ ID NO: 202887 - RNA, 1701 nt, Artificial Sequence; identical to SEQ ID NO: 199054
  derived and/or modified CDS sequence (opt5) from hemagglutinin__InfluenzaA__AHC61103

SEQ ID NO: 202888 - RNA, 1701 nt, Artificial Sequence; identical to SEQ ID NO: 199054
  derived and/or modified CDS sequence (opt5) from hemagglutinin__InfluenzaA__AHC61115

SEQ ID NO: 202889 - RNA, 1701 nt, Artificial Sequence; identical to SEQ ID NO: 199854
  derived and/or modified CDS sequence (opt5) from hemagglutinin__InfluenzaA__AHC61127

SEQ ID NO: 202890 - RNA, 1701 nt, Artificial Sequence
  derived and/or modified CDS sequence (opt5) from hemagglutinin__InfluenzaA__AHC61139
augaagaccaucauugcccugagcuacauccucugccugguguucgcucagaaacuucccggcaacgacaauuccacagccacgcugugucucgggcaccaugcggucccuaacggaaccauuguuaagacaaucaccaaugaucaaauugaggugacaaacgcuaccgaacuggugcagucuagcuccacaggcgagaucugcaauucuccgcaccagauccuugacggggaaaacuguacccugauugaugcccuccugggagacccccagugcgauggcuuucaaaauaaaaagugggaccuguucgucgagagaagcaaagcccauuccaacuguuauccuuacgaugugcccgacuaugcuucucuccggagccugguugccuccagcgggacgcuugaauuuaauaacgagucuuucaauuggaccggagugacacagaacggcaccuccagcgcuugcauccgcagaucuaauaacuccuuuuucagccggcugaauuggcucacacaccugaacuuuaaguacccugcccuuaacgucaccaugcccaauaacgagcaguucgauaagcuguauauuuggggcgugcaucacccugggacggacaaagaucagaucuuucucuacgcgcaagccucuggacgcauuacaguuuccacccagagaagccagcaggcugugaucccgaauauuggcucccggccccgcgucagaaacaucccuucucgggugagcaucuauuggacaauugugaagcccggggacauccugcugauuaauuccaccggaaaccucaucgccccucgcggcuacuucaaaauuagaagcgggaagucuuccaucaugcggagcgaugcucccaucggaaaauguaauucugccugcauuaccccgaacggcagcaucccuaaugacaagcccuuucaaaacgucaaucgcauuacauacggcgcguguccuagauauguuaagcagaacacgcugaaacuugccaccgggaugcggaaugugcccgaaaagcagacacgcggaaucuucggcgcuauugccggguuuaucgagaacggaugggaaggcaugguggacgggugguacggauucagacaccaaaauuccgagggccggggccaggcugccgaucugaaaucuacccaggccgcuaucgaccagauuaacgggaagcucaacagacugaucggaaaaacaaaugagaaguuccaucaaauugaaaaagaguuuagcgaagucgagggccgcauccaggaucuugaaaaguauguggaggacaccaagauugaucugugguccuacaacgcggagcuccugguugcccuggaaaaucagcacacgaucgaccucacagauagcgagaugaacaaacuguucgaaaagaccaaaaagcagcuucgggagaaugcugaagacauggggaacggaugcuuuaaaauuuaucauaagugugauaaugccugcaucggcucuaucagaaacgggaccuacaaucacgacguguaucgcgaugaggcccugaacaaucgguuccaaauuaagggcgucgagcucaaauccggauacaaggacuggauccuguggauuagcuuugcuaucucuugcuuccuucuguguguggcccuccugggcuuuauuaugugggcgugccagaaagggaacaucagauguaauaucugcauuuga

SEQ ID NO: 202891 - RNA, 1701 nt, Artificial Sequence; identical to SEQ ID NO: 199054
  derived and/or modified CDS sequence (opt5) from hemagglutinin__InfluenzaA__AHC61151

SEQ ID NO: 202892 - RNA, 1701 nt, Artificial Sequence
  derived and/or modified CDS sequence (opt5) from hemagglutinin__InfluenzaA__AHC61163
augaagaccaucauugcccugagcuacauccucugccugguguucgcucagaaacuucccggcaacgacaauuccacagccacgcugugucucgggcaccaugcggucccuaacggaaccauuguuaagacaaucaccaaugaucaaauugaggugacaaacgcuaccgaacuggugcagucuagcuccacaggcgagaucugcaauucuccgcaccagauccuugacggggaaaacuguacccugauugaugcccuccugggagacccccagugcgauggcuuucaaaauaaaaagugggaccuguucgucgagagaagcaaagcccauuccaacuguuauccuuacgaugugcccgacuaugcuucucuccggagccugguugccuccagcgggacgcuugaauuuaagaaugagucuuucaacuggaccggagugacacagaauggcaccuccagcgcuugcauccgcagaucuaacaauuccuuuuucagccggcugaacuggcucacacaccugaauuuuaaguacccugcccuuaacgucaccaugcccaacaaugagcaguucgauaaacuguauauuuggggcgugcaucacccugggacggacaaggaucagaucuuucucuacgcgcaagccucuggacgcauuacaguuuccaccaaaagaagccagcaggcuguggucccgaacaucggcucccggccccgcgugagaaauauuccuucucgggugagcaucuauuggacaaucgucaagcccggggacauucugcugaucaacuccaccggaaaucucauugccccucgcggcuacuucaaaaucagaagcgggaagucuuccauuaugcggagcgaugcucccaucggaaaguguaacucugccugcaucaccccgaauggcagcauuccuaacgacaaacccuuucagaauguuaaccgcaucacauacggcgcguguccuagauaugugaagcaaaauacgcugaaacuugccaccgggaugcggaacgugcccgaaaagcagacacgcggaauuuucggcgcuaucgccggguuuauugagaauggaugggaaggcauggucgacgggugguacggauucagacaccagaacuccgagggccggggccaagcugccgaucugaaaucuacccaggccgcuaucgaccagaucaaugggaagcucaacagacugauuggaaaaacaaacgagaaguuccaucagaucgaaaaggaguuuagcgaaguggagggccgcauucaagaucuugaaaaauauguugaggacaccaagaucgaucugugguccuacaaugcggagcuccugguggcccuggaaaaccagcacacgauugaccucacagauagcgagaugaauaaacuguucgaaaagaccaaaaagcagcuucgggagaacgcugaagacauggggaauggaugcuuuaagaucuaucauaaaugugauaacgccugcauuggcucuaucagaaaugggaccuacgaccacgaugucuaucgcgacgaggcccugaacaaucgguuccagaucaagggcguggagcucaaauccggauacaaggacuggauucuguggaucagcuuugcuauuucuugcuuccuucuguguguugcccuccugggcuuuaucaugugggcgugccaaaaagggaacauuagauguaauaucugcaucuga

SEQ ID NO: 202893 - RNA, 1701 nt, Artificial Sequence; identical to SEQ ID NO: 199854
  derived and/or modified CDS sequence (opt5) from hemagglutinin__InfluenzaA__AHC61175

SEQ ID NO: 202894 - RNA, 1701 nt, Artificial Sequence; identical to SEQ ID NO: 199054
  derived and/or modified CDS sequence (opt5) from hemagglutinin__InfluenzaA__AHC61187

SEQ ID NO: 202895 - RNA, 1701 nt, Artificial Sequence; identical to SEQ ID NO: 198927
  derived and/or modified CDS sequence (opt5) from hemagglutinin__InfluenzaA__AHC61199

SEQ ID NO: 202896 - RNA, 1701 nt, Artificial Sequence; identical to SEQ ID NO: 202690
  derived and/or modified CDS sequence (opt5) from hemagglutinin__InfluenzaA__AHC61211

SEQ ID NO: 202897 - RNA, 1701 nt, Artificial Sequence; identical to SEQ ID NO: 198927
  derived and/or modified CDS sequence (opt5) from hemagglutinin__InfluenzaA__AHC61223

SEQ ID NO: 202898 - RNA, 1701 nt, Artificial Sequence; identical to SEQ ID NO: 199054
  derived and/or modified CDS sequence (opt5) from hemagglutinin__InfluenzaA__AHC61235

SEQ ID NO: 202899 - RNA, 1701 nt, Artificial Sequence; identical to SEQ ID NO: 199854
  derived and/or modified CDS sequence (opt5) from hemagglutinin__InfluenzaA__AHC61247

SEQ ID NO: 202900 - RNA, 1701 nt, Artificial Sequence; identical to SEQ ID NO: 199854
  derived and/or modified CDS sequence (opt5) from hemagglutinin__InfluenzaA__AHC61259

SEQ ID NO: 202901 - RNA, 1701 nt, Artificial Sequence; identical to SEQ ID NO: 199054
  derived and/or modified CDS sequence (opt5) from hemagglutinin__InfluenzaA__AHC61271

SEQ ID NO: 202902 - RNA, 1701 nt, Artificial Sequence; identical to SEQ ID NO: 198927
  derived and/or modified CDS sequence (opt5) from hemagglutinin__InfluenzaA__AHC61283

SEQ ID NO: 202903 - RNA, 1701 nt, Artificial Sequence; identical to SEQ ID NO: 201146
  derived and/or modified CDS sequence (opt5) from hemagglutinin__InfluenzaA__AHC61295

SEQ ID NO: 202904 - RNA, 1701 nt, Artificial Sequence; identical to SEQ ID NO: 202758
  derived and/or modified CDS sequence (opt5) from hemagglutinin__InfluenzaA__AHC61307

SEQ ID NO: 202905 - RNA, 1701 nt, Artificial Sequence; identical to SEQ ID NO: 199054
  derived and/or modified CDS sequence (opt5) from hemagglutinin__InfluenzaA__AHC61319

SEQ ID NO: 202906 - RNA, 1701 nt, Artificial Sequence; identical to SEQ ID NO: 202690
  derived and/or modified CDS sequence (opt5) from hemagglutinin__InfluenzaA__AHC61331

SEQ ID NO: 202907 - RNA, 1701 nt, Artificial Sequence
  derived and/or modified CDS sequence (opt5) from hemagglutinin__InfluenzaA__AHC61343
augaagaccaucauugcccugagcuacauccucugccugguguucgcucagaaacuucccggcaacgacaauuccacagccacgcugugucucgggcaccaugcggucccuaacggaaccauuguuaagacaaucaccaaugaucaaauugaggugacaaacgcuaccgaacuggugcagucuagcuccacaggcgagaucugcaauucuccgcaccagauccuugacggggaaaacuguacccugauugaugcccuccugggagacccccagugcgauggcuuucaaaauaaaaagugggaccuguucgucgagagaagcaaagcccauuccaacuguuauccuuacgaugugcccgacuaugcuucucuccggagccugguugccuccagcgggacgcuugaauuuaauaacgagucuuucaauuggaccggagugacacagaacggcaccuccagcgcuugcauccgcggcucuaauaacuccuuuuucagcagacugaauuggcucacacaccugaacuuuaaguacccugcccuuaacgucaccaugcccaauaacgagcaguucgauaagcuguauauuuggggagugcaucacccugggacggacaaagaucagaucuuucucuacgcgcaagccucuggccggauuacaguuuccaccaagcgcagccagcaggcugugaucccgaauauuggguccagaccccggguccgcaacaucccuucuagaaucagcauuuauuggacaaucgugaaacccggagacauucugcugaucaauuccaccggcaaccucauugccccucggggguacuucaagauccgcagcggaaaaucuuccaucaugagaagcgaugcucccauuggcaaguguaauucugccugcaucaccccgaacggcagcauuccuaaugacaagcccuuucagaacgugaaucggaucacauacggggcguguccucgcuaugucaaacaaaacacgcugaaacuugccaccggaaugagaaauguucccgaaaaacagacacggggcauuuucggggcuaucgccggauuuaucgagaacggcugggaagggaugguggacggaugguacggcuuccgccaccaaaauuccgagggcagagggcaggcugccgaucugaagucuacccaggccgcuauugaccagaucaacggaaaacucaaccggcugauuggcaagacaaaugagaaauuccaucagaucgaaaaggaguuuagcgaaguggaggggcgcauucaagaucuugaaaaguaugucgaggacaccaaaaucgaucugugguccuacaacgcggagcuccugguggcccuggaaaaucagcacacgauugaccucacagauagcgagaugaacaagcuguucgaaaagaccaagaaacagcuuagagagaaugcugaagacaugggaaacggcugcuuuaagaucuaucauaagugugauaaugccugcaucgggucuauucggaacggcaccuacgaccacgauguuuauagagacgaggcccugaauaaccgcuuccagaucaaaggaguggagcucaaguccggcuacaaagacuggauucuguggaucagcuuugcuauuucuugcuuccuucugugugucgcccuccugggguuuaucaugugggcgugccaaaagggaaauauccgguguaacauuugcaucuga

SEQ ID NO: 202908 - RNA, 1701 nt, Artificial Sequence; identical to SEQ ID NO: 198927
  derived and/or modified CDS sequence (opt5) from hemagglutinin__InfluenzaA__AHC61355

SEQ ID NO: 202909 - RNA, 1701 nt, Artificial Sequence; identical to SEQ ID NO: 198927
  derived and/or modified CDS sequence (opt5) from hemagglutinin__InfluenzaA__AHC61367

SEQ ID NO: 202910 - RNA, 1701 nt, Artificial Sequence; identical to SEQ ID NO: 199054
  derived and/or modified CDS sequence (opt5) from hemagglutinin__InfluenzaA__AHC61379

SEQ ID NO: 202911 - RNA, 1701 nt, Artificial Sequence; identical to SEQ ID NO: 198927
  derived and/or modified CDS sequence (opt5) from hemagglutinin__InfluenzaA__AHC61391

SEQ ID NO: 202912 - RNA, 1701 nt, Artificial Sequence
  derived and/or modified CDS sequence (opt5) from hemagglutinin__InfluenzaA__AHC61403
augaagaccaucauugcccugagcuacauccucugccugguguucgcucagaaacuucccggcaacgacaauuccacagccacgcugugucucgggcaccaugcggucccuaacggaaccauuguuaagacaaucaccaaugaucaaauugaggugacaaacgcuaccgaacuggugcagucuagcuccacaggcgagaucugcaauucuccgcaccagauccuugacggggaaaacuguacccugauugaugcccuccugggagacccccagugcgauggcuuucaaaauaaaaagugggaccuguucgucgagagaagcaaagcccauuccaacuguuauccuuacgaugugcccgacuaugcuucucuccggagccugguugccuccagcgggacgcuugaauuuaauaacgagucuuucaauuggaccggagugacacagaacggcaccuccagcgcuugcauccgcagaucuaauaacuccuuuuucagccggcugaauuggcucacacaccugaacuuuaaguacccugcccuuaacgucaccaugcccaauaacgagcaguucgauaagcuguauauuuggggcgugcaucacccugggacggacaaagaucagaucuuucucuacgcgcaagccucuggacgcauuacaguuuccaccaagagaagccagcaggcugugaucccgaauauuggcucccggccccgcgucagaaacaucccuucucgggugagcaucuauuggacaauugugaaacccggggacauccugcugauuaauuccaccggaaaccucaucgccccucgcggcuacuucaagauuagaagcgggaaaucuuccaucaugcggagcgaugcucccaucggaaaguguaauucugccugcauuaccccgaacggcagcaucccuaaugacaagcccuuucagaacgucaaucgcauuacauacggcgcguguuccagauauguuaaacaaaacacgcugaaacuugccaccgggaugcggaaugugccugaaaaacagacacgcggaaucuucggcgcuauugccggguuuaucgagaacggaugggaaggcaugguggacgggugguacggauucagacaccagaauagcgagggccggggccaagcugccgaucugaagucuacccaggccgcuaucgaccagauuaacgggaaacucaacagacugaucggaaagacaaaugagaaauuccaucagauugaaaaggaguuuuccgaagucgagggccgcauccaagaucuugaaaaguauguggaggacaccaaaauugaucuguggagcuacaacgcggagcuccugguugcccuggaaaaucagcacacgaucgaccucacagauucugagaugaacaagcuguucgaaaagaccaagaaacagcuucgggagaaugcugaagacauggggaacggaugcuuuaagauuuaucauaagugugauaaugccugcaucggcuccaucagaaacgggaccuacgaccacgauguguaucgcgacgaggcccugaauaaccgguuccagauuaaaggcgucgagcucaagagcggauacaaagacuggauccuguggauuucuuuugcuaucuccugcuuccuucuguguguggcccuccugggcuuuauuaugugggcgugccaaaaggggaauaucagauguaacaucugcauuuga

SEQ ID NO: 202913 - RNA, 1701 nt, Artificial Sequence; identical to SEQ ID NO: 199054
  derived and/or modified CDS sequence (opt5) from hemagglutinin__InfluenzaA__AHC61415

SEQ ID NO: 202914 - RNA, 1701 nt, Artificial Sequence
  derived and/or modified CDS sequence (opt5) from hemagglutinin__InfluenzaA__AHC61427
augaagaccaucauugcccugagcuacauccucugccugguguucgcucagaaacuucccggcaacgacaauuccacagccacgcugugucucgggcaccaugcggucccuaacggaaccauuguuaagacaaucaccaaugaucaaauugaggugacaaacgcuaccgaacuggugcagucuagcuccacaggcgagaucugcaauucuccgcaccagauccuugacggggaaaacuguacccugauugaugcccuccugggagacccccagugcgauggcuuucaaaauaacaaaugggaccuguucgucgagagaagcaaggcccauuccaauuguuauccuuacgaugugcccgacuaugcuucucuccggagccugguugccuccagcgggacgcuugaauuuaacaaugagucuuucaacuggaccggagugacacagaauggcaccuccagcgcuugcauccgcagaucuaacaauuccuuuuucagccggcugaacuggcucacacaccugaacuuuaaauacccugcccuuaaugucaccaugcccaacaaugagcaguucgauaagcuguauauuuggggcgugcaucacccugggacggacaaggaucagaucuuucucuacgcgcaagccgcuggacgcauuacaguuucuaccaaaagaucccagcaggccgugaucccgaacauuggcagccggccccgcgucagaaauaucccuucccgggugucuaucuauuggacaauugugaagcccggggacauccugcugauuaacagcaccggaaaucucaucgcuccucgcggcuacuucaaaauuagauccggaaagagcucuaucauccgguccgaugcccccauugggaaauguaacagcgcgugcaucaccccgaauggcucuauuccuaacgacaagcccuuucagaaugucaaccgcaucacauacggcgccuguccuagauauguuaagcaaaauacgcugaaacuugcuaccgggaugcggaacgugcccgaaaagcagacacgcggaauuuucggcgccaucgcuggguuuaucgagaauggaugggaaggcaugguggacgggugguacggauucagacaccagaacagcgagggccggggccaagccgccgaucugaaauccacccaggcugcgauugaccagaucaacgggaagcucaauagacugauuggaaaaacaaacgagaaguuccaucagaucgaaaaagaguuuucugaagucgagggccgcauucaagaucuugaaaaguauguggaggacaccaagaucgaucuguggagcuacaaugccgagcuccugguugcucuggaaaaccagcacacgauugaccucacagauuccgagaugaauaaacuguucgaaaagaccaaaaagcagcuucgggagaacgccgaagacauggggaauggaugcuuuaaaaucuaucauaagugugauaacgccugcaucggcagcauuagaaaugggaccuacgaccacgauguguaucgcgacgaggcucugaacaaucgguuccagaucaagggcgucgagcucaaaucuggauacaaggacuggauucuguggaucuccuuugccauuagcugcuuccuucuguguguggcgcuccugggcuuuaucaugugggcuugccaaaaagggaacaucagauguaauauuugcaucuga

SEQ ID NO: 202915 - RNA, 1701 nt, Artificial Sequence
  derived and/or modified CDS sequence (opt5) from hemagglutinin__InfluenzaA__AHC61439
augaagaccaucauugcccugagcuacauccucugccugguguucgcucagaaacuucccggcaacgacaauuccacagccacgcugugucucgggcaccaugcggucccuaacggaaccauuguuaagacaaucaccaaugaucaaauugaggugacaaacgcuaccgaacuggugcagucuagcuccacaggcgagaucugcaauucuccgcaccagauccuugacggggaaaacuguacccugauugaugcccuccugggagacccccagugcgauggcuuucaaaauaaaaagugggaccuguucgucgagagaagcaaagcccauuccaacuguuauccuuacgaugugcccgacuaugcuucucuccggagccugguugccuccagcgggacgcuugaauuuaauaacgagucuuucaauuggaccggagugacacagaacggcaccuccagcgcuugcauccgcagaucuaauaacuccuuuuucagccggcugaauuggcucacacaccugaacuuuaaguacccugcccuuaacgucaccaugcccaauaacgagcaguucgauaagcuguauauuuggggcgugcaucacccugggacggacaaagaucagaucuuucucuacgcgcaagccgcuggacgcauuacaguuucuaccaagagaucccagcaggccgugaucccgaauauuggcagccggccccgcgucagaaacaucccuucccgggugucuaucuauuggacaauugugaaacccggggacauccugcugauuaauagcaccggaaaccucaucgcuccucgcggcuacuucaagauuagauccgggaaaagcucuaucaugcgguccgaugcccccaucggaaaguguaauucuaccugcauuacaccgaacggcagcaucccuaaugacaagcccuuucagaacgucaaucgcauuacguacggcgcguguccuagauauguuaaacaaaacacccugaaacuugccacagggaugcggaaugugcccgaaaaacagacccgcggaaucuucggcgcuauugccggguuuaucgagaacggaugggaaggcaugguggacgggugguacggauucagacaccagaauagcgagggccggggccaagcugccgaucugaaguccacacaggccgcuaucgaccagauuaacgggaaacucaacagacugaucggaaagaccaaugagaaauuccaucagauugaaaaggaguuuucugaagucgagggccgcauccaagaucuugaaaaguauguggaggacacgaaaauugaucuguggagcuacaacgcggagcuccugguugcccuggaaaaucagcacacaaucgaccucaccgauuccgagaugaacaagcuguucgaaaagaccaagaaacagcuucgggagaaugcugaagacauggggaacggaugcuuuaagauuuaucauaagugugauaaugccugcaucggcagcaucagaaacgggacauacgaccacgauguguaucgcgacgaggcccugaauaaccgguuccagauuaaaggcgucgagcucaagucuggauacaaagacuggauccuguggauuuccuuugcuaucagcugcuuccuucuguguguggcccuccugggcuuuauuaugugggcgugccaaaaggggaauaucagauguaacaucugcauuuga

SEQ ID NO: 202916 - RNA, 1701 nt, Artificial Sequence; identical to SEQ ID NO: 198927
  derived and/or modified CDS sequence (opt5) from hemagglutinin__InfluenzaA__AHC61451

SEQ ID NO: 202917 - RNA, 1701 nt, Artificial Sequence; identical to SEQ ID NO: 198927
  derived and/or modified CDS sequence (opt5) from hemagglutinin__InfluenzaA__AHC61463

SEQ ID NO: 202918 - RNA, 1701 nt, Artificial Sequence; identical to SEQ ID NO: 199854
  derived and/or modified CDS sequence (opt5) from hemagglutinin__InfluenzaA__AHC61475

SEQ ID NO: 202919 - RNA, 1701 nt, Artificial Sequence; identical to SEQ ID NO: 199054
  derived and/or modified CDS sequence (opt5) from hemagglutinin__InfluenzaA__AHC61487

SEQ ID NO: 202920 - RNA, 1701 nt, Artificial Sequence; identical to SEQ ID NO: 199854
  derived and/or modified CDS sequence (opt5) from hemagglutinin__InfluenzaA__AHC61499

SEQ ID NO: 202921 - RNA, 1701 nt, Artificial Sequence; identical to SEQ ID NO: 198927
  derived and/or modified CDS sequence (opt5) from hemagglutinin__InfluenzaA__AHC61511

SEQ ID NO: 202922 - RNA, 1701 nt, Artificial Sequence; identical to SEQ ID NO: 201146
  derived and/or modified CDS sequence (opt5) from hemagglutinin__InfluenzaA__AHC61523

SEQ ID NO: 202923 - RNA, 1701 nt, Artificial Sequence
  derived and/or modified CDS sequence (opt5) from hemagglutinin__InfluenzaA__AHC61535
augaagaccaucauugcccugagcuacauccucugccugguguucgcucagaaacuucccggcaacgacaauuccacagccacgcugugucucgggcaccaugcggucccuaacggaaccauuguuaagacaaucaccaaugaucaaauugaggugacaaacgcuaccgaacuggugcagucuagcuccacaggcgagaucugcaauucuccgcaccagauccuugacggggaaaacuguacccugauugaugcccuccugggagacccccagugcgauggcuuucaaaauaaaaagugggaccuguucgucgagagaagcaaagcccauuccaacuguuauccuuacgaugugcccgacuaugcuucucuccggagccugguugccuccagcgggacgcuugaauuuaauaacgagucuuucaauuggaccggagugacacagaacggcaccuccagcgcuugcauccgcagaucuaauaacuccuuuuucagccggcugaauuggcucacacaccugaacuuuaaguacccugcccuuaacgucaccaugcccaauaacgagcaguucgauaagcuguauauuuggggcgugcaucacccugggacggacaaagaucagaucuuucucuacgcgcaagccucuggacgcauuacaguuuccaccaagagaagccagcaggcugugaucccgaauauuggcucccggccccgcgucagaaacaucccuucucgggugagcaucuauuggacaauugugaaacccggggacauccugcugauuaauuccaccggaaaccucaucgccccucgcggcuacuucaagauuagaagcgggaaaucuuccaucaugcggagcgaugcucccaucggaaaguguaauucugccugcauuaccccgaacggcagcaucccuaaugacaagcccuuucagaacgucaaucgcauuacauacggcgcguguccuagauauguuaaacaaaacacgcugaaacuugccaccgggaugcggaaugugcccgaaaaacagacacgcggaaucuucggcgcuauugccggguuuaucgagaacggaugggaaggcaugguggacgggugguacggauucagacaccaaaauuccgagggccggggccaggcugccgaucugaagucuacccaggccgcuaucgaccagauuaacgggaaacucaacagacugaucggaaagacaaaugagaaauuccaucagauugaaaaggaguuuagcgaagucgagggccgcauccaagaucuugaaaaguauguggaggacaccaaaauugaucugugguccuacaacgcggagcuccugguugcccuggaaaaucagcacacgaucgaccucacagauagcgagaugaccaagcuguucgaaaagaccaagaaacagcuucgggagaacgcugaagacauggggaauggaugcuuuaagauuuaucauaagugugauaacgccugcaucggcucuaucagaaaugggacauacgaccacgauguguaucgcgacgaggcccugaacaaucgguuccagauuaaaggcgucgagcucaaguccggauacaaagacuggauccuguggauuagcuuugcuaucucuugcuuccuucuguguguggcccuccugggcuuuauuaugugggcgugccaaaaggggaacaucagauguaauaucugcauuuga

SEQ ID NO: 202924 - RNA, 1701 nt, Artificial Sequence; identical to SEQ ID NO: 198927
  derived and/or modified CDS sequence (opt5) from hemagglutinin__InfluenzaA__AHC61547

SEQ ID NO: 202925 - RNA, 1701 nt, Artificial Sequence
  derived and/or modified CDS sequence (opt5) from hemagglutinin__InfluenzaA__AHC61559
augaagaccaucauugcccugagcuacauccucugccugguguucgcucagaaacuucccggcaacgacaauuccacagccacgcugugucucgggcaccaugcggucccuaacggaaccauuguuaagacaaucaccaaugaucaaauugaggugacaaacgcuaccgaacuggugcaaaauucuagcacaggcgagaucugcgacuccccgcaccagaucauugauggggaaaacuguacccuuaucgacgcccugcucggagauccccagugcgacggcuuucagaauaaaaagugggaucuguucgucgagagaucuaaagccuauagcaacuguuacccuuaugacgugcccgauuacgcuucccugcggucucucguugccagcuccgggacgcuggaauuuaauaacgagagcuucaauuggaccggagugacacagaacggcaccucuuccgcuugcauucgcagaagcaauaacucuuucuucucccggcuuaauuggcugacacaucucaacuuuaaguauccugcccugaacgucaccaugcccaauaacgagcaguucgacaaacuuuacaucuggggcgugcaccauccugggacggauaaggaccagauuuuucuguaugcgcaagccagcggacgcaucacaguuucuaccaagagaucccagcaggcugugauuccgaauaucggcagccggccccgcgucagaaacaucccuucccggauuucuaucuacuggacaauugugaaacccggggauauccuccugauuaauagcaccggaaaccugaucgccccucgcggcuacuucaagaucagauccgggaaaagcucuauuaugcgguccgacgcucccaucggaaaguguaauagcgaaugcauuaccccgaacggcucuaucccuaaugacaagcccuuucagaacgugaaucgcauuacauauggcgccuguccuagauacgucaaacaaaacacgcucaagcuggcgaccgggaugcggaauguucccgagaaacagacacgcggaaucuucggcgccaucgcuggguuuauugaaaacggaugggagggcaugguggaugggugguauggauucagacaccagaauagcgagggccggggccaagccgcugaccuuaaguccacccaggccgccaucgaucagauuaacgggaaacugaacagacucauccgcaagacaaaugaaaaauuccaccagauugagaaggaauuuucugagguggaaggacggauccaagaccuggagaaguacgucgaggauaccaaaauugaccuuuggagcuauaacgcugaacugcucguggcgcuggagaaucagcauacgaucgaucugacagacuccgaaaugaacaagcucuuugagaaaaccaagaaacagcugagagaaaaugccgaggauaugggcaacgggugcuuuaagaucuaccacaagugugacaaugcuugcauuggaagcauccgcaacggcaccuaugaucaugacguuuaccgggacgaggcccuuaauaacagauuccagauuaaagggguggaacugaagucuggccacaaagauuggauccucuggauuuccuuugccaucagcugcuuccugcuuugugucgcucugcucggauuuaucaugugggccugccaaaagggcaauauucgcuguaacaucugcauuuga

SEQ ID NO: 202926 - RNA, 1701 nt, Artificial Sequence; identical to SEQ ID NO: 201146
  derived and/or modified CDS sequence (opt5) from hemagglutinin__InfluenzaA__AHC61571

SEQ ID NO: 202927 - RNA, 1701 nt, Artificial Sequence; identical to SEQ ID NO: 198927
  derived and/or modified CDS sequence (opt5) from hemagglutinin__InfluenzaA__AHC61583

SEQ ID NO: 202928 - RNA, 1701 nt, Artificial Sequence; identical to SEQ ID NO: 201146
  derived and/or modified CDS sequence (opt5) from hemagglutinin__InfluenzaA__AHC61595

SEQ ID NO: 202929 - RNA, 1701 nt, Artificial Sequence
  derived and/or modified CDS sequence (opt5) from hemagglutinin__InfluenzaA__AHC61607
augaagaccaucauugcccugagcuacauccucugccugguguucgcucagaaacuucccggcaacgacaauuccacagccacgcugugucucgggcaccaugcggucccuaacggaaccauuguuaagacaaucaccaaugaucaaauugaggugacaaacgcuaccgaacuggugcaaaauucuagcacaggcgagaucugcgacuccccgcaccagauccuugauggggaaaacuguacccugauugacgcccuccugggagauccccagugcgacggcuuucagaauaaaaagugggaucuguucgucgagagaucuaaagccuauagcaacuguuacccuuaugacgugcccgauuacgcuucccuccggucucugguugccagcuccgggacgcuugaauuuaauaacgagagcuucaauuggaccggagugacacagaacggcaccucuuccgcuugcauccgcagaagcaauaacuccuuuuucucucggcugaauuggcucacacaucugaacuuuaaguauccugcccuuaacgucaccaugcccaauaacgagcaguucgacaagcuguacauuuggggcgugcaccauccugggacggauaaagaccagaucuuucucuaugcgcaagccagcggacgcauuacaguuucuaccaagagaucccagcaggcugugaucccgaauauuggcagccggccccgcgucagaaacaucccuucccggaucucuauuuacuggacaaucgugaaacccggggauauucugcugaucaauagcaccggaaaccucauugccccucgcggcuacuucaagaucagauccgggaaaagcucuaucaugcgguccgacgcucccauuggaaaguguaauagcgaaugcaucaccccgaacggcucuauuccuaaugacaagcccuuucagaacgugaaucgcaucacauauggcgccuguccuagauacgucaaacaacacacgcugaaacuugcgaccgggaugcggaacguucccgagaagcagacacgcggaauuuucggcgccaucgcuggguuuaucgaaaauggaugggagggcaugguggaugggugguauggauucagacaccagaacagcgagggccggggccaagccgcugaccugaaguccacccaggccgccauugaucagaucaaugggaaacucaacagacugauuggaaagacaaacgaaaaauuccaucagaucgagaaggaauuuucugagguggaaggccgcauucaagaccuugagaaguacgucgaggauaccaaaaucgaccuguggagcuauaaugcugaacuccugguggcgcuggagaaccagcacacgauugaucucacagacuccgaaaugaauaagcuguucgagaaaaccaagaaacagcuucgggaaaacgccgaggauauggggaauggaugcuuuaagaucuaccauaagugugacaacgcuugcaucggcagcauuagaaaugggaccuaugaucacgacguuuaccgcgacgaggcccugaacaaucgguuccagaucaaaggcguggaacucaagucuggauacaaagauuggauucuguggaucuccuuugccauuagcugcuuccuucugugugucgcucuccugggcuuuaucaugugggccugccaaaaggggaacaucagauguaauauuugcaucuga

SEQ ID NO: 202930 - RNA, 1701 nt, Artificial Sequence; identical to SEQ ID NO: 201146
  derived and/or modified CDS sequence (opt5) from hemagglutinin__InfluenzaA__AHC61619

SEQ ID NO: 202931 - RNA, 1701 nt, Artificial Sequence
  derived and/or modified CDS sequence (opt5) from hemagglutinin__InfluenzaA__AHC61631
augaagaccaucauugcccugagcuacauccucugccugguguucgcucagaaacuucccggcaacgacaauuccacagccacgcugugucucgggcaccaugcggucccuaacggaaccauuguuaagacaaucaccaaugaucaaauugaggugacaaacgcuaccgaacuggugcagucuagcuccacaggcgagaucugcaauucuccgcaccagauccuugacggggaaaacuguaccauuaucgaugcccugcucggagacccccagugcgauggcuuucaaaauaaaaagugggaccuguucgucgagagaagcaaagcccauuccaacuguuauccuuacgaugugcccgacuaugcuucucugcggagccucguugccuccagcgggacgcuggaauuuaauaacgagucuuucaauuggaccggagugacacagaacggcaccuccagcgcuugcauucgcagaucuaauaacuccuuuuucagccggcuuaauuggcugacacaccucaacuuuaaguacccugcccugaacgucaccaugcccaauaacgagcaguucgauaaacuuuauaucuggggcgugcaucacccugggacggacaaagaucagauuuuucuguacgcgcaagccgcuggacgcaucacaguuucuaccaagagaucccagcaggccgugauuccgaauaucggcagccggccccgcgucagaaacaucccuucccgggugucuauuuauuggacaaucgugaaacccggggacauucuccugaucaauagcaccggaaaccugauugcuccucgcggcuacuucaagaucagauccgggaaaagcucuaucaugcgguccgaugcccccauuggaaaguguaauagcgcgugcaucaccccgaacggcucuauuccuaaugacaagcccuuucagaacgucaaucgcaucacauacggcgccuguccuagauauguuaaacaaaacacgcucaagcuggcuaccgggaugcggaaugugcccgaaaaacagacacgcggaauuuucggcgccaucgcuggguuuaucgagaacggaugggaaggcaugguggacgggugguacggauucagacaccagaauagcgagggccggggccaagccgccgaucuuaaguccacccaggcugcgauugaccagaucaacgggaaacugaacagacucauuggaaagacaaaugagaaauuccaucagaucgaaaaggaguuuucugaagucgagggccgcauucaagaucuggaaaaguauguggaggacaccaaaaucgaucuuuggagcuacaacgccgagcugcucguugcucuggaaaaucagcacacgauugaccugacagauuccgagaugaacaaacucuucgaaaagaccaagaagcagcugcgggagaaugccgaagacauggggaacggaugcuuuaagaucuaucauaagugugauaaugccugcaucggcagcauuagaaacgggaccuacgaccacgauguguaucgcgacgaggcucuuaauaaccgguuccagaucaaaggcgucgagcugaagucuggauacaaagacuggauucucuggaucuccuuugccauuagcugcuuccugcuuuguguggcgcugcucggcuuuaucaugugggcuugccaaaaggggaauaucagauguaacauuugcaucuga

SEQ ID NO: 202932 - RNA, 1701 nt, Artificial Sequence
  derived and/or modified CDS sequence (opt5) from hemagglutinin__InfluenzaA__AHC61643
augaagaccaucauugcccugagcuacgugcucugccuggucuucgcucagaaacuucccggcaacgacaauuccacagccacgcugugucucgggcaccaugcgguuccuaacggaaccaucgugaagacaauuaccaaugaucaaaucgaggugacaaacgcuaccgaacugguccagucuagcuccacaggcgagauuugcaauucuccgcaccagauccuugacggggaaaacuguacccugaucgaugcccuccugggagacccccagugcgauggcuuucaaaauaaaaagugggaccuguucguggagagaagcaaagcccauuccaacuguuauccuuacgauguucccgacuaugcuucucuccggagccugguggccuccagcgggacgcuugaauuuaauaacgagucuuucaauuggaccggagucacacagaacggcaccuccagcgcuugcauucgcagaucuaauaacuccuuuuucagccggcugaauuggcucacacaccugaacuuuaaguacccugcccuuaacgugaccaugcccaauaacgagcaguucgauaagcuguauaucuggggcguucaucacccugggacggacaaagaucagauuuuucucuacgcgcaagccgcuggacgcaucacagugucuaccaagagaucccagcaggccgucauuccgaauaucggcagccggccccgcgugagaaacauuccuucccgggugucuaucuauuggacaaucgucaaacccggggacauucugcugaucaauagcaccggaaaccucauugcuccucgcggcuacuucaagaucagauccgggaaaagcucuauuaugcgguccgaugcccccaucggaaaguguaauagcgcgugcaucaccccgaacggcucuauuccuaaugacaagcccuuucagaacguuaaucgcaucacauacggcgccuguccuagauaugugaaacaaaacacgcugaaacuugcuaccgggaugcggaaugugcccgaaaaacagacacgcggaauuuucggcgccaucgcuggguuuauugagaacggaugggaaggcauggucgacgggugguacggauucagacaccagaauagcgagggccggggccaagccgccgaucugaaguccacccaggcugcgaucgaccagaucaacgggaaacucaacagacugauuggaaagacaaaugagaaauuccaucagaucgaaaaggaguuuucugaaguggagggccgcauucaagaucuugaaaaguauguugaggacaccaaaaucgaucuguggagcuacaacgccgagcuccugguggcucuggaaaaucagcacacgauugaccucacagauuccgagaugaacaagcuguucgaaaagaccaagaaacagcuucgggagaaugccgaagacauggggaacggaugcuuuaagaucuaucauaagugugauaaugccugcauuggcagcaucagaaacgggaccuacgaccacgaugucuaucgcgacgaggcucugaauaaccgguuccagaucaaaggcguggagcucaagucuggauacaaagacuggauucuguggaucuccuuugccauuagcugcuuccuucuguguguugcgcuccugggcuuuaucaugugggcuugccaaaaggggaauauuagauguaacaucugcaucuga

SEQ ID NO: 202933 - RNA, 1701 nt, Artificial Sequence
  derived and/or modified CDS sequence (opt5) from hemagglutinin__InfluenzaA__AHC61655
augaagaccaucauugcccugagcuacauccucugccugguguucacacagaaacuucccggcaacgacaauuccacggcuacccugugucucgggcaccaugccgucccuaacggaacaauuguuaagaccaucacaaaugaucaaauugaggugaccaacgcgacagaacuggugcagucuagcuccaccggcgagaucugcaauucuccgcaccagauccuugacggggaaaacuguacgcugauugaugcucuccugggagacccccagugcgauggcuuucaaaauaacaaaugggaccuguucgucgagagaagcaaggcccauuccaauuguuauccuuacgaugugcccgacuaugccucucuccggagccugguugcuuccagcgggacccuugaauuuaacaaugagucuuucaacuggacaggagugacccagaauggcacauccagcgccugcauccgcagaucuaacaauuccuuuuucagccggcugaacuggcucacccaccugaacuuuaaauacccugcucuuaaugucacgaugcccaacaaugagcaguucgauaagcuguauauuuggggcgugcaucacccugggacagacaaggaucagaucuuucucuacgcccaagcggccggacgcauuaccguuucuacaaaaagaucccagcaggcugugaucccgaacauuggcagccggccccgcgucagaaauaucccuucccgggugucuaucuauuggaccauugugaagcccggggacauccugcugauuaacagcaccggaaaucucaucgccccucgcggcuacuucaaaauuagauccggaaagagcucuaucauccgguccgaugcucccauugggaaauguaacagcgccugcaucacaccgaauggcucuauuccuaacgacaagcccuuucagaaugucaaccgcaucacguacggcgcguguccuagauauguuaagcaaaauacccugaaacuugccacagggaugcggaacgugcccgaaaagcagacccgcggaauuuucggcgcuaucgccggguuuaucgagaauggaugggaaggcaugguggacgggugguacggauucagacaccagaacagcgagggccggggccaagcugccgaucugaaauccacacaggccgcuauugaccagaucaacgggaagcucaauagacugauuggaaaaaccaacgagaaguuccaucagaucgaaaaagaguuuucugaagucgagggccgcauucaagaucuugaaaaguauguggaggacacgaagaucgaucuguggagcuacaaugcggagcuccugguugcccuggaaaaccagcacacaauugaccucaccgauuccgagaugaauaaacuguucgaaaagaccaaaaagcagcuucgggagaacgcugaagacauggggaauggaugcuuuaaaaucuaucauaagugugauaacgccugcaucggcagcauuagaaaugggacauacgaccacgauguguaucgcgacgaggcccugaacaaucgguuccagaucaagggcgucgagcucaaaucuggauacaaggacuggauucuguggaucuccuuugcuauuagcugcuuccuucuguguguggcccuccugggcuuuaucaugugggcgugccaaaaagggaacaucagauguaauauuugcaucuga

SEQ ID NO: 202934 - RNA, 1701 nt, Artificial Sequence
  derived and/or modified CDS sequence (opt5) from hemagglutinin__InfluenzaA__AHC61667
augaagaccaucauugcccugagcuacauccucugccugguguucgcucagaaacuucccggcaacgacaauuccacagccacgcugugucucgggcaccaugcggucccuaacggaaccauuguuaagacaaucaccaaugaucaaauugaggugacaaacgcuaccgaacuggugcagucuagcuccacaggcgagaucugcgacucuccgcaccagauccuugauggggaaaauuguacccugauugacgcccuccugggagauccccagugcgacggcuuucaaaacaaaaagugggaucuguucgucgagagaagcaaagccuauuccaauuguuacccuuaugacgugcccgauuacgcuucucuccggagccugguugccuccagcgggacgcuugaauuuaacaaugagucuuucaacuggaccggagugacacagaauggcaccuccagcgcuugcauccgcagaucuaacaauuccuuuuucagccggcugaacuggcucacacaucugaauuuuaaguauccugcccuuaacgucaccaugcccaacaaugagcaguucgacaagcuguacauuuggggcgugcaccauccugggacggauaaagaccagaucuuucucuaugcgcaaucuuccggacgcauuacaguuagcaccaagagaucccagcaggccgugaucccgaacauuggcucucggccccgcaucagaaauaucccuagccggauuuccaucuacuggacaauugucaaacccggggauauccugcugauuaacagcaccggaaaucucaucgcuccucgcggcuacuucaagaucagaucugggaaauccagcauuaugcggucugacgcccccaucggaaaguguaacagcgaaugcauuaccccgaauggcuccaucccuaacgacaagcccuuucagaaugugaaccgcauuacauauggcgcuuguccuagauacgugaaacaaucuacgcugaaacuugccaccgggaugcggaauguccccgagaagcagacacgcggaaucuucggcgcgaucgccggguuuauugaaaacggaugggagggcaugguugaugggugguauggauucagacaccagaauagcgagggccggggccaagcugccgaccugaaguccacccaggcugccaucgaucagauuaacgggaaacucaauagacugaucggaaagacaaacgaaaaauuccaccagauugagaaggaauuuagcgagguggaaggccgcauccaagaccuugagaaguacguggaggauaccaaaauugaccuguggucuuauaacgccgaacuccuggucgcucuggagaaucagcauacgaucgaucucacagacuccgaaaugaacaagcuguucgagaaaaccaagaaacagcuucgggaaaaugcggaggauauggggaacggaugcuuuaagaucuaccacaagugugacaaugccugcauuggcagcaucagaaacgggaccuauaaucaugauguguaccgcgacgaggcucugaacaaucgguuccagauuaaaggcguugaacucaagucuggauacaaagacuggauccuguggauuuccuuugccaucagcugcuuccuucuguguguggcccuccugggcuuuaucaugugggcuugccaaaaggggaacauuagauguaauaucugcauuuga

SEQ ID NO: 202935 - RNA, 1701 nt, Artificial Sequence; identical to SEQ ID NO: 202690
  derived and/or modified CDS sequence (opt5) from hemagglutinin__InfluenzaA__AHC61679

SEQ ID NO: 202936 - RNA, 1701 nt, Artificial Sequence; identical to SEQ ID NO: 201146
  derived and/or modified CDS sequence (opt5) from hemagglutinin__InfluenzaA__AHC61691

SEQ ID NO: 202937 - RNA, 1701 nt, Artificial Sequence; identical to SEQ ID NO: 198927
  derived and/or modified CDS sequence (opt5) from hemagglutinin__InfluenzaA__AHC61703

SEQ ID NO: 202938 - RNA, 1701 nt, Artificial Sequence; identical to SEQ ID NO: 202723
  derived and/or modified CDS sequence (opt5) from hemagglutinin__InfluenzaA__AHC61715

SEQ ID NO: 202939 - RNA, 1701 nt, Artificial Sequence; identical to SEQ ID NO: 199854
  derived and/or modified CDS sequence (opt5) from hemagglutinin__InfluenzaA__AHC61727

SEQ ID NO: 202940 - RNA, 1701 nt, Artificial Sequence; identical to SEQ ID NO: 198927
  derived and/or modified CDS sequence (opt5) from hemagglutinin__InfluenzaA__AHC61739

SEQ ID NO: 202941 - RNA, 1701 nt, Artificial Sequence
  derived and/or modified CDS sequence (opt5) from hemagglutinin__InfluenzaA__AHC61751
augaagaccaucauugcccugagcuacauccucugccugguguucgcucagaaacuucccggcaacgacaauuccacagccacgcugugucucgggcaccaugcggucccuaacggaaccauuguuaagacaaucaccaaugaucaaauugaggugacaaacgcuaccgaacuggugcaaaauucuagcacaggcgagaucugcgacuccccgcaccagauccuugauggggaaaacuguacccugauugacgcccuccugggagauccccagugcgacggcuuucagaauaaaaagugggaucuguucgucgagagaucuaaagccuauagcaacuguuacccuuaugacgugcccgauuacgcuucccuccggucucugguugccagcuccgggacgcuugaauuuaauaacgagagcuucaauuggaccggagugacacagaacggcaccucuuccgcuugcauccgcagaagcaauaacuccuuuuucucucggcugaauuggcucacacaucugaacuuuaaguauccugcccuuaacgucaccaugcccaauaacgagcaguucgacaagcuguacauuuggggcgugcaccauccugggacggauaaagaccagaucuuucucuaugcgcaagccagcggacgcauuacaguuucuaccaagagaucccagcaggcugugaucccgaaugucggcagccggccccgcgugagaaacauuccuucccggaucucuaucuacuggacaauugugaaacccggggauauccugcugauuaauagcaccggaaaccucaucgccccucgcggcuacuucaagauuagauccgggaaaagcucuaucaugcgguccgacgcucccaucggaaaguguaauagcgaaugcauuaccccgaacggcucuaucccuaaugacaagcccuuucagaacgucaaucgcauuacauauggcgccuguccuagauacguuaaacaaaacacgcugaaacuugcgaccgggaugcggaaugugcccgagaagcagacacgcggaaucuucggcgccauugcuggguuuaucgaaaacggaugggagggcaugguggaugggugguauggauucagacaccagaauagcgagggccggggccaagccgcugaccugaaguccacccaggccgccaucgaucagauuaacgggaaacucaacagacugaucggaaagacaaaugaaaaauuccaccagauugagaaggaauuuucugaggucgaaggccgcauccaagaccuugagaaguacguggaggauaccaaaauugaccuguggagcuauaacgcugaacuccugguugcgcuggagaaucagcauacgaucgaucucacagacuccgaaaugaacaagcuguucgagaaaaccaagaaacagcuucgggaaaaugccgaggauauggggaacggaugcuuuaagauuuaccacaagugugacaaugcuugcaucggcagcaucagaaacgggaccuaugaucaugacguguaccgcgacgaggcccugaauaaccgguuccagauuaaaggcgucgaacucaagucuggauacaaagauuggauccuguggauuuccuuugccaucagcugcuuccuucuguguguggcucuccugggcuuuauuaugugggccugccaaaaggggaauaucagauguaacaucugcauuuga

SEQ ID NO: 202942 - RNA, 1701 nt, Artificial Sequence
  derived and/or modified CDS sequence (opt5) from hemagglutinin__InfluenzaA__AHC61763
augaagaccaucauugcccugagcuacauccucugccugguguucgcucagaaacuucccggcaacgacaauuccacagccacgcugugucucgggcaccaugcggucccuaacggaaccauuguuaagacaaucaccaaugaucaaauugaggugacaaacgcuaccgaacuggugcagucuagcuccacaggcgagaucugcaauucuccgcaccagauccuugacggggaaaacuguacccugauugaugcccuccugggagacccccagugcgauggcuuucaaaauaaaaagugggaccuguucgucgagagaagcaaagcccauuccaacuguuauccuuacgaugugcccgacuaugcuucucuccggagccugguugccuccagcgggacgcuugaauuuaauaacgagucuuucaauuggaccggagugacacagaacggcaccuccagcgcuugcauccgcagaucuaauaacuccuuuuucagccggcugaauuggcucacacaccugaacuuuaaguacccugcccuuaacgucaccaugcccaauaacgagcaguucgauaagcuguauauuuggggcgugcaucacccugggacggacaaagaucagaucuuucucuacgcgcaagccgcuggacgcauuacaguuucuaccaagagaucccagcagacagugaucccgaauauuggcagccggccccgcgucagaaacaucccuucccgggugucuaucuauuggaccauugugaaacccggggacauccugcugauuaauagcaccggaaaccucaucgccccucgcggcuacuucaagauuagauccgggaaaagcucuaucaugcgguccgaugcucccaucggaaaguguaauagcgccugcauuacaccgaacggcucuaucccuaaugacaagcccuuucagaacgucaaucgcauuacguacggcgcguguccuagauauguuaaacaaaacacccugaaacuugccacagggaugcggaaugugcccgaaaaacagacccgcggaaucuucggcgcuauugccggguuuaucgagaacggaugggaaggcaugguggacgggugguacggauucagacaccagaauagcgagggccggggccaagcugccgaucugaaguccacacaggccgcuaucgaccagauuaacgggaaacucaacagacugaucggaaagaccaaugagaaauuccaucagauugaaaaggaguuuucugaagucgagggccgcauccaagaucuugaaaaguauguggaggacacgaaaauugaucuguggagcuacaacgcggagcuccugguugcccuggaaaaucagcacacaaucgaccucaccgauuccgagaugaacaagcuguucgaaaagaccaagaaacagcuucgggagaaugcugaagacauggggaacggaugcuuuaagauuuaucauaagugugauaaugccugcaucggcagcaucagaaacgggacauacgaccacgauguguaucgcgacgaggcccugaauaaccgguuccagauuaaaggcgucgagcucaagucuggauacaaagacuggauccuguggauuuccuuugcuaucagcugcuuccuucuguguguggcccuccugggcuuuauuaugugggcgugccaaaaggggaauaucagauguaacaucugcauuuga

SEQ ID NO: 202943 - RNA, 1701 nt, Artificial Sequence; identical to SEQ ID NO: 199054
  derived and/or modified CDS sequence (opt5) from hemagglutinin__InfluenzaA__AHC61775

SEQ ID NO: 202944 - RNA, 1701 nt, Artificial Sequence; identical to SEQ ID NO: 199854
  derived and/or modified CDS sequence (opt5) from hemagglutinin__InfluenzaA__AHC61787

SEQ ID NO: 202945 - RNA, 1701 nt, Artificial Sequence; identical to SEQ ID NO: 202690
  derived and/or modified CDS sequence (opt5) from hemagglutinin__InfluenzaA__AHC61799

SEQ ID NO: 202946 - RNA, 1701 nt, Artificial Sequence
  derived and/or modified CDS sequence (opt5) from hemagglutinin__InfluenzaA__AHC61823
augaagaccaucauugcccugagcuacauccucugccugguguucgcucagaaacuucccggcaacgacaauuccacagccacgcugugucucgggcaccaugcggucccuaacggaaccauuguuaagacaaucaccaaugaucaaauugaggugacaaacgcuaccgaacuggugcagucuagcuccacaggcgagaucugcgacucuccgcaccagauccuugauggggaaaauuguacccugauugacgcccuccugggagauccccagugcgacggcuuucaaaacaaaaagugggaucuguucgucgagagaagcaaagccuauuccaauuguuacccuuaugacgugcccgauuacgcuucucuccggagccugguugccuccagcgggacgcuugaauuuaacaaugagucuuucaacuggaccggagugacacagaauggcaccuccagcgcuugcauccgcagaucuaacuccagcuuuuucucucggcugaauuggcucacacaucugaacuuuaaguauccugcccuuaaugucaccaugcccaacaacgagcaguucgacaagcuguacauuuggggcgugcaccauccugggacggauaaagaccagaucuuucucuaugcgcaauccagcggacgcauuacaguuuccaccaagagaucucagcaggccgugaucccgaauauuggcagccggccccgcaucagaaacaucccuucccggauuagcaucuacuggacaauugucaaacccggggauauccugcugauuaauucuaccggaaaccucaucgcuccucgcggcuacuucaagaucagauccgggaaaagcucuauuaugaaaagcgacgcccccaucgacaaguguaauuccgaaugcauuaccccgaacggaucuaucccuaaugauaagcccuuucagaacgugaaucggauuacauauggcgcuuguccucgcuacgugaagcaaagcacgcugaaacuugccaccggcaugagaaacguccccgagaagcagacacgggggaucuucggagcgaucgccggcuuuauugaaaaugggugggagggaaugguugacggcugguauggguuccgccaccagaacuccgagggaagaggccaagcugccgaucugaaaagcacccaggcugccaucgaccagauuaauggcaagcucaaccggcugaucgggaaaacaaaugaaaaguuccaccagauugagaaggaauuuucugagguggaaggaagaauccaagaucuugagaaauacguggaggacaccaagauugaucugugguccuauaacgccgaacuccuggucgcucuggagaaccagcauacgaucgaccucacagauagcgaaaugaauaaacuguucgagaagaccaaaaagcagcuucgcgaaaacgcggaggacaugggcaaugggugcuuuaagaucuaccacaaaugugauaacgccugcauuggaucuauccggaauggcaccuauaaccaugacguguacagagacgaggcucugaauaaccgcuuccagauuaaggggguugaacucaaauccggcuacaaggauuggauccuguggauuagcuuugccaucuccugcuuccuucuguguguggcccuccugggauuuaucaugugggcuugccaaaaaggcaauauucgguguaacaucugcauuuga

SEQ ID NO: 202947 - RNA, 1701 nt, Artificial Sequence; identical to SEQ ID NO: 199854
  derived and/or modified CDS sequence (opt5) from hemagglutinin__InfluenzaA__AHC61835

SEQ ID NO: 202948 - RNA, 1701 nt, Artificial Sequence; identical to SEQ ID NO: 199054
  derived and/or modified CDS sequence (opt5) from hemagglutinin__InfluenzaA__AHC61847

SEQ ID NO: 202949 - RNA, 1701 nt, Artificial Sequence; identical to SEQ ID NO: 198927
  derived and/or modified CDS sequence (opt5) from hemagglutinin__InfluenzaA__AHC61859

SEQ ID NO: 202950 - RNA, 1701 nt, Artificial Sequence; identical to SEQ ID NO: 199854
  derived and/or modified CDS sequence (opt5) from hemagglutinin__InfluenzaA__AHC61871

SEQ ID NO: 202951 - RNA, 1701 nt, Artificial Sequence
  derived and/or modified CDS sequence (opt5) from hemagglutinin__InfluenzaA__AHC61883
augaagaccaucauugcccugagcuacauccucugccugguguucgcucagaaacuucccggcaacgacaauuccacagccacgcugugucucgggcaccaugcggucccuaacggaaccauuguuaagacaaucaccaaugaucaaauugaggugacaaacgcuaccgaacuggugcagucuagcuccacaggcgagaucugcgacucuccgcaccagauccuugauggggaaaauuguacccugauugacgcccuccugggagauccccagugcgacggcuuucaaaacaaaaagugggaucuguucgucgagagaagcaaagccuauuccaauuguuacccuuaugacgugcccgauuacgcuucucuccggagccugguugccuccagcgggacgcuugaauuuaacaaugagucuuucaacuggaccggagugacacagaauggcaccuccagcgcuugcauccgcagaucuaacuccagcuuuuucucucggcugaauuggcucacacaucugaacuuuaaguauccugcccuuaaugucaccaugcccaacaacgagcaguucgacaagcuguacauuuggggcgugcaccauccugggacggauaaagaccagaucuuucucuaugcgcaauccagcggacgcauuacaguuuccaccaagagaucucagcaggccgugaucccgaauauuggcagccggccccgcaucagaaacaucccuucccggauuagcaucuacuggacaauugucaaacccggggauauccugcugauuaauucuaccggaaaccucaucgcuccucgcggcuacuucaagaucagauccgggaaaagcucuauuaugcggagcgacgcccccaucggaaaguguaauuccgaaugcauuaccccgaacggcucuaucccuaaugacaagcccuuucagaacgugaaucgcauuacauauggcgcuuguccuagauacgugaaacaaagcacgcugaagcuggccaccgggaugcggaacguccccgagaaacagacacgcggaaucuucggcgcgaucgccggguuuauugaaaauggaugggagggcaugguugaugggugguauggauucagacaccagaacuccgagggccggggccaagcugccgaccuuaagagcacccaggcugccaucgaucagauuaaugggaaacucaacagacugaucggaaagacaaaugaaaaauuccaccagauugagaaggaauuuucugagguggaaggccgcauccaagaccuugagaaguacguggaggauaccaaaauugaccugugguccuauaacgccgaacuccuggucgcucuggagaaccagcauacgaucgaucucgcggacagcgaaaugaauaagcuguucgagaaaacaaagaaacagcuucgggaaaacgccgaggauauggggaauggaugcuuuaagaucuaccacaagugugacaacgcuugcauuggcucuaucagaaaugggaccuauaaccaugauguguaccgcgacgaggcccugaauaaccgguuccagauuaaaggcguugaacucaaguccggauacaaagacuggauccuguggauuagcuuugccaucuccugcuuccuucuguguguggcucuccugggcuuuaucaugugggccugccaaaaggggaauauuagauguaacaucugcauuuga

SEQ ID NO: 202952 - RNA, 1701 nt, Artificial Sequence; identical to SEQ ID NO: 199054
  derived and/or modified CDS sequence (opt5) from hemagglutinin__InfluenzaA__AHC61895

SEQ ID NO: 202953 - RNA, 1701 nt, Artificial Sequence; identical to SEQ ID NO: 199054
  derived and/or modified CDS sequence (opt5) from hemagglutinin__InfluenzaA__AHC61907

SEQ ID NO: 202954 - RNA, 1701 nt, Artificial Sequence
  derived and/or modified CDS sequence (opt5) from hemagglutinin__InfluenzaA__AHC61931
augaagaccaucauugcccugagcuacauccucugccugguguucgcucagaaacuucccggcaacgacaauuccacagccacgcugugucucgggcaccaugcggucccuaacggaaccauuguuaagacaaucaccaaugaucaaauugaggugacaaacgcuaccgaacuggugcagucuagcuccacaggcgagaucugcaauucuccgcaccagauccuugacggggaaaacuguacccugauugaugcccuccugggagacccccagugcgauggcuuucaaaauaaaaagugggaccuguucgucgagagaagcaaagcccauuccaacuguuauccuuacgaugugcccgacuaugcuucucuccggagccugguugccuccagcgggacgcuugaauuuaauaacgagucuuucaauuggaccggagugacacagaacggcaccuccagcgcuugcauccgcagaucuaauaacuccuuuuucagccggcugaauuggcucacacaccugaacuuuaaguacccugcccuuaacgucaccaugcccaauaacgagcaguucgauaagcuguauauuuggggcgugcaucacccugggacggacaaagaucagaucuuucucuacgcgcaagccgcuggacgcauuacaguuucuaccaagagaucccagcaggccgugaucccgaauauuggcagccggccccgcgucagaaacaucccuucccgggugucuaucuauuggacaauugugaaacccggggacauccugcugauuaauagcaccggaaaccucaucgcuccucgcggcuacuucaagauuagauccgggaaaagcucuaucaugcgguccgaugcccccaucggaaaguguaauagcgcgugcauuaccccgaacggcucuaucccuaaugacaagcccuuucagaacgucaaucgcauuacauacggcgccuguccuagauauguuaaacaaaacacgcugaaacuugcuaccgggaugcggaaugugcccgaaaaacagacacgcggaaucuucggcgccauugcuggguuuaucgagaacggaugggaaggcaugguggacgggugguacggauucagacaccagaauagcgagggccggggccaagccgccgaucugaaguccacccaggcugcgaucgaccagauuaacgggaaacucaacagacugaucggaaagacaaaugagaaauuccaucagauugaaaaggaguuuucugaagucgagggccgcauccaagaucuugaaaaguauguggaggacaccaaaauugaucuguggagcuacaacgccgagcuccugguugcucuggaaaaucagcacacgaucgaccucacagauuccgagaugaacaagcuguucgaaaagaccaagaaacagcuucgggagaaugccgaagacauggggaacggaugcuuuaagauuuaucauaagugugauaaugccugcaucggcagcaucagaaacgggaccuacgaccacgauguguaucgcgacgaggcucugaauaaccgguuccagauuaaaggcgucgagcucaagucuggauacaaaggcuggauccuguggauuuccuuugccaucagcugcuuccuucuguguguggcgcuccugggguuuauuaugugggcuugccaaaagggaaauaucagauguaacaucugcauuuga

SEQ ID NO: 202955 - RNA, 1701 nt, Artificial Sequence; identical to SEQ ID NO: 199854
  derived and/or modified CDS sequence (opt5) from hemagglutinin__InfluenzaA__AHC61943

SEQ ID NO: 202956 - RNA, 1701 nt, Artificial Sequence; identical to SEQ ID NO: 201146
  derived and/or modified CDS sequence (opt5) from hemagglutinin__InfluenzaA__AHC61955

SEQ ID NO: 202957 - RNA, 1701 nt, Artificial Sequence; identical to SEQ ID NO: 199854
  derived and/or modified CDS sequence (opt5) from hemagglutinin__InfluenzaA__AHC61967

SEQ ID NO: 202958 - RNA, 1701 nt, Artificial Sequence; identical to SEQ ID NO: 198927
  derived and/or modified CDS sequence (opt5) from hemagglutinin__InfluenzaA__AHC61979

SEQ ID NO: 202959 - RNA, 1701 nt, Artificial Sequence; identical to SEQ ID NO: 199054
  derived and/or modified CDS sequence (opt5) from hemagglutinin__InfluenzaA__AHC61991

SEQ ID NO: 202960 - RNA, 1701 nt, Artificial Sequence; identical to SEQ ID NO: 202765
  derived and/or modified CDS sequence (opt5) from hemagglutinin__InfluenzaA__AHC62003

SEQ ID NO: 202961 - RNA, 1701 nt, Artificial Sequence; identical to SEQ ID NO: 199854
  derived and/or modified CDS sequence (opt5) from hemagglutinin__InfluenzaA__AHC62015

SEQ ID NO: 202962 - RNA, 1701 nt, Artificial Sequence; identical to SEQ ID NO: 201146
  derived and/or modified CDS sequence (opt5) from hemagglutinin__InfluenzaA__AHC62027

SEQ ID NO: 202963 - RNA, 1701 nt, Artificial Sequence
  derived and/or modified CDS sequence (opt5) from hemagglutinin__InfluenzaA__AHC62039
augaagaccaucauugcccugagcuacauccucugccugguguucgcucagaaacuucccggcaacgacaauuccacagccacgcugugucucgggcaccaugcggucccuaacggaaccauuguuaagacaaucaccaaugaucaaauugaggugacaaacgcuaccgaacuggugcagucuagcuccacaggcgagaucugcaauucuccgcaccagauccuugacggggaaaacuguacccugauugaugcccuccugggagacccccagugcgauggcuuucaaaauaaaaagugggaccuguucgucgagagaagcaaagcccauuccaacuguuauccuuacgaugugcccgacuaugcuucucuccggagccugguugccuccagcgggacgcuugaauuuaauaacgagucuuucaauuggaccggagugacacagaacggcaccuccagcgcuugcauccgcggcucuaauaacuccuuuuucagcagacugaauuggcucacacaccugaacuuuaaguacccugcccuuaacgucaccaugcccaauaacgagcaguucgauaagcuguauauuuggggagugcaucacccugggacggacaaagaucagaucuuucucuacgcgcaagccucuggccggauuacaguuuccaccaagcgcagccagcaggcugugaucccgaauauuggguccagaccccggguccgcaacaucccuucuagagugagcaucuauuggacaauugugaaacccggagacauccugcugauuaauuccaccggcaaccucaucgccccucggggguacuucaagauucgcagcggaaaaucuuccaucaugaaguccgaugcucccaucggcaaguguaauucugccugcauuaccccgaacggcagcaucccuaaugacaaacccuuucagaacgucaauagaauuacauacggggcguguccucgguauguuaagcaaaacacgcugaaacuugccaccggaaugcgcaaugugcccgaaaagcagacaagaggcaucuucggggcuauugccggauuuaucgagaacggcugggaagggaugauggacggaugguacggcuuccggcaccagaauagcgagggccgcgggcaagcugccgaucugaaaucuacccaggccgcuaucgaccagauuaacggaaagcucaacagacugaucggcaaaacaaaugagaaguuccaucagauugaaaaggaguuuagcgaaguggaggggcggauccaagaucuugaaaaauaugucgaggacaccaagauugaucugugguccuacaacgcggagcuccugguggcccuggaaaaucagcacacgaucgaccucacagauagcgagaugaacaaacuguucgaaaagaccaaaaagcagcuuagagagaaugcugaagacaugggaaacggcugcuuuaagauuuaucauaaaugugauaaugccugcaucgggucuauccgcaacggcaccuacgaccacgauguuuaucgggacgaggcccugaauaacagauuccagauuaagggaguggagcucaaauccggcuacaaggacuggauccuguggauuagcuuugcuaucucuugcuuccuucugugugucgcccuccugggguuuauuaugugggcgugccaaaaaggaaauauccgcuguaacaucugcauuuga

SEQ ID NO: 202964 - RNA, 1701 nt, Artificial Sequence
  derived and/or modified CDS sequence (opt5) from hemagglutinin__InfluenzaA__AHC62050
augaagaccaucauugcccugagcuacauccucugccugguguucgcucagaaacuucccggcaacgacaauuccacagccacgcugugucucgggcaccaugcggucccuaacggaaccauuguuaagacaaucaccaaugaucaaauugaggugacaaacgcuaccgaacuggugcagucuagcuccacaggcgagaucugcaauucuccgcaccagauccuugacggggaaaacuguacccugauugaugcccuccugggagacccccagugcgauggcuuucaaaauaaaaagugggaccuguucgucgagagaagcaaagcccauuccaacuguuauccuuacgaugugcccgacuaugcuucucuccggagccugguugccuccagcgggacgcuugaauuuaauaacgagucuuucaauuggaccggagugacacagaacggcaccuccagcgcuugcauccgcagaucuaauaacuccuuuuucagccggcugaauuggcucacacaccugaacuuuaaguacccugcccuuaacgucaccaugcccaauaacgagcaguucgauaagcuguauauuuggggcgugcaucacccugggacggacaaagaucagaucuuucucuacgcgcaagccucuggacgcauuacaguuuccaccaagagaagccagcaggcugugaucccgaauauuggcucccggccccgcgucagaaacgugccuucucgggugagcaucuauuggacaaucgucaaacccggggacauucugcugaucaauuccaccggaaaccucauugccccucgcggcuacuucaagaucagaagcgggaaaucuuccauuaugcggagcgaugcucccaucggaaaguguaauucugccugcaucaccccgaacggcagcauuccuaaugacaagcccuuucagaacguuaaucgcaucacauacggcgcguguccuagauaugugaaacaaaacacgcugaaacuugccaccgggaugcggaaugugcccgaaaaacagacacgcggaauuuucggcgcuaucgccggguuuauugagaacggaugggaaggcauggucgacgggugguacggauucagacaccaaaauuccgagggccggggccaggcugccgaucugaagucuacccaggccgcuaucgaccagaucaacgggaaacucaacagacugauuggaaagacaaaugagaaauuccaucagaucgaaaaggaguuuagcgaaguggagggccgcauucaagaucuugaaaaguauguugaggacaccaaaaucgaucugugguccuacaacgcggagcuccugguggcccuggaaaaucagcacacgauugaccucacagauagcgagaugaacaagcuguucgaaaagaccaagaaacagcuucgggagaaugcugaagacauggggaacggaugcuuuaagaucuaucauaagugugauaaugccugcauuggcucuaucagaaacgggaccuacgaccacgaugucuaucgcgacgaggcccugaauaaccgguuccagaucaaaggcguggagcucaaguccggauacaaagacuggauucuguggaucagcuuugcuauuucuugcuuccuucuguguguugcccuccugggcuuuaucaugugggcgugccaaaaggggaauauuagauguaacaucugcaucuga

SEQ ID NO: 202965 - RNA, 1701 nt, Artificial Sequence; identical to SEQ ID NO: 201146
  derived and/or modified CDS sequence (opt5) from hemagglutinin__InfluenzaA__AHC62062

SEQ ID NO: 202966 - RNA, 1701 nt, Artificial Sequence
  derived and/or modified CDS sequence (opt5) from hemagglutinin__InfluenzaA__AHC62074
augaagaccaucauugcccugagcuacauccucugccugguguucgcucagaaacuucccggcaacgacaauuccacagccacgcugugucucgggcaccaugcggucccuaacggaaccauuguuaagacaaucaccaaugaucaaauugaggugacaaacgcuaccgaacuggugcagucuagcuccacaggcgagaucugcgacucuccgcaccagauccuugauggggaaaauuguacccugauugacgcccuccugggagauccccagugcgacggcuuucaaaacaaaaagugggaucuguucgucgagagaagcaaagccuauuccaauuguuacccuuaugacgugcccgauuacgcuucucuccggagccugguugccuccagcgggacgcuugaauuuaacaaugagucuuucaacuggaccggagugacacagaauggcaccuccagcgcuugcauccgcagaucuaacaauuccuuuuucagccggcugaacuggcucacacaucugaauuuuaaguauccugcccuuaacgucaccaugcccaacaaugagcaguucgacaagcuguacauuuggggcgugcaccauccugggacggauaaagaccagaucuuucucuaugcgcaagccucuggacgcauuacaguuuccaccaagagaaaccagcaggcugugaucccgaauauuggcagccggccccgcgucagaaacaucccuucccggaucucuauuuacuggacaaucgugaaacccggggauauucugcugaucaauagcaccggaaaccucauugccccucgcggcuacuucaagaucagauccgggaaaagcucuaucaugcgguccgacgcucccauuggaaaguguaauagcgaaugcaucaccccgaacggcucuauuccuaaugacaagcccuuucagaacgugaaucgcaucacauauggcgccuguccuagauacgucaaacaaaacacgcugaaacuugcgaccgggaugcggaauguucccgagaagcagacacgcggaauuuucggcgccaucgcuggguuuaucgaaaacggaugggagggcaugguggaugggugguauggauucagacaccagaauagcgagggccggggccaagccgcugaccugaaguccacccaggccgccauugaucagaucaacgggaaacucaacagacugauuggaaagacaaaugaaaaauuccaccagaucgagaaggaauuuucugagguggaaggccgcauucaagaccuugagaaguacgucgaggauaccaaaaucgaccuguggagcuauaacgcugaacuccugguggcgcuggagaaucagcauacgauugaucucacagacuccgaaaugaacaagcuguucgagaaaaccaagaaacagcuucgggaaaaugccgaggauauggggaacggaugcuuuaagaucuaccacaagugugacaaugcuugcaucggcagcauuagaaacgggaccuauaaucaugauguuuaccgcgacgaggcccugaacaaucgguuccagaucaaaggcguggaacucaagucuggauacaaagacuggauucuguggaucuccuuugccauuagcugcuuccuucugugugucgcucuccugggcuuuaucaugugggccugccaaaaggggaacaucagauguaauauuugcaucuga

SEQ ID NO: 202967 - RNA, 1701 nt, Artificial Sequence; identical to SEQ ID NO: 198927
  derived and/or modified CDS sequence (opt5) from hemagglutinin__InfluenzaA__AHC62086

SEQ ID NO: 202968 - RNA, 1701 nt, Artificial Sequence; identical to SEQ ID NO: 199854
  derived and/or modified CDS sequence (opt5) from hemagglutinin__InfluenzaA__AHC62098

SEQ ID NO: 202969 - RNA, 1701 nt, Artificial Sequence; identical to SEQ ID NO: 198927
  derived and/or modified CDS sequence (opt5) from hemagglutinin__InfluenzaA__AHC62110

SEQ ID NO: 202970 - RNA, 1701 nt, Artificial Sequence
  derived and/or modified CDS sequence (opt5) from hemagglutinin__InfluenzaA__AHC62122
augaagaccaucauugcccugagcuacauccucugccugguguucgcucagaaacuucccggcaacgacaauuccacagccacgcugugucucgggcaccaugcggucccuaacggaaccauuguuaagacaaucaccaaugaucaaauugaggugacaaacgcuaccgaaauggugcagucuagcuccacaggcgagaucugcaauucuccgcaccagauccuggacggggaaaacuguacccuuauugaugcccugcucggagacccccagugcgauggcuuucaaaauaaaaagugggaccuguucgucgagagaagcaaagcccauuccaacuguuauccuuacgaugugcccgacuaugcuucucugcggagccucguugccuccagcgggacgcuggaauuuaauaacgagucuuucaauuggaccggagugacacagaacggcaccuccagcgcuugcauccgcggcucuaauaacuccuuuuucagcagacuuaauuggcugacacacucuaacuuuaaguacccugcccucaacgucaccaugcccaauaacgagcaguucgauaagcuguauauuuggggagugcaucacccugggacggacaaagaucagaucuuucuuuacgcgcaagccuccggccggauuacaguuagcaccaagcgcucccagcaggcugugaucccgaauauugggucuagaccccggguccgcaacaucccuagcagaguguccaucuauuggacaauugugaaacccggagacauccugcucauuaauagcaccggcaaccugaucgccccucggggguacuucaagauucgcucuggaaaauccagcaucaugagaucugaugcucccaucggcaaguguaauagcgccugcauuaccccgaacggcuccaucccuaaugacaagcccuuucagaacgucaaucggauuacauacggggcguguccucgcuauguuaaacaaaacacgcugaagcucgccaccggaaugagaaaugugcccgaaaaacagacacggggcaucuucggggcuauugccggauuuaucgagaacggcugggaagggaugguggacggaugguacggcuuccgccaccaaaauucugagggcagagggcaggcugccgaucugaaaagcacccaggccgcuaucgaccagauuaacggaaaacuuaaccggcugaucggcaagacaaaugagaaauuccaucagauugaaaaggaguuuuccgaagucgaggggagaauccaagaucucgaaaaguauguggaggacaccaaaauugaucuguggagcuacaacgcggagcuucugguugcccucgaaaaucagcacacgaucgaccugacagauucugagaugaacaagcuguucgaaaagaccaagaaacagcuccgcgagaaugcugaagacaugggaaacggcugcuuuaagauuuaucauaagugugauaaugccugcaucggguccauccggaacggcaccuacgaccacgauguguauagagacgaggcccugaauaaccgcuuccggauuaaaggagucgagcuuaagagcggcuacaaagacuggauccuguggauuucuuuugcuaucuccugcuuccuccuguguguggcccuucugggguuuauuaugugggcgugccagaagggaaauaucagauguaacaucugcauuuga

SEQ ID NO: 202971 - RNA, 1701 nt, Artificial Sequence; identical to SEQ ID NO: 198927
  derived and/or modified CDS sequence (opt5) from hemagglutinin__InfluenzaA__AHC62134

SEQ ID NO: 202972 - RNA, 1701 nt, Artificial Sequence
  derived and/or modified CDS sequence (opt5) from hemagglutinin__InfluenzaA__AHC62146
augaagaccaucauugcccugagcuacauccucugccugguguucgcucagaaacuucccggcaacgacaauuccacagccacgcugugucucgggcaccaugcggucccuaacggaaccauuguuaagacaaucaccaaugaucaaauugaggugacaaacgcuaccgaacuggugcagucuagcuccacaggcgagaucugcaauucuccgcaccagauccuugacggggaaaacuguacccugauugaugcccuccugggagacccccagugcgauggcuuucaaaauaaaaagugggaccuguucgucgagagaagcaaagccuauuccaacuguuacccuuaugaugugcccgacuacgcuucucuccggagccugguugccuccagcgggacgcuugaauuuaauaacgagucuuucaauuggaccggagugacacagaacggcaccuccagcgcuugcauccgcagaucuaauuccagcuuuuucucucggcugaacuggcucacacaucugaauuuuaaguauccugcccuuaacgucaccaugcccaacaaugagcaguucgauaagcuguacauuuggggcgugcaccauccugggacggacaaagaucagaucuuucucuaugcgcaauccagcggacgcauuacaguuuccaccaagagaucucagcaggccgugaucccgaacauuggcagccggccccgcaucagaaauaucccuucccggauuagcaucuacuggacaauugucaaacccggggacauccugcugauuaacucuaccggaaaucucaucgcuccucgcggcuacuucaagaucagauccgggaaaagcucuauuaugcggagcgaugcccccaucggaaaguguaacuccgaaugcauuaccccgaauggcucuaucccuaacgacaagcccuuucagaaugugaaccgcauuacauauggcgcuuguccuagauacgugaaacaaagcacgcugaaacuugccaccgggaugcggaauguccccgagaagcagacacgcggaaucuucggcgcgaucgccggguuuauugaaaacggaugggagggcaugguugacgggugguauggauucagacaccagaauuacgagggccggggccaagcugccgaucugaaguccacccaggcugccaucgaccagauuaacgggaaacucaauagacugaucggaaagacaaacgaaaaauuccaccagauugagaaggaauuuagcgagguggaaggccgcauccaagaucuugagaaguauguggaggacaccaaaauugaucuguggucuuacaacgccgaacuccuggucgcucuggagaaucagcauacgaucgaccucacagauuccgaaaugaacaagcuguucgagaaaaccaagaaacagcuucgggaaaaugcggaggacauggggaacggaugcuuuaagaucuaucacaagugugauaaugccugcauuggcagcaucagaaacgggaccuacaaucaugacguguaccgcgaugaggcucugaacaaucgguuccagauuaaaggcguugaacucaagucuggauauaaagacuggauccuguggauuuccuuugccaucagcugcuuccuucuguguguggcccuccugggcuuuaucaugugggcuugccaaaaggggaacauuagauguaauaucugcauuuga

SEQ ID NO: 202973 - RNA, 1701 nt, Artificial Sequence; identical to SEQ ID NO: 199054
  derived and/or modified CDS sequence (opt5) from hemagglutinin__InfluenzaA__AHC62158

SEQ ID NO: 202974 - RNA, 1701 nt, Artificial Sequence
  derived and/or modified CDS sequence (opt5) from hemagglutinin__InfluenzaA__AHC62170
augaagaccaucauugcccugagcuacauccucugccugguguucgcucagaaacuucccggcaacgacaauuccacagccacgcugugucucgggcaccaugcggucccuaacggaaccauuguuaagacaaucaccaaugaucaaauugaggugacaaacgcuaccgaacuggugcagucuagcuccacaggcgagaucugcaauucuccgcaccagauccuugacggggaaaacuguacccugauugaugcccuccugggagacccccagugcgauggcuuucaaaauaaaaagugggaccuguucgucgagagaagcaaagcccauuccaacuguuauccuuacgaugugcccgacuaugcuucucuccggagccugguugccuccagcgggacgcuugaauuuaauaacgagucuuucaauuggaccggagugacacagaacggcaccuccagcgcuugcauccgcggcucuaauaacuccuuuuucagcagacugaauuggcucacacaccugaacuuuaaguacccugcccuuaacgucaccaugcccaauaacgagcaguucgauaagcuguauauuuggggagugcaucacccugggacggacaaagaucagaucuuucucuacgcgcaagccucuggccggauuacaguuuccaccaagcgcagccagcaggcugugaucccgaauauuggguccagaccccggguccgcaacaucccuucuagagugagcaucuauuggacaauugugaaacccggagacauccugcugauuaauuccaccggcaaccucaucgccccucggggguacuucaagauucgcagcggaaaaucuuccaucaugagaagcgaugcucccaucggcaaguguaauucugccugcauuaccccgaacggcagcaucccuaaugacaagcccuuucagaacgucaaucggauuacauacggggcguguccucgcuauguuaaacaaaacacgcugaaacuugccaccggaaugagaaaugugcccgaaaaacagacacggggcaucuucggggcuauugccggauuuaucgagaacggcugggaagggaugauggacggaugguacggcuuccgccaccaaaauuccgagggcagagggcaggcugccgaucugaagucuacccaggccgcuaucgaccagauuaacggaaaacucaaccggcugaucggcaagacaaaugagaaauuccaucagauugaaaaggaguuuagcgaaguggaggggagaauccaagaucuugaaaaguaugucgaggacaccaaaauugaucugugguccuacaacgcggagcuccugguggcccuggaaaaucagcacacgaucgaccucacagauagcgagaugaacaagcuguucgaaaagaccaagaaacagcuucgcgagaaugcugaagacaugggaaacggcugcuuuaagauuuaucauaagugugauaaugccugcaucgggucuauccggaacggcaccuacgaccacaauguuuauagagaugaggcccugaacaaucgcuuccagauuaaaggaguggagcucaaguccggcuacaaagacuggauccuguggauuagcuuugcuaucucuugcuuccuucugugugucgcccuccugggguuuauuaugugggcgugccaaaagggaaacauccgguguaauaucugcauuuga

SEQ ID NO: 202975 - RNA, 1701 nt, Artificial Sequence; identical to SEQ ID NO: 198927
  derived and/or modified CDS sequence (opt5) from hemagglutinin__InfluenzaA__AHC62182

SEQ ID NO: 202976 - RNA, 1701 nt, Artificial Sequence; identical to SEQ ID NO: 201146
  derived and/or modified CDS sequence (opt5) from hemagglutinin__InfluenzaA__AHC62194

SEQ ID NO: 202977 - RNA, 1701 nt, Artificial Sequence
  derived and/or modified CDS sequence (opt5) from hemagglutinin__InfluenzaA__AHC62206
augaagaccaucauugcccugagcuacauccucugccugguguucgcucagaaacuucccggcaacgacaauuccacagccacgcugugucucgggcaccaugcggucccuaacggaaccauuguuaagacaaucaccaaugaucaaauugaggugacaaacgcuaccgaacuggugcagucuagcuccacaggcgagaucugcgacucuccgcaccagauccuugauggggaaaauuguacccugauugacgcccuccugggagauccccagugcgacggcuuucaaaacaaaaagugggaucuguucgucgagagaagcaaagccuauuccaauuguuacccuuaugacgugcccgauuacgcuucucuccggagccugguugccuccagcgggacgcuugaauuuaacaaugagucuuucaucuggaccggagugacacagaacggcaccuccagcgcuugcauucgcagaucuaauuccagcuuuuucucucggcugaacuggcucacacaucugaauuuuaaguauccugcccuuaacgucaccaugcccaauaacgagcaguucgacaagcuguacaucuggggcgugcaccauccugggacggauaaagaccagauuuuucucuaugcgcaauccagcggacgcaucacaguuuccaccaagagaucucagcaggccgugauuccgaacaucggcagccggccccgcaucagaaauauuccuucccggaucagcauuuacuggacaaucgucaaacccggggauauucugcugaucaacucuaccggaaaucucaucgcuccucgcggcuacuucaagauuagauccgggaaaagcucuaucaugcggagcgacgcccccauuggaaaguguaacuccgaaugcaucaccccgaauggcucuauuccuaacgacaagcccuuucagaaugugaaccgcaucacauauggcgcuuguccuagauacgugaaacaaagcacgcugaagcuggccaccgggaugcggaauguccccgagaaacagacacgcggaaucuucggcgcgauugccggguuuaucgaaaacggaugggagggcaugguugaugggugguauggauucagacaccaaaauuccgagggccggggccaggcugccgaccuuaagagcacccaggcugccauugaucagaucaacgggaaacucaauagacugauuggaaagacaaacgaaaaauuccaccagaucgagaaggaauuuucugagguggaaggccgcauucaagaccuugagaaguacguggaggauaccaaaaucgaccugugguccuauaaugccgaacuccuggucgcucuggagaaccagcauacgaucgaucucacagacagcgaaaugaacaagcuguucgagaaaaccaagaaacagcuucgggaaaaugcggaggauauggggaacggaugcuuuaagauuuaccacaagugugacaaugccugcaucggcucuauuagaaacgggaccuauaaucaugauguguaccgcgacgaggcucugaacaaucgguuccagaucaaaggcguugaacucaaguccggauacaaagacuggauucuguggaucagcuuugccaucuccugcuuccuucuguguguggcccuccugggcuuuauuaugugggcuugccaaaaggggaacaucagauguaauauuugcaucuga

SEQ ID NO: 202978 - RNA, 1701 nt, Artificial Sequence; identical to SEQ ID NO: 199054
  derived and/or modified CDS sequence (opt5) from hemagglutinin__InfluenzaA__AHC62218

SEQ ID NO: 202979 - RNA, 1701 nt, Artificial Sequence
  derived and/or modified CDS sequence (opt5) from hemagglutinin__InfluenzaA__AHC62242
augaagaccaucauugcccugagcuacauccucugccugguguucgcucagaaaauucccggcaacgacaauuccacagccacgcuuugucuggggcaccaugcggucccuaacggaaccaucguuaagacaauuaccaaugaucaaaucgaggugacaaacgcuaccgaacucgugcaaaauucuagcacaggcgagaucugcgacuccccgcaccagauucuggauggggaaaacuguacccuuaucgacgcccugcucggagauccccagugcgacggcuuucagaauaaaaagugggaucuguucgucgagagaucuaaagccuauagcaacuguuacccuuaugacgugcccgauuacgcuucccugcggucucucguugccagcuccgggacgcuggaauuuaauaacgagagcuucaauuggaccggagugacacagaacggcaccucuuccgcuugcauucgcagaagcaauaacucuuucuucucccggcuuaauuggcugacacaucucaacuuuaaguauccugcccugaacgucaccaugcccaauaacgagcaguucgacaaacuuuacaucuggggcgugcaccauccugggacggauaaggaccagauuuuucuguaugcgcaagccagcggacgcaucacaguuucuaccaagagaucccagcaggcugugauuccgaauaucggcagccggccccgcgucagaaacaucccuucccggauuucuaucuacuggacaauugugaaacccggggauauccuccugauuaauagcaccggaaaccugaucgccccucgcggcuacuucaagaucagauccgggaaaagcucuauuaugcgguccgacgcucccaucggaaaguguaauagcgaaugcauuaccccgaacggcucuaucccuaaugacaagcccuuucagaacgugaaucgcauuacauauggcgccuguccuagauacgucaaacaaaacacgcucaagcuggcgaccgggaugcggaauguucccgagaaacagacacgcggaaucuucggcgccaucgcuggguuuauugaaaacggaugggagggcaugguggaugggugguauggauucagacaccagaauagcgagggccggggccaagccgcugaccuuaaguccacccaggccgccaucgaucagauuaacgggaaacugaacagacucaucggaaagacaaaugaaaaauuccaccagauugagaaggaauuuucugagguggaaggccgcauccaagaccuggagaaguacgucgaggauaccaaaauugaccuuuggagcuauaacgcugaacugcucaucgcgcuggagaaucagcauacgaucgaucugacagacuccgaaaugaacaagcucuuugagaaaaccaagaaacagcugcgggaaaaugccgaggauauggggaacggaugcuuuaagauuuaccacaagugugacaaugcuugcaucggcagcauuagaaacgggaccuaugaucaugacguguaccgcgacgaggcccuuaauaaccgguuccagaucaaaggcguugaacugaagucuggauacaaagauuggauucucuggaucuccuuugccaucagcugcuuccugcuuuguguggcucugcucggcuuuauuaugugggccugccaaaaggggaauaucagauguaacauuugcaucuga

SEQ ID NO: 202980 - RNA, 1701 nt, Artificial Sequence; identical to SEQ ID NO: 202689
  derived and/or modified CDS sequence (opt5) from hemagglutinin__InfluenzaA__AHC62254

SEQ ID NO: 202981 - RNA, 1701 nt, Artificial Sequence; identical to SEQ ID NO: 199054
  derived and/or modified CDS sequence (opt5) from hemagglutinin__InfluenzaA__AHC62266

SEQ ID NO: 202982 - RNA, 1701 nt, Artificial Sequence; identical to SEQ ID NO: 202853
  derived and/or modified CDS sequence (opt5) from hemagglutinin__InfluenzaA__AHC62278

SEQ ID NO: 202983 - RNA, 1701 nt, Artificial Sequence
  derived and/or modified CDS sequence (opt5) from hemagglutinin__InfluenzaA__AHC62290
augaagaccaucauugcccugagcuacauccucugccugauuuucgcucagaaacuucccggcaacgacaauuccacagccacgcugugucucgggcaccaugcggugccuaacggaaccaucgucaagacaauuaccaaugaucaaaucgagguuacaaacgcuaccgaacuggugcagucuagcuccacaggcgagaucugcaauucuccgcaccagauucuugacggggaaaacuguacccugaucgaugcccuccugggagacccccagugcgauggcuuucaaaauaaaaagugggaccuguucguggagagaagcaaagcccauuccaacuguuauccuuacgauguccccgacuaugcuucucuccggagccugguggccuccagcgggacgcuugaauuuaauaacgagucuuucaauuggaccggaguuacacagaacggcaccuccagcgcuugcauucgcagaucuaauaacuccuuuuucagccggcugaauuggcucacacaccugaacuuuaaguacccugcccuuaacgugaccaugcccaauaacgagcaguucgauaagcuguauaucuggggcguccaucacccugggacggacaaagaucagauuuuucucuacgcgcaagccucuggacgcaucacaguguccaccaagagaagccagcaggcuguuauuccgaauaucggcucccggccccgcgugagaaacaucccuucucgggucagcauuuauuggacaaucgugaaacccggggacauucugcugaucaauuccaccggaaaccucauugccccucgcggcuacuucaagaucagaagcgggaaaucuuccaucaugcggagcgaugcucccauuggaaaguguaauucugccugcaucaccccgaacggcagcauuccuaaugacaagcccuuucagaacgugaaucgcaucacauacggcgcguguccuagauaugucaaacaaaacacgcugaaacuugccaccgggaugcggaauguucccgaaaaacagacacgcggaauuuucggcgcuaucgccggguuuaucgagaacggaugggaaggcaugguggacgggugguacggauucagacaccaaaauuccgagggccggggccaggcugccgaucugaagucuacccaggccgcuauugaccagaucaacgggaaacucaacagacugauuggaaagacaaaugagaaauuccaucagaucgaaaaggaguuuagcgaaguggagggccgcauucaagaucuugaaaaguaugucgaggacaccaaaaucgaucugugguccuacaacgcggagcuccugguggcccuggaaaaucagcacacgauugaccucacagauagcgagaugaacaagcuguucgaaaagaccaagaaacagcuucgggagaaugcugaagacauggggaacggaugcuuuaagaucuaucauaagugugauaaugccugcaucggcucuauuagaaacgggaccuacgaccacgauguuuaucgcgacgaggcccugaauaaccgguuccagaucaaaggcguggagcucaaguccggauacaaagacuggauucuguggaucagcuuugcuauuucuugcuuccuucugugugucgcccuccugggcuuuaucaugugggcgugccaaaaggggaauaucagauguaacauuugcaucuga

SEQ ID NO: 202984 - RNA, 1701 nt, Artificial Sequence
  derived and/or modified CDS sequence (opt5) from hemagglutinin__InfluenzaA__AHC62302
augaagaccaucauugcccugagcuacauccucugccugguguucgcucagaaacuucccggcaacgacaauuccacagccacgcugugucucgggcaccaugcggucccuaacggaaccauuguuaagacaaucaccaaugaucaaauugaggugacaaacgcuaccgaacuggugcagucuagcuccacaggcgagaucugcaauucuccgcaccagauccuugacggggaaaacuguacccugauugaugcccuccugggagacccccagugcgauggcuuucaaaauaaaaagugggaccuguucgucgagagaagcaaagcccauuccaacuguuauccuuacgaugugcccgacuaugcuucucuccggagccugguugccuccagcgggacgcuugaauuuaauaacgagucuuucaauuggaccggagugacacagaacggcaccuccagcgcuugcauccgcagaucuaauaacuccuuuuucagccggcugaauuggcucacacaccugaacuuuaaguacccugcccuuaacgucaccaugcccaauaacgagcaguucgauaagcuguauauuuggggcgugcaucacccugggacggacaaagaucagaucuuucucuacgcgcaagccgcuggacgcauuacaguuucuaccaagagaucccagcaggccgugaucccgaauauuggcagccggccccgcgucagaaacaucccuucccgggugucuaucuauuggacaauugugaaacccggggacauccugcugauuaauagcaccggaaaccucaucgcuccucgcggcuacuucaagauuagaaaugggaaauccagcaucaugcggucugaugcccccaucggaaaguguaacuccgcgugcauuaccccgaauggcagcaucccuaacgacaagcccuuucagaaugucaaccgcauuacauacggcgccuguccuagauauguuaaacaaaauacgcugaaacuugcuaccgggaugcggaacgugcccgaaaaacagacacgcggaaucuucggcgccauugcuggguuuaucgagaauggaugggaaggcaugguggacgggugguacggauucagacaccagaacucugagggccggggccaagccgccgaucucaagagcacccaggcugcgaucgaccagauuaacgggaaacugaauagacugaucggaaagacaaacgagaaauuccaucagauugaaaaggaguuuuccgaagucgagggccgcauccaagaucuugaaaaguauguggaggacaccaaaauugaucuguggucuuacaaugccgagcuccugguugcucuggaaaaccagcacacgaucgaccucacagauagcgagaugaauaagcuguucgaaaagaccaagaaacagcuucgggagaacgccgaagacauggggaauggaugcuuuaagauuuaucauaagugugauaacgccugcaucggcuccaucagaaaugggaccuacgaccacgauguguaucgcgacgaggcucugaacaaucgguuccagauuaaaggcgucgagcucaagagcggauacaaagacuggauccuguggauuucuuuugccaucuccugcuuccuucuguguguggcgcuccugggcuuuauuaugugggcuugccaaaaggggaacaucagauguaauaucugcauuuga

SEQ ID NO: 202985 - RNA, 1701 nt, Artificial Sequence
  derived and/or modified CDS sequence (opt5) from hemagglutinin__InfluenzaA__AHC62314
augaagaccaucauugcccugagcuacauccucugccugguguucgcucagaaacuucccggcaacgacaauuccacagccacgcugugucucgggcaccaugcggucccuaacggaaccauuguuaagacaaucaccaaugaucaaauugaggugacaaacgcuaccgaacuggugcaaaauucuagcacaggcgagaucugcgacuccccgcaccagauccuugauggggaaaacuguacccugauugacgcccuccugggagauccccagugcgacggcuuucagaauaaaaagugggaucuguucgucgagagaucuaaagccuauagcaacuguuacccuuaugacgugcccgauuacgcuucccuccggucucugguugccagcuccgggacgcuugaauuuaauaacgagagcuucaauuggaccggagugacacagaacggcaccucuuccgcuugcauccgcagaagcaauaacuccuuuuucucucggcugaauuggcucacacaucugaacuuuaaguauccugcccuuaacgucaccaugcccaauaacgagcaguucgacaagcuguacauuuggggcgugcaccauccugggacggauaaagaccagaucuuucucuaugcgcaagccagcggacgcauuacaguuucuaccaagagaucccagcaggcugugaucccgaauauuggcagccggccccgcgucagaaacaucccuucccggaucucuauuuacuggacaaucgugaaacccggggauauucugcugaucaauagcaccggaaaccucauugccccucgcggcuacuucaagaucagauccgggaaaagcucuaucaugcgguccgacgcucccauuggaaaguguaauagcgaaugcaucaccccgaacggcucuauuccuaaugacaagcccuuucagaacgugaaucgcaucacauauggcgccuguccuagauacgucaaacaaaacacgcugaaacuugcgaccgggaugcggaauguucccgagaagcagacacgcggaauuuucggcgccaucgcuggguuuaucgaaaacggaugggagggcaugguggaugggugguauggauucagacaccagaauagcgagggccggggccaagccgcugaccugaaguccacccaggccgccauugaucagaucaacgggaaacucaacagacugauuggaaagacaaaugaaaaauuccaccagaucgagaaggaauuuucugagguggaaggccgcauucaagaccuugagaaguacgucgaggauaccaaaaucgaccuguggagcuauaacgcugaacuccugguggcgcuggagaaucagcauacgauugaucucacagacuccgaaaugaacaagcuguucgagaaaaccaagaaacagcuucgggaaaaugccgaggauauggggaacggaugcuuuaagaucuaccacaagugugacaaugcuugcaucggcagcauuagaaacgggaccuaugaucaugacguuuaccgcgacgaggcccugaauaaccgguuccagaucagaggcguggaacucaaaucuggauacaaggauuggauucuguggaucuccuuugccauuagcugcuuccuucugugugucgcucuccugggcuuuaucaugugggccugccaaaaagggaauauccgcuguaacauuugcaucuga

SEQ ID NO: 202986 - RNA, 1701 nt, Artificial Sequence; identical to SEQ ID NO: 202850
  derived and/or modified CDS sequence (opt5) from hemagglutinin__InfluenzaA__AHC62326

SEQ ID NO: 202987 - RNA, 1701 nt, Artificial Sequence; identical to SEQ ID NO: 199854
  derived and/or modified CDS sequence (opt5) from hemagglutinin__InfluenzaA__AHC62338

SEQ ID NO: 202988 - RNA, 1701 nt, Artificial Sequence; identical to SEQ ID NO: 198927
  derived and/or modified CDS sequence (opt5) from hemagglutinin__InfluenzaA__AHC62350

SEQ ID NO: 202989 - RNA, 1701 nt, Artificial Sequence; identical to SEQ ID NO: 199854
  derived and/or modified CDS sequence (opt5) from hemagglutinin__InfluenzaA__AHC62362

SEQ ID NO: 202990 - RNA, 1701 nt, Artificial Sequence; identical to SEQ ID NO: 199854
  derived and/or modified CDS sequence (opt5) from hemagglutinin__InfluenzaA__AHC62374

SEQ ID NO: 202991 - RNA, 1701 nt, Artificial Sequence; identical to SEQ ID NO: 202853
  derived and/or modified CDS sequence (opt5) from hemagglutinin__InfluenzaA__AHC62386

SEQ ID NO: 202992 - RNA, 1701 nt, Artificial Sequence; identical to SEQ ID NO: 198927
  derived and/or modified CDS sequence (opt5) from hemagglutinin__InfluenzaA__AHC62398

SEQ ID NO: 202993 - RNA, 1701 nt, Artificial Sequence
  derived and/or modified CDS sequence (opt5) from hemagglutinin__InfluenzaA__AHC62410
augaagaccaucauugcccugagcuacauccucugccugguguucgcucagaaacuucccggcaacgacaauuccacagccacgcugugucucgggcaccaugcggucccuaacggaaccauuguuaagacaaucaccaaugaucaaauugaggugacaaacgcuaccgaacuggugcagucuagcuccacaggcgagaucugcaauucuccgcaccagauccuugacggggaaaacuguacccugauugaugcccuccugggagacccccagugcgauggcuuucaaaauaaaaagugggaccuguucgucgagagaagcaaagcccauuccaacuguuauccuuacgaugugcccgacuaugcuucucuccggagccugguugccuccagcgggacgcuugaauuuaauaacgagucuuucaauuggaccggagugacacagaacggcaccuccagcgcuugcauccgcagaucuaauaacuccuuuuucagccggcugaauuggcucacacaccugaacuuuaaguacccugcccuuaacgucaccaugcccaauaacgagcaguucgauaagcuguauauuuggggcgugcaucacccugggacggacaaagaucagaucuuucucuacgcgcaagccucuggacgcauuacaguuuccaccaagagaagccagcaggcugugaucccgaauauuggcucccggccccgcgucagaaacaucccuucucgggugagcaucuauuggacaauugugaaacccggggacauccugcugauuaauuccaccggaaaccucaucgccccucgcggcuacuucaagauuagaagcgggaaaucuuccaucauccggagcgaugcucccauuggaaaguguaauucugccugcaucaccccgaacggcagcauuccuaaugacaagcccuuucagaacgucaaucgcaucacauacggcgcguguccuagauauguuaaacaaaacacgcugaaacuugccaccgggaugcggaaugugcccgaaaaacagacacgcggaauuuucggcgcuaucgccggguuuaucgagaacggaugggaaggcaugguggacgggugguacggauucagacaccaaaauuccgagggccggggccaggcugccgaucugaagucuacccaggccgcuauugaccagaucaacgggaaacucaacagacugauuggaaagacaaaugagaaauuccaucagaucgaaaaggaguuuagcgaagucgagggccgcauucaagaucuugaaaaguauguggaggacaccaaaaucgaucugugguccuacaacgcggagcuccugguugcccuggaaaaucagcacacgauugaccucacagauagcgagaugaacaagcuguucgaaaagaccaagaaacagcuucgggagaaugcugaagacauggggaacggaugcuuuaagaucuaucauaagugugauaaugccugcaucggcucuauuagaaacgggaccuacgaccacgauguguaucgcgacgaggcccugaauaaccgguuccagaucaaaggcgucgagcucaaguccggauacaaagacuggauucuguggaucagcuuugcuauuucuugcuuccuucuguguguggcccuccugggcuuuaucaugugggcgugccaaaaggggaauaucagauguaacauuugcaucuga

SEQ ID NO: 202994 - RNA, 1701 nt, Artificial Sequence; identical to SEQ ID NO: 202796
  derived and/or modified CDS sequence (opt5) from hemagglutinin__InfluenzaA__AHC62422

SEQ ID NO: 202995 - RNA, 1701 nt, Artificial Sequence
  derived and/or modified CDS sequence (opt5) from hemagglutinin__InfluenzaA__AHC62434
augaagaccaucauugcccugagcuacauccucugccugguguucgcucagaaacuucccggcaacgacaauuccacagccacgcugugucucgggcaccaugcggucccuaacggaaccauuguuaagacaaucaccaaugaucaaauugaggugacaaacgcuaccgaacuggugcagucuagcuccacaggcgagaucugcaauucuccgcaccagauccuugacggggaaaacuguacccugauugaugcccuccugggagacccccagugcgauggcuuucaaaauaaaaagugggaccuguucgucgagagaagcaaagcccauuccaacuguuauccuuacgaugugcccgacuaugcuucucuccggagccugguugccuccagcgggacgcuugaauuuaauaacgagucuuucaauuggaccggagugacacagaacggcaccuccagcgcuugcauccgcagaucuaauaacuccuuuuucagccggcugaauuggcucacacaccugaacuuuaaguacccugcccuuaacgucaccaugcccaauaacgagcaguucgauaagcuguauauuuggggcgugcaucacccugggacggacaaagaucagaucuuucucuacgcgcaagccgcuggacgcauuacaguuucuaccaagagaucccagcaggccgugaucccgaauauuggcagccggccccgcgucagaaacaucccuucccgggugucuaucuauuggacaauugugaaacccggggacauccugcugauuaauagcaccggaaaccucaucgcuccucgcggcuacuucaagauucaguccgggaaaagcucuaucaugagauccgaugcccccaucggaaaguguaauagcgcgugcauuaccccgaacggcucuaucccuaaugacaagcccuuucaaaacgucaaucggauuacauacggcgccuguccucgcuauguuaaacagaacacgcugaaacuugcuaccgggaugagaaaugugcccgaaaaacagacacggggaaucuucggcgccauugcuggguuuaucgagaacggaugggaaggcaugguggacgggugguacggauuccgccaccaaaauagcgagggcagaggccaggccgccgaucugaaguccacccaggcugcgaucgaccagauuaacgggaaacucaaccggcugaucggaaagacaaaugagaaauuccaucaaauugaaaaggaguuuucugaagucgagggcagaauccaggaucuugaaaaguauguggaggacaccaaaauugaucuguggagcuacaacgccgagcuccugguugcucuggaaaaucagcacacgaucgaccucacagauuccgagaugaacaagcuguucgaaaagaccaagaaacagcuucgcgagaaugccgaagacauggggaacggaugcuuuaagauuuaucauaagugugauaaugccugcaucggcagcauccggaacgggaccuacgaccacgauguguauagagacgaggcucugaauaaccgcuuccaaauuaaaggcgucgagcucaagucuggauacaaagacuggauccuguggauuuccuuugccaucagcugcuuccuucuguguguggcgcuccugggcuuuauuaugugggcuugccagaaggggaauauccgguguaacaucugcauuuga

SEQ ID NO: 202996 - RNA, 1701 nt, Artificial Sequence; identical to SEQ ID NO: 198927
  derived and/or modified CDS sequence (opt5) from hemagglutinin__InfluenzaA__AHC62446

SEQ ID NO: 202997 - RNA, 1701 nt, Artificial Sequence; identical to SEQ ID NO: 199054
  derived and/or modified CDS sequence (opt5) from hemagglutinin__InfluenzaA__AHC62458

SEQ ID NO: 202998 - RNA, 1701 nt, Artificial Sequence
  derived and/or modified CDS sequence (opt5) from hemagglutinin__InfluenzaA__AHC62470
augaagaccaucauugcccugagcuacauccucugccugguguucgcucagaaacuucccggcaacgacaauuccacagccacgcugugucucgggcaccaugcggucccuaacggaaccauuguuaagacaaucaccaaugaucaaauugaggugacaaacgcuaccgaacuggugcaaaauucuagcacaggcgagaucugcgacuccccgcaccagauccuugauggggaaaacuguacccugauugacgcccuccugggagauccccagugcgacggcuuucagaauaaaaagugggaucuguucgucgagagaucuaaagccuauagcaacuguuacccuuaugacgugcccgauuacgcuucccuccggucucugguugccagcuccgggacgcuugaauuuaauaacgagagcuucaauuggaccggagugacacagaacggcaccucuuccgcuugcauccgcagaagcaauaacuccuuuuucucucggcugaauuggcucacacaucugaacuuuaaguauccugcccuuaacgucaccaugcccaauaacgagcaguucgacaagcuguacauuuggggcgugcaccauccugggacggauaaagaccagaucuuucucuaugcgcaagccagcggacgcauuacaguuucuaccaagagaucccagcaggcugugaucccgaauauuggcagccggccccgcgucagaaacaucccuucccggaucucuauuuacuggacaaucgugaaacccggggauauucugcugaucaauagcaccggaaaccucauugccccucgcggcuacuucaagaucagauccgggaaaagcucuaucaugcgguccgacgcucccauuggaaaguguaauagcgaaugcaucaccccgaacggcucuauuccuaauggcaagcccuuucagaacgugaaucgcaucacauauggggccuguccuagauacgucaaacaaaacacgcugaaacuugcgaccggaaugcggaauguucccgagaagcagacacgcggcauuuucggggccaucgcuggauuuaucgaaaacggcugggaggggaugguggacggaugguauggcuucagacaccagaauagcgagggccgggggcaagccgcugaucugaaguccacccaggccgccauugaccagaucaacggaaaacucaacagacugauuggcaagacaaaugaaaaauuccaccagaucgagaaggaauuuucugagguggaagggcgcauucaagaucuugagaaguacgucgaggacaccaaaaucgaucuguggagcuauaacgcugaacuccugguggcgcuggagaaucagcauacgauugaccucacagauuccgaaaugaacaagcuguucgagaaaaccaagaaacagcuucgggaaaaugccgaggacaugggaaacggcugcuuuaagaucuaccacaagugugauaaugcuugcaucgggagcauuagaaacggcaccuaugaccaugauguuuaccgcgacgaggcccugaauaaccgguuccagaucaaaggaguggaacucaagucuggcuacaaagacuggauucuguggaucuccuuugccauuagcugcuuccuucugugugucgcucuccugggguuuaucaugugggccugccaaaagggaaauaucagauguaacauuugcaucuga

SEQ ID NO: 202999 - RNA, 1701 nt, Artificial Sequence; identical to SEQ ID NO: 202751
  derived and/or modified CDS sequence (opt5) from hemagglutinin__InfluenzaA__AHC62482

SEQ ID NO: 203000 - RNA, 1701 nt, Artificial Sequence; identical to SEQ ID NO: 198927
  derived and/or modified CDS sequence (opt5) from hemagglutinin__InfluenzaA__AHC62506

SEQ ID NO: 203001 - RNA, 1701 nt, Artificial Sequence; identical to SEQ ID NO: 199054
  derived and/or modified CDS sequence (opt5) from hemagglutinin__InfluenzaA__AHC62518

SEQ ID NO: 203002 - RNA, 1701 nt, Artificial Sequence
  derived and/or modified CDS sequence (opt5) from hemagglutinin__InfluenzaA__AHC62530
augaagaccaucauugcccugagcuacauccucugccugguguucgcucagaaaauucccggcaacgacaauuccacagccacgcuuugucuggggcaccaugcggucccuaacggaaccaucguuaagacaauuaccaaugaucaaaucgaggugacaaacgcuaccgaacucgugcagucuagcuccacaggcgagaucugcaauucuccgcaccagauucuggacggggaaaacuguacccuuaucgaugcccugcucggagacccccagugcgauggcuuucaaaauaaaaagugggaccuguucgucgagagaagcaaagcccauuccaacuguuauccuuacgaugugcccgacuaugcuucucugcggagccucguugccuccagcgggacgcuggaauuuaauaacgagucuuucaauuggaccggagugacacagaacggcaccuccagcgcuugcauucgcagaucuaauaacuccuuuuucagccggcuuaauuggcugacacaccucaacuuuaaguacccugcccugaacgucaccaugcccaauaacgagcaguucgauaaacuuuauaucuggggcgugcaucacccugggacggacaaagaucagauuuuucuguacgcgcaagccucuggacgcaucacaguuuccaccaagagaagccagcaggcugugauuccgaauaucggcucccggccccgcgucagaaacaucccuucucgggugagcauuuauuggacaaucgugaaacccggggacauucuccugaucaauuccaccggaaaccugauugccccucgcggcuacuucaagaucagaagcgggaaaucuuccaucaugcggagcgaugcucccauuggaaaguguaauucugccugcaucaccccgaacggcagcauuccuaaugacaagcccuuucagaacgucaaucgcaucacauacggcgcguguccuagauauguuaaacaaaacacgcucaagcuggccaccgggaugcggaaugugcccgaaaaacagacacgcggaauuuucggcgcuaucgccggguuuaucgagaacggaugggaaggcaugguggacgggugguacggauucagacaccaaaauuccgagggccggggccaggcugccgaucuuaagucuacccaggccgcuauugaccagaucaacgggaaacugaacagacucauuggaaagacaaaugagaaauuccaucagaucgaaaaggaguuuagcgaagucgagggccgcauucaagaucuggaaaaguauguggaggacaccaaaaucgaucuuugguccuacaacgcggagcugcucguugcccuggaaaaucagcacacgauugaccugacagauagcgagaugaacaaacucuucgaaaagaccaagaagcagcugcgggagaaugcugaagacauggggaacggaugcuuuaagaucuaucauaagugugauaaugccugcaucggcucuauuagaaacgggaccuacgaccacgauguguaucgcgacgaggcccuuaauaaccgguuccagaucaaaggcgucgagcugaaguccggauacaaagacuggauucucuggaucagcuuugcuauuucuugcuuccugcuuuguguggcccugcucggcuuuaucaugugggcgugccaaaaggggaauaucagauguaacauuugcaucuga

SEQ ID NO: 203003 - RNA, 1701 nt, Artificial Sequence; identical to SEQ ID NO: 202723
  derived and/or modified CDS sequence (opt5) from hemagglutinin__InfluenzaA__AHC62542

SEQ ID NO: 203004 - RNA, 1701 nt, Artificial Sequence; identical to SEQ ID NO: 198927
  derived and/or modified CDS sequence (opt5) from hemagglutinin__InfluenzaA__AHC62554

SEQ ID NO: 203005 - RNA, 1701 nt, Artificial Sequence
  derived and/or modified CDS sequence (opt5) from hemagglutinin__InfluenzaA__AHC62566
augaagaccaucauugcccugagcuacauccucugccugguguucgcucagaaacuucccggcaacgacaauuccacagccacgcugugucucgggcaccaugcggucccuaacggaaccaugguuaagacaauuaccaaugaucaaaucgaggugacaaacgcuaccgaacuggugcaaaauucuagcacaggcgagauuugcgacuccccgcaccagauccuugauggggaaaacuguacccugaucgacgcccuccugggagauccccagugcgacggcuuucagaauaaaaagugggaucuguucgucgagagaucuaaagccuauagcaacuguuacccuuaugacgugcccgauuacgcuucccuccggucucugguugccagcuccgggacgcuugaauuuaauaacgagagcuucaauuggaccggagugacacagaacggcaccucuuccgcuugcauucgcagaagcaauaacuccuuuuucucucggcugaauuggcucacacaucugaacuuuaaguauccugcccuuaacgucaccaugcccaauaacgagcaguucgacaagcuguacaucuggggcgugcaccauccugggacggauaaagaccagauuuuucucuaugcgcaagccagcggacgcaucacaguuucuaccaagagaucccagcaggcugugauuccgaauaucggcagccggccccgcgucagaaacauuccuucccggaucucuaucuacuggacaauugugaaacccggggauauccugcugauuaauagcaccggaaaccucaucgccccucgcggcuacuucaagauuagauccgggaaaagcucuaucaugcgguccgacgcucccaucggaaaguguaauagcgaaugcauuaccccgaacggcucuaucccuaaugacaagcccuuucagaacgugaaucgcauuacauauggcgccuguccuagauacgucaaacaaaacacgcugaaacuugcgaccgggaugcggaauguucccgagaagcagacacgcggaaucuucggcgccauugcuggguuuaucgaaaacggaugggagggcaugguggaugggugguauggauucagacaccagaauagcgagggccggggccaagccgcugaccugaaguccacccaggccgccaucgaucagauuaacgggaaacucaacagacugaucggaaagacaaaugaaaaauuccaccagauugagaaggaauuuucugagguggaaggccgcauccaagaccuugagaaguacgucgaggauaccaaaauugaccuguggagcuauaacgcugaacuccugguggcgcuggagaaucagcauacgaucgaucucacagacuccgaaaugaacaagcuguucgagaaaaccaagaaacagcuucgggaaaaugccgaggauauggggaacggaugcuuuaagauuuaccacaagugugacaaugcuugcaucggcagcaucagaaacgggaccuaugaucaugacguuuaccgcgacgaggcccugaauaaccgguuccagauuaaaggcguggaacucaagucuggauacaaagauuggauccuguggauuuccuuugccaucagcugcuuccuucugugugucgcucuccugggcuuuauuaugugggccugccaaaaggggaauaucagauguaacaucugcauuuga

SEQ ID NO: 203006 - RNA, 1701 nt, Artificial Sequence; identical to SEQ ID NO: 198927
  derived and/or modified CDS sequence (opt5) from hemagglutinin__InfluenzaA__AHC62578

SEQ ID NO: 203007 - RNA, 1701 nt, Artificial Sequence; identical to SEQ ID NO: 198927
  derived and/or modified CDS sequence (opt5) from hemagglutinin__InfluenzaA__AHC62590

SEQ ID NO: 203008 - RNA, 1701 nt, Artificial Sequence; identical to SEQ ID NO: 199054
  derived and/or modified CDS sequence (opt5) from hemagglutinin__InfluenzaA__AHC62602

SEQ ID NO: 203009 - RNA, 1701 nt, Artificial Sequence
  derived and/or modified CDS sequence (opt5) from hemagglutinin__InfluenzaA__AHC62614
augaagaccaucauugcccugagcuacauccucugccugguguucgcucagaaacuucccggcaacgacaauuccacagccacgcugugucucgggcaccaugcggucccuaacggaaccauuguuaagacaaucaccaaugaucaaauugaggugacaaacgcuaccgaacuggugcagucuagcuccacaggcgagaucugcaauucuccgcaccagaucauugacggggaaaacuguacccuuaucgaugcccugcucggagacccccagugcgauggcuuucaaaauaaaaagugggaccuguucgucgagagaagcaaagcccauuccaacuguuauccuuacgaugugcccgacuaugcuucucugcggagccucguugccuccagcgggacgcuggaauuuaauaacgagucuuucaauuggaccggagugacacagaacggcaccuccagcgcuugcauucgcggcucuaauaacuccuuuuucagcagacuuaauuggcugacacaccucaacuuuaaguacccugcccugaacgucaccaugcccaauaacgagcaguucgauaaacuuuauaucuggggagugcaucacccugggacggacaaagaucagauuuuucuguacgcgcaagccucuggccggaucacaguuuccaccaagcgcagccagcaggcugugauuccgaauaucggguccagaccccggguccgcaacaucccuucuagagugagcauuuauuggacaaucgugaaacccggagacauucuccugaucaauuccaccggcaaccugauugccccucggggguacuucaagauccgcagcggaaaaucuuccaucaugagaagcgaugcucccauuggcaaguguaauucugccugcaucaccccgaacggcagcauuccuaaugacaagcccuuucagaacgucaaucggaucacauacggggcguguccucgcuauguuaaacaaaacacgcucaagcuggccaccggaaugagaaaugugcccgaaaaacagacacggggcauuuucggggcuaucgccggauuuaucgagaacggcugggaagggaugguggacggaugguacggcuuccgccaccaaaauuccgagggcagagggcaggcugccgaucuuaagucuacccaggccgcuauugaccagaucaacggaaaacugaaccggcucauuggcaagacaaaugagaaauuccaucagaucgaaaaggaguuuagcgaagucgaggggcgcauucaagaucuggaaaaguauguggaggacaccaaaaucgaucuuugguccuacaacgcggagcugcucguugcccuggaaaaucagcacacgauugaccugacagauagcgagaugaacaaacucuucgaaaagaccaagaagcagcugagagagaaugcugaagacaugggaaacggcugcuuuaagaucuaucauaagugugauaaugccugcaucgggucuauucggaacggcaccuacgaccacgauguguauagagacgaggcccuuaauaaccgcuuccagaucaaaggagucgagcugaaguccggcuacaaagacuggauucucuggaucagcuuugcuauuucuugcuuccugcuuuguguggcccugcucggguuuaucaugugggcgugccaaaagggaaauauccgguguaacauuugcaucuga

SEQ ID NO: 203010 - RNA, 1701 nt, Artificial Sequence; identical to SEQ ID NO: 202690
  derived and/or modified CDS sequence (opt5) from hemagglutinin__InfluenzaA__AHC62626

SEQ ID NO: 203011 - RNA, 1701 nt, Artificial Sequence; identical to SEQ ID NO: 199054
  derived and/or modified CDS sequence (opt5) from hemagglutinin__InfluenzaA__AHC62638

SEQ ID NO: 203012 - RNA, 1701 nt, Artificial Sequence; identical to SEQ ID NO: 202854
  derived and/or modified CDS sequence (opt5) from hemagglutinin__InfluenzaA__AHC62650

SEQ ID NO: 203013 - RNA, 1701 nt, Artificial Sequence
  derived and/or modified CDS sequence (opt5) from hemagglutinin__InfluenzaA__AHC62662
augaagaccaucauugcccugagcuacauccucugccugguguucgcucagaaacuucccggcaacgacaauuccacagccacgcugugucucgggcaccaugcggucccuaacggaaccauuguuaagacaaucaccaaugaucaaauugaggugacaaacgcuaccgaacuggugcagucuagcuccacaggcgagaucugcaauucuccgcaccagauccuugacggggaaaacuguacccugauugaugcccuccugggagacccccagugcgauggcuuucaaaauaaaaagugggaccuguucgucgagagaagcaaagcccauuccucuuguuauccuuacgaugugcccgacuaugcuagccuccggucccugguugccagcucugggacgcuugaauuuaacaaugaguccuucaacuggaccggagugacacagaauggcaccagcucugcuugcauccgcggcuccaacaauagcuuuuucucuagacugaacuggcucacacaccugaauuuuaaguacccugcccuuaacgucaccaugcccaacaaugagcaguucgauaagcuguauauuuggggagugcaucacccugggacggacaaagaucagaucuuucucuacgcgcaagccuccggccggauuacaguuagcaccaagcgcucccagcaggcugugaucccgaacauugggucuagaccccggguccgcaauaucccuagcagaguguccaucuauuggacaauugugaaacccggagacauccugcugauuaacagcaccggcaaucucaucgccccucggggguacuucaagauucgcucuggaaaauccagcaucaugagaucugaugcucccaucggcaaguguaacagcgccugcauuaccccgaauggcuccaucccuaacgacaagcccuuucagaaugucaaccggauuacauacggggcguguccucgcuauguuaaacaaaauacgcugaaacuugccaccggaaugagaaacgugcccgaaaaacagacacggggcaucuucggggcuauugccggauuuaucgagaauggcugggaagggaugguggacggaugguacggcuuccgccaccagaacucugagggcagagggcaagcugccgaucucaagagcacccaggccgcuaucgaccagauuaauggaaaacugaaccggcugaucggcaagacaaacgagaaauuccaucagauugaaaaggaguuuuccgaagucgaggggagaauccaagaucuugaaaaguauguggaggacaccaaaauugaucuguggagcuacaaugcggagcuccugguugcccuggaaaaccagcacacgaucgaccucacagauucugagaugaauaagcuguucgaaaagaccaagaaacagcuucgcgagaacgcugaagacaugggaaauggcugcuuuaagauuuaucauaagugugauaacgccugcaucggguccauccggaauggcaccuacgaccacgauguguauagagacgaggcccugaacaaucgcuuccagauuaaaggagucgagcucaagagcggcuacaaagacuggauccuguggauuucuuuugcuaucuccugcuuccuucuguguguggcccuccugggguuuauuaugugggcgugccaaaagggaaacauccgguguaauaucugcauuuga

SEQ ID NO: 203014 - RNA, 1701 nt, Artificial Sequence
  derived and/or modified CDS sequence (opt5) from hemagglutinin__InfluenzaA__AHC62674
augaagaccaucauugcccugagcuacauccucugccugguguucgcucagaaacuucccggcaacgacaauuccacagccacgcugugucucgggcaccaugcggucccuaacggaaccauuguuaagacaaucaccaaugaucaaauugaggugacaaacgcuaccgaacuggugcagucuagcuccacaggcgagaucugcaauucuccgcaccagauccuugacggggaaaacuguacccugauugaugcccuccugggagacccccagugcgauggcuuucaaaauaaaaagugggaccuguucgucgagagaagcaaagcccauuccaacuguuauccuuacgaugugcccgacuaugcuucucuccggagccugaucgccuccagcgggacgcuugaauuuaauaacgagucuuucaauuggaccggaguuacacagaacggcaccuccagcgcuugcauucgcggcucuaauaacuccuuuuucagcagacugaauuggcucacacaccugaacuuuaaguacccugcccuuaacgugaccaugcccaauaacgagcaguucgauaagcuguauaucuggggaguccaucacccugggacggacaaagaucagauuuuucucuacgcgcaagccucuggccggaucacaguguccaccaagcgcagccagcaggcuguuauuccgaauaucggguccagaccccgggugcgcaacaucccuucuagagucagcauuuauuggacaaucgugaaacccggagacauucugcugaucaauuccaccggcaaccucauugccccucggggguacuucaagauccgcagcggaaaaucuuccaucaugagaagcgaugcucccauuggcaaguguaauucugccugcaucaccccgaacggcagcauuccuaaugacaagcccuuucagaacgugaaucggaucacauacggggcguguccucgcuaugucaaacaaaacacgcugaaacuugccaccggaaugagaaauguucccgaaaaacagacacggggcauuuucggggcuaucgccggauuuaucgagaacggcugggaagggaugguggacggaugguacggcuuccgccaccaaaauuccgagggcagagggcaggcugccgaucugaagucuacccaggccgcuauugaccagaucaacggaaaacucaaccggcugauuggcaagacaaaugagaaauuccaucagaucgaaaaggaguuuagcgaaguggaggggcgcauucaagaucuugaaaaguaugucgaggacaccaaaaucgaucugugguccuacaacgcggagcuccugguggcccuggaaaaucagcacacgauugaccucacagauagcgagaugaacaagcuguucgaaaagaccaagaaacagcuuagagagaaugcugaagacaugggaaacggcugcuuuaagaucuaucauaagugugauaauaccugcaucgagucuauucggaacgggacauacgaccacgauguuuauagagacgaggcccugaauaaccgcuuccagaucaaaggcguggaacucaaguccggauacaaagacuggauucuguggaucagcuuugccauuucuugcuuccuucugugugucgcucuccugggcuuuaucaugugggccugccaaaaggggaauauccgguguaacauuugcaucuga

SEQ ID NO: 203015 - RNA, 1701 nt, Artificial Sequence; identical to SEQ ID NO: 202132
  derived and/or modified CDS sequence (opt5) from hemagglutinin__InfluenzaA__AHE37972

SEQ ID NO: 203016 - RNA, 1701 nt, Artificial Sequence
  derived and/or modified CDS sequence (opt5) from hemagglutinin__InfluenzaA__AHE37973
augaaggccauccuggugguccuccuguacaccuucgcuacagccaacgcggacacgcuuugcauuggcuaucacgcuaauaacagcaccgauacaguugacaccgugcuggagaaaaaugugacagucacccauuccgugaaccuccuggaagauaagcacaaugggaaacuuuguaagcugagaggaguugcuccccuccaucugggcaaaugcaacaucgccggguggauucugggaaauccugagugugaaucucucagcacagccuccucuuggagcuacaucguggagaccuccucuagcgacaacggcacgugcuauccgggggauuuuauuaauuacgaagaacugcgggagcagcuuuccagcgucucuuccuucgaacgcuuugagaucuuccccaagaccagcucuuggccuaaccacgacuccaauaagggagugacagccgcuuguccccaugccggcaccaagagcuuuuauaaaaaccugaucuggcucguuaaaaagggcaauucuuacccuaaacuguccaagagcuauauuaacgauaaggggaaagaagugcuuguccuguggggaauccaccaccccuccacaaccgcggaccaacagucucucuaccagaaugccgaugcuuacguguucgugggcacgagcagauauuccaagaaauuuaagccugagauugccauccggccgaaaguccgcgaccaggaggggagaauuaacuacuauuggacacugaucgaacccggagauaagauuaccuucgaggcuacaggcaaccugguugugccucgguacgccuuugcgauggaacgcaaugccgggagcggaaucaucauuucugacacccccgugcaugauugcaacaccacaugucaaacgccugagggcgcuaucaauaccucccuccccuuccagaacauucacccgaucacaauuggcaaaugcccuaaguaugucaagagcaccaaacugagacuugccacagggcugcggaaugugcccucuauccagagccgcggacucuuuggcgcuaucgccggguucauugaaggaggcuggaccgggaugguugacggaugguacggcuaucaucaccagaacgagcaaggcuccggguacgccgcugaccugaagucuacgcagaaugcgaucgauaaaauuacaaacaaggugaauagcgucaucgagaaaaugaacacccaguuuaccgccgugggaaaggaguucaaucaccuugagaagagaauugaaaaccugaauaaaaagguugacgauggcuuccucgacaucuggacauacaacgcugagcugcuggugcuccuggaaaaugagcggacccuugauuaucaugacuccaacgucaaaaaccuguacgagaaggugcgcaaucagcucaaaaacaaugccaaggaaaucgggaacggauguuuugaguucuaucacaagugcgauaauacauguauggaaagcgucaaaaacggcacguacgacuauccuaaguacucugaggaagccaaacugaauagagagaagauugauggggugaaacuugaguccacccggaucuaucaaauucuggcuaucuacagcacaguugccucuucccucgugcuggucgugagccugggcgcgauuuccuuuuggaugugcucuaacggaagccuccagugccgcaucuguauuuga

SEQ ID NO: 203017 - RNA, 1701 nt, Artificial Sequence
  derived and/or modified CDS sequence (opt5) from hemagglutinin__InfluenzaA__AHE37974
augaaggccauccuggugguccuccuguacaccuucgcuacagccaacgcggacacgcuuugcauuggcuaucacgcuaauaacagcaccgauacaguugacaccgugcuggagaagaaugugacagucacccauuccgugaaccuccuggaagauaagcacaaugggaaacuuuguaagcugagaggaguugcuccccuccaucugggcaaaugcaacaucgccggguggauucugggaaauccugagugugaaucucucagcacagccuccucuuggagcuacaucguggagaccuccucuagcgacaacggcacgugcuauccgggggauuuuauuaauuacgaagaacugcgggagcagcuuuccagcgucucuuccuucgaacgcuuugagauguuccccaagaccagcucuuggccuaaccacgacuccaauaagggagugacagccgcuuguccccaugccggcgcgaaaucuuuuuauaagaaccugaucuggcucguuaaaaagggcaauagcuacccuaaacuguccaagagcuauaucaacgauaaggggaaagaagugcuuguccuguggggcauucaccaccccuccaccacagccgaccaacagucucucuaccagaaugcugaugccuacguguucgugggaaccagcaaguauuccaaaaaguuuaaaccugagaucgcuauuagaccgaagguccgggaccaggaggggcgcaugaacuacuauuggacgcugaucgaacccggagauaaaauuacauucgaggccaccggcaaccugguugugccuagauacgcguuugccauggaacggaaugcugggagcggaaucauuaucucugacacacccgugcaugauugcaacaccaccugucaaacaccugagggcgccaucaauacgucccuccccuuccagaacauucacccgaucaccauuggcaagugcccuaaguaugucaaaagcacaaagcugcgccuugcuaccgggcugagaaaugugcccucuauccagagccggggacucuuuggcgccauugccggguucaucgaaggaggcuggacagggaugguugacggaugguacggcuaucaucaccagaacgagcaaggcuccggguacgcugcggaccugaaaucuacccagaaugccaucgauaagauuacgaacaaagugaauagcgucaucgagaagaugaacacacaguuuaccgcugugggaaaggaguucaaucaccuugagaaacgcauugaaaaccugaauaagaaaguugacgauggcuuccucgacaucuggaccuacaacgccgagcugcuggugcuccuggaaaaugagagaacacuugauuaucaugacuccaacgucaagaaccuguacgagaaagugcggaaucagcucaagaacaaugccaaggaaauugggaacggauguuuugaguucuaucacaaaugcgauaauaccuguauggaaagcgucaagaacggcacauacgacuauccuaaauacucugaggaagcuaagcugaaucgcgagaaaaucgauggggugaaacuugaguccacgagaaucuaucaaauucuggccaucuacagcaccguugcgucuucccucgugcuggucgugagccugggcgcuauuuccuuuuggaugugcucuaacggaagccuccagugccggaucuguauuuga

SEQ ID NO: 203018 - RNA, 1701 nt, Artificial Sequence; identical to SEQ ID NO: 202112
  derived and/or modified CDS sequence (opt5) from hemagglutinin__InfluenzaA__AHE37975

SEQ ID NO: 203019 - RNA, 1701 nt, Artificial Sequence
  derived and/or modified CDS sequence (opt5) from hemagglutinin__InfluenzaA__AHE37976
augaaggccauccuggugguccuccuguacaccuucgcuacagccaacgcggacacgcuuugcauuggcuaucacgcuaauaacagcaccgauacaguugacaccgugcuggagaaaaaugugacagucacccauuccgugaaccuccuggaagauaagcacaaugggaaacuuuguaagcugagaggaguugcuccccuccaucugggcaaaugcaacaucgccggguggauucugggaaauccugagugugaaucucucagcgccgccuccucuuggagcuacaucguggagacauccucuagcaacaauggaaccugcuauccgggggacuuuauuaacuacgaagaacugcgggagcagcuuuccagcgucucuuccuucgaacgcuuugagaucuuccccaagacgagcucuuggccuaaucacgauuccaacaagggagugaccgcugccuguccccaugcgggcgccaagagcuuuuauaagaaucugaucuggcucguuaaaaagggcaacucuuacccuaaacuguccaagagcuauauuaaugacaaggggaaagaaauccuugugcuguggggcauucaccaccccuccacaaccacagaucaacagucucucuaccagaacgcugacgccuacgucuucgugggcaccagcagauauuccaagaaauuuaagccugagaucgcuauucggccgaaagugcgcgaucaggaggggagaaugaacuacuauuggacgcugaucgaacccggagacaagauuacauucgaggccaccggcaaucuggucguuccucgguacgcguuugccauggaacgcaacgcugggagcggaaucaucauuucugauacacccgugcaugacugcaauaccaccugucaaacaccugagggcgccaucaacacgucccuccccuuccagaauauucacccgaucaccauuggcaaaugcccuaaguaugugaaaagcacaaaacugagacuugcuaccgggcugcggaacguccccucuauccagagccgcggacucuuuggcgccaucgccggguucauugaaggaggcuggacagggaugguggauggaugguacggcuaucaucaccagaaugagcaaggcuccggguacgcugcggaccugaagucuacccagaacgccaucgacaaaauuacgaauaagguuaacagcgugaucgagaaaaugaauacacaguuuaccgcugucggaaaggaguucaaccaccuugagaagagaauugaaaaucugaacaaaaagguggaugacggcuuccucgauaucuggaccuacaaugccgagcugcugguucuccuggaaaacgagcggacacuugacuaucaugauuccaacgugaaaaaucuguacgagaagguccgcaaccagcucaaaaauaacgccaaggaaaucgggaauggauguuuugaguucuaucacaagugcgacaacaccuguauggaaagcgugaaaaauggcacauacgauuauccuaaguacucugaggaagcuaaacugaacagagggaagauugacggcgucaaacuugaguccacgcggaucuaucaaauucuggccaucuacagcaccguggcgucuucccucguucugguggucagccugggagcuauuuccuuuuggaugugcucuaauggcagccuccagugccgcaucuguauuuga

SEQ ID NO: 203020 - RNA, 1701 nt, Artificial Sequence; identical to SEQ ID NO: 202112
  derived and/or modified CDS sequence (opt5) from hemagglutinin__InfluenzaA__AHE37977

SEQ ID NO: 203021 - RNA, 1701 nt, Artificial Sequence; identical to SEQ ID NO: 202132
  derived and/or modified CDS sequence (opt5) from hemagglutinin__InfluenzaA__AHE37978

SEQ ID NO: 203022 - RNA, 1701 nt, Artificial Sequence; identical to SEQ ID NO: 202112
  derived and/or modified CDS sequence (opt5) from hemagglutinin__InfluenzaA__AHE37979

SEQ ID NO: 203023 - RNA, 1701 nt, Artificial Sequence
  derived and/or modified CDS sequence (opt5) from hemagglutinin__InfluenzaA__AHE37980
augaaggccauccuggugguccuccuguacaccuucgcuacagccaacgcggacacgcuuugcauuggcuaucacgcuaauaacagcaccgauacaguugacaccgugcuggagaaaaaugugacagucacccauuccgugaaccuccuggaagauaagcacaaugggaaacuuuguaagcugagaggaguuacaccccuccaucugggcaaaugcaacaucgccggguggauucugggaaauccugagugugaaucucucagcaccgccuccucuuggagcuacaucguggagacguccucuagcgacaacgggaccugcuauccgggcgauuuuauuaauuacgaagaacugcgggagcagcuuuccagcgucucuuccuucgaacgcuuugagaucuuccccaagacaagcucuuggccuaaccacgacuccaauaagggagugaccgcugccuguccccaugcuggcgccaagagcuuuuauaaaaaccugaucuggcucguuaaaaagggcaauucuuacccuaaacuguccaagagcuauauuaacgauaaggggaaagaagugcuuguccuguggggaauccaccaccccuccacaaccgcggaccaacagucucucuaccagaaugccgaugcuuacguguucgugggcacgagcagauauuccaagaaauuuaagccugagauugccauccggccgaaaguccgcgaccaggaggggagaaugaacuacuauuggacacugauugaacccggagauaagaucaccuucgaggcuacaggcaaccugguugugccucgguacgccuuugcgauggaacgcaaugccgggagcggaauuaucaucucugacacccccgugcaugauugcaacaccacaugucaaacgccugagggcgcuauuaauaccucccuccccuuccagaacauccacccgauuacaaucggcaaaugcccuaaguaugucaagagcaccaaacugagacuugccacagggcugcggaaugugcccucuauucagagccgcggacucuuuggcgcuaucgccggguucaucgaaggaggcuggaccgggaugguugacggaugguacggcuaucaucaccagaacgagcaaggcuccggguacgccgcugaccugaagucuacgcagaaugcgauugauaaaaucacaaacaaggugaauagcgucauugagaaaaugaacacccaguuuaccgccgugggaaaggaguucaaucaccuugagaagagaaucgaaaaccugaauaaaaagguugacgauggcuuccucgacauuuggacauacaacgcugagcugcuggugcuccuggaaaaugagcggacccuugauuaucaugacuccaacgucaaaaaccuguacgagaaggugcgcaaucagcucaaaaacaaugccaaggaaaucgggaacggauguuuugaguucuaucacaagugcgauaauacauguauggaaagcgucaaaaacggcacguacgacuauccuaaguacucugaggaagccaaacugaauagagagaagaucgauggggugaaacuugaguccacccggauuuaucaaauccuggcuauuuacagcacaguugccucuucccucgugcuggucgugagccugggcgcgaucuccuuuuggaugugcucuaacggaagccuccagugccgcauuuguaucuga

SEQ ID NO: 203024 - RNA, 1701 nt, Artificial Sequence
  derived and/or modified CDS sequence (opt5) from hemagglutinin__InfluenzaA__AHE37981
augaaggccauccuggugguccuccuguacaccuucgcuacagccaacgcggacacgcuuugcauuggcuaucacgcuaauaacagcaccgauacaguugacaccgugcuggagaagaaugugacagucacccauuccgugaaccuccuggaagauaagcacaaugggaaacuuuguaagcugagaggaguugcuccccuccaucugggcaaaugcaacaucgccggguggauucugggaaauccugagugugaaucucucagcacagccuccucuuggagcuacaucguggagaccuccucuagcgacaacggcacgugcuauccgggggauuuuauuaauuacgaagaacugcgggagcagcuuuccagcgucucuuccuucgaacgcuuugagauguuccccaagaccagcucuuggccuaaccacgacuccaauaagggagugacagccgcuuguccccaugccggcgcgaaaucuuuuuauaagaaccugaucuggcucguuaaaaagggcaauagcuacccuaaacuguccaagagcuauaucaacgauaaggggaaagaagugcuuguccuguggggcauucaccaccccuccaccacagccgaccaacagucucucuaccagaaugcugaugccuacguguucgugggaaccagcaaguauuccaaaaaguuuaaaccugagaucgcuauuagaccgaagguccgggaccaggaggggcgcaugaacuacuauuggacgcugaucgaacccggagauaaaauuacauucgaggccaccggcaaccugguugugccuagauacgcguuugccauggaacggaaugcugggagcggaaucauuaucucugacacacccgugcaugauugcaacaccaccugucaaacaccugagggcgccaucaauacgucccuccccuuccagaacauucacccgaucaccauuggcaagugcccuaaguaugucaaaagcacaaagcugcgccuugcuaccgggcugagaaaugugcccucuauccagagccggggacucuuuggcgccauugccggguucaucgaaggaggcuggacagggaugguugacggaugguacggcuaucaucaccagaacgagcaaggcuccggguacgcugcggaccugaaaucuacccagaaugccaucgauaagauuacgaacaaagugaauagcgucaucgagaagaugaacauucaguuuacagcugugggaaaggaguucaaucaccuugagaaacgcaucgaaaaccugaauaagaaaguugacgauggcuuccucgacauuuggaccuacaacgccgagcugcuggugcuccuggaaaaugagagaacccuugauuaucaugacuccaacgucaagaaccuguacgagaaagugcggaaucagcucaagaacaaugccaaggaaaucgggaacggauguuuugaguucuaucacaaaugcgauaauacauguauggaaagcgucaagaacggcaccuacgacuauccuaaauacucugaggaagcuaagcugaaucgcgagaaaaucgauggggugaaacuugaguccacaagaauuuaucaaauccuggccauuuacagcacgguugcgucuucccucgugcuggucgugagccugggcgcuaucuccuuuuggaugugcucuaacggaagccuccagugccggauuuguaucuga

SEQ ID NO: 203025 - RNA, 1701 nt, Artificial Sequence; identical to SEQ ID NO: 202112
  derived and/or modified CDS sequence (opt5) from hemagglutinin__InfluenzaA__AHE37982

SEQ ID NO: 203026 - RNA, 1701 nt, Artificial Sequence
  derived and/or modified CDS sequence (opt5) from hemagglutinin__InfluenzaA__AHE37983
augaaggccauccuggugguccuccuguacaccuucgcuacagccaacgcggacacgcuuugcauuggcuaucacgcuaauaacagcaccgauacaguugacaccgugcuggagaagaaugugacagucacccauuccgugaaccuccuggaagauaagcacaaugggaaacuuuguaagcugagaggaguugcuccccuccaucugggcaaaugcaacaucgccggguggauucugggaaauccugagugugaaucucucagcacagccuccucuuggagcuacaucguggagaccuccucuagcgacaacggcacgugcuauccgggggauuuuauuaauuacgaagaacugcgggagcagcuuuccagcgucucuuccuucgaacgcuuugagaucuuccccaagaccagcucuuggccuaaccacgacuccaauaagggagugacagccgcuuguccccaugccggcgcgaaaucuuuuuauaagaaccugaucuggcucguuaaaaagggcaauagcuacccuaaacuguccgaaagcuauauuaacgauaaggggaaggaggugcuuguccuguggggaauccaccaccccuccaccacagccgaccaacagucucucuaccagaaugcugaugccuacguguucgugggcaccagcagauauuccaaaaaguuuaaaccugagauugcuauccggccgaagguccgcgaccaggaagggagaaugaacuacuauuggacgcugauugagcccggagauaaaaucacauucgaagccaccggcaaccugguugugccucgguacgcguuugccauggagcgcaaugcugggagcggaauuaucaucucugacacacccgugcaugauugcaacaccaccugucaaacaccugaaggcgccauuaauacgucccuccccuuccagaacauccacccgauuaccaucggcaagugcccuaaauaugucaagagcacaaagcugagacuugcuaccgggcugcggaaugugcccucuauucagagccgcggacucuuuggcgccaucgccggguucaucgagggaggcuggacagggaugguugacggaugguacggcuaucaucaccagaacgagcaaggcuccggguacgcugcggaccugaaaucuacccagaaugccauugauaagaucacgaacaaagugaauagcgucauugaaaagaugaacacacaguuuaccgcugugggaaaagaguucaaucaccuugaaaagagaaucgagaaccugaauaagaaaguugacgauggcuuccucgacauuuggaccuacaacgccgaacugcuggugcuccuggagaaugagcggacacuugauuaucaugacuccaacgucaagaaccuguacgaaaaagugcgcaaucagcucaagaacaaugccaaagagaucgggaacggauguuuugaguucuaucacaagugcgauaauaccuguauggagagcgucaagaacggcacauacgacuauccuaaauacucugaagaggcuaagcugaauagagagaaaaucgauggggugaaacuugaauccacgcggauuuaucaaauccuggccauuuacagcaccguugcgucuucccucgugcuggucgugagccugggcgcuaucuccuuuuggaugugcucuaacggaagccuccagugccgcauuuguaucuga

SEQ ID NO: 203027 - RNA, 1701 nt, Artificial Sequence
  derived and/or modified CDS sequence (opt5) from hemagglutinin__InfluenzaA__AHE37984
auggaggccauccuggugguccuccuguacaccuucgcuacagccaacgcggacacgcuuugcauuggcuaucacgcuaauaacagcaccgauacaguugacaccgugcuggaaaagaaugugacagucacccauuccgugaaccuccuggaggauaagcacaaugggaaacuuuguaagcugagaggaguugcgccccuccaucugggcaagugcaacaucgccggguggauucugggaaauccugaaugugagucucucagcacagcuuccucuuggagcuacaucguggaaaccuccucuagcgacaacggcacgugcuauccgggggauuuuauuaauuacgaggagcugcgggaacagcuuuccagcgucucuuccuucgagcgcuuugaaaucuuccccaaaaccagcucuuggccuaaccacgacuccaauaagggagugacagccgcuuguccccaugccggcgccaagagcuuuuauaaaaaccugaucuggcucguuaagaaaggcaauucuuacccuaagcuguccaaaagcuauauuaacgauaaggggaaggaggugcuuguccuguggggaauccaccaccccuccaccacagccgaccaacagucucucuaccagaaugcugaugccuacguguucgugggcaccagcagauauuccaaaaaguuuaaaccugagauugcuauccggccgaagguccgcgaccaggaagggagaaugaacuacuauuggacgcugauugagcccggagauaaaaucacauucgaagccaccggcaaccugguugugccucgguacgcguuugccauggagcgcaaugcugggagcggaauuaucaucucugacacacccgugcaugauugcaacaccaccugucaaacaccugaaggcgccauuaauacgucccuccccuuccagaacauccacccgauuaccaucggcaagugcccuaaauaugucaagagcacaaagcugagacuugcuaccgggcugcggaaugugcccucuauucagagccgcggacucuuuggcgccaucgccggguucaucgagggaggcuggacagggaugguugacggaugguacggcuaucaucaccagaacgagcaaggcuccggguacgcugcggaccugaaaucuacccagaaugccauugauaagaucacgaacaaagugaauagcgucauugaaaagaugaacacacaguuuaccgcugugggaaaagaguucaaucaccuugaaaagagaaucgagaaccugaauaagaaaguugacgauggcuuccucgacauuuggaccuacaacgccgaacugcuggugcuccuggagaaugagcggacacuugauuaucaugacuccaacgucaagaaccuguacgaaaaagugcgcaaucagcucaagaacaaugccaaagagaucgggaacggauguuuugaguucuaucacaagugcgauaauaccuguauggaaagcgucaagaacggcacauacgacuauccuaaauacucugaagaggcuaagcugaauagagagaaaaucgauggggugaaacuugaauccacgcggauuuaucaaauccuggccauuuacagcaccguugcgucuucccucgugcuggucgugagccugggcgcuaucuccuuuuggaugugcucuaacggaagccuccagugccgcauuuguaucuga

SEQ ID NO: 203028 - RNA, 1701 nt, Artificial Sequence
  derived and/or modified CDS sequence (opt5) from hemagglutinin__InfluenzaA__AHE37985
augaagaccaucauugcccugagcuacauccucugccugguguucgcucaggagcuucccggcaacgacgauuccacagccacgcugugucucgggcaccaugcggucccuaauggaaccauuguuaaaacaaucaccaacgaccaaauugaagugacaaaugcuaccgagcuggugcagucuagcuccacaggcgaaaucugcaacucuccgcaccagauccuugauggggagaauuguacccugauugacgcccuccugggagauccccagugcgacggcuuucaaaacaagaaaugggaucuguucgucgaaagaagcaaggcccauuccaauuguuauccuuacgacgugcccgauuaugcuucucuccggagccugguugccuccagcgggacgcuugaguuuaacaaugagucuuucaacuggaccggagugacacagaauggcaccuccagcgcuugcauccgcagaucuaacaauuccuuuuucagccggcugaacuggcucacacaccugaauuuuaaauacccugcccuuaacgucaccaugcccaacaaugaacaguucgacaagcuguauauuuggggcgugcaucacccugggacggauaaggaccagaucuuucucuacgcgcaagccucuggacgcauuacaguuuccaccaaaagaagccagcaggcugugaucccgaacauuggcucccggccccgcgucagaaauaucccuucucgggugagcaucuauuggacaauugugaagcccggggauauccugcugauuaacuccaccggaaaucucaucgccccucgcggcuacuucaaaauuagaagcgggaagucuuccaucaugaaaagcgacgcucccaucggaaaguguaacucugccugcauuaccccgaauggcagcaucccuaacgacaagcccuuucagaaugucaaccggauuacauacggcgcguguccucgcuauguuaaacaaaauacgcugaaacuugccaccgggaugagaaacgugcccgagaagcagacacggggaaucuucggcgcuauugccggguuuaucgaaaauggaugggagggcaugguggaugggugguacggauuccgccaccagaacuccgagggcagaggccaagcugccgaccugaagucuacccaggccgcuaucgaucagauuaaugggaaacucaaccggcugaucggaaagacaaacgaaaaauuccaucagauugagaaggaauuuagcgaggucgaaggcagaauccaagaccuugagaaguauguggaggauaccaaaauugaccugugguccuacaaugcggaacuccugguugcccuggagaaccagcacacgaucgaucucacagacagcgaaaugaauaagcuguucgagaaaaccaagaaacagcuucgcgaaaacgcugaggauauggggaauggaugcuuuaagauuuaucauaagugugacaacgccugcaucggcucuauccggaaugggaccuacgaucacgacguguauagagacgaggcccugaacaaucgcuuccagauuaaaggcgucgaacucaaguccggauacaaagauuggauccuguggauuagcuuugcuaucucuugcuuccuucuguguguggcccuccugggcuuuauuaugugggcgugccaaaaggggaacauccgguguaauaucugcauuuga

SEQ ID NO: 203029 - RNA, 1701 nt, Artificial Sequence; identical to SEQ ID NO: 201994
  derived and/or modified CDS sequence (opt5) from hemagglutinin__InfluenzaA__AHE37986

SEQ ID NO: 203030 - RNA, 1701 nt, Artificial Sequence; identical to SEQ ID NO: 201930
  derived and/or modified CDS sequence (opt5) from hemagglutinin__InfluenzaA__AHE37987

SEQ ID NO: 203031 - RNA, 1701 nt, Artificial Sequence
  derived and/or modified CDS sequence (opt5) from hemagglutinin__InfluenzaA__AHE37988
augaagaccaucauugcccugagcuacauccucugccugguguucgcucagaaacuucccggcaacgacaauuccacagccacgcugugucucgggcaccaugcggucccuaacggaaccauuguuaagacaaucaccaaugauagaauugaggugacaaacgcuaccgaacuggugcaaaauucuagcaucggcgagaucugcgacuccccgcaccagauucuugauggggaaaacuguacacugaucgacgcccuccugggagauccccagugcgacggcuuucagaauaaaaagugggaucuguucgucgagcggucuaaagccuauagcaacuguuacccuuaugacgugcccgauuacgcuucccuccgcucucugguugccagcuccgggacccuugaauuuaauaacgagagcuucaauuggacgggagugacccaaaacggcacaucuuccgcuugcauuagacggagcaauucuuccuuuuucagccgccugaacuggcucacccaucugaauuuuaaguauccugcccuuaacgucacaaugcccaacaaugagcaguucgacaagcuguacaucuggggcgugcaccauccugggaccgauaaagaccagauuuuucucuaugcgcagucuuccggaagaaucacgguuagcacaaagcggucccaacaggccgugauuccgaacaucggcucucgccccagaauccggaauauuccuagccgcaucuccauuuacuggaccaucgucaaacccggggauauucugcugaucaacagcacaggaaaucucaucgcuccuagaggcuacuucaagauucggucugggaaauccagcaucaugcgcucugacgcccccauuggaaaguguaagagcgaaugcaucaccccgaacggcuccauuccuaaugacaaacccuuucagaacgugaauagaaucaccuauggcgcuuguccucgguacgugaagcagucuacacugaaacuugccacggggaugcgcaacguccccgagaagcaaaccagaggaaucuucggcgcgauugccggguuuaucgaaaauggaugggagggcaugauggaugggugguauggauuccggcaccagaacagcgagggcagaggccaggcugccgaccugaaauccacacaagcugccauugaucagaucaaugggaagcucaaccgccugauuggaaaaaccaaugaaaaguuccaccagaucgagaaggaauuuagcgagguugaaggccggauucagaaccuugagaaauacguggaggacacaaagaucgaucuguggucuuauaacgccgaacuccugguggcucuggagaaucaacauaccaucgaccucacggauuccgaaaugaacaaacuguucgagaagaccaaaaagcagcuuagagaaaaugcggaggacauggggaacggaugcuuuaagauuuaccacaaaugugauaaugccugcaucggcagcauucgcaacgggacauaugaccauaaugucuaccgggaugaggcucugaacaauagauuccagaucaagggcguggaacucaaaucuggauacaaggacuggauucuguggaucuccuuugccaucagcugcuuccuucuguguguugcccuccugggcuuuauuaugugggcuugccagaaagggaacauccgcuguaauauuugcaucuga

SEQ ID NO: 203032 - RNA, 1701 nt, Artificial Sequence; identical to SEQ ID NO: 202066
  derived and/or modified CDS sequence (opt5) from hemagglutinin__InfluenzaA__AHE37989

SEQ ID NO: 203033 - RNA, 1701 nt, Artificial Sequence; identical to SEQ ID NO: 201930
  derived and/or modified CDS sequence (opt5) from hemagglutinin__InfluenzaA__AHE37990

SEQ ID NO: 203034 - RNA, 1701 nt, Artificial Sequence; identical to SEQ ID NO: 201930
  derived and/or modified CDS sequence (opt5) from hemagglutinin__InfluenzaA__AHE37991

SEQ ID NO: 203035 - RNA, 1701 nt, Artificial Sequence
  derived and/or modified CDS sequence (opt5) from hemagglutinin__InfluenzaA__AHE37992
augaagaccaucauugcccugagcuacauccucugccugguguucgcucaggagcuucccggcaacgacgauuccacagccacgcugugucucgggcaccaugcggucccuaauggaaccauuguuaaaacaaucaccaacgaccaaauugaagugacaaaugcuaccgagcuggugcagucuagcuccacaggcgaaaucugcaacucuccgcaccagauccuugauggggagaauuguacccugauugacgcccuccugggagauccccagugcgacggcuuucaaaacaagaaaugggaucuguucgucgaaagaagcaaggcccauuccaauuguuauccuuacgacgugcccgauuaugcuucucuccggagccugguugccuccagcgggacgcuugaguuugacaacgagucuuucaauuggaccggagugacacagaacggcaccuccagcgcuugcauccgcagaucuaauaacuccuuuuucagccggcugaauuggcucacacaccugaacuuuaaauacccugcccuuaaugucaccaugcccaacaacgaacaguucgauaagcuguauauuuggggcgugcaucacccugggacggacaaggaucagaucuuucucuacgcgcaagccucuggacgcauuacaguuuccaccaaaagaagccagcaggcugugaucccgaauauuggcucccggccccgcgucagaaacaucccuucucgggugagcaucuauuggacaauugugaagcccggggacauccugcugauuaauuccaccggaaaccucaucgccccucgcggcuacuucaaaauuagaagcgggaagucuuccaucaugcggagcgacgcucccaucggaaaauguaauucugccugcauuaccccgaacggcagcaucccuaaugauaagcccuuucagaacgucaaucgcauuacauacggcgcguguccuagauauguuaagcaaaacacgcugaaacuugccaccgggaugcggaaugugcccgagaagcagacacgcggaaucuucggcgcuauugccggguuuaucgaaaacggaugggagggcaugguggacgggugguacggauucagacaccaaaauuccgagggccggggccaggcugccgaucugaaaucuacccaggccgcuaucgaccagauuaacgggaagcucaauagacugaucggaaaaacaaacgaaaaguuccaucagauugagaaagaauuuagcgaggucgaaggccgcauccaagaucuugagaaguauguggaggacaccaagauugaucugugguccuacaacgcggaacuccugguugcccuggagaaucagcacacgaucgaccucacagauagcgaaaugaacaaacuguucgagaagaccaaaaagcagcuucgggaaaaugcugaggacauggggaacggaugcuuuaaaauuuaucauaagugugauaaugccugcaucggcucuaucagaaacgggaccuacgaccacgacguguaucgcgaugaggcccugaauaaccgguuccagauuaagggcgucgaacucaaauccggauacaaggacuggauccuguggauuagcuuugcuaucucuugcuuccuucuguguguggcccuccugggcuuuauuaugugggcgugccaaaaagggaauaucagauguaacaucugcauuuga

SEQ ID NO: 203036 - RNA, 1701 nt, Artificial Sequence; identical to SEQ ID NO: 202112
  derived and/or modified CDS sequence (opt5) from hemagglutinin__InfluenzaA__AHE38023

SEQ ID NO: 203037 - RNA, 1701 nt, Artificial Sequence
  derived and/or modified CDS sequence (opt5) from hemagglutinin__InfluenzaA__AHE38024
augaaggccauccuggugguccuccuguacaccuucgcuacagccaacgcggacacgcuuugcauuggcuaucacgcuaauaacagcaccgauacaguugacaccgugcuggagaagaaugugacagucacccauuccgugaaccuccuggaagauaagcacaaugggaaacuuuguaagcugagaggaguugcuccccuccaucugggcaaaugcaacaucgccggguggauucugggaaauccugagugugaaucucucagcacagccuccucuuggagcuacaucguggagaccuccucuagcgacaacggcacgugcuauccgggggauuuuauuaauuacgaagaacugcgggagcagcuuuccagcgucucuuccuucgaacgcuuugagaucuuccccaagaccagcucuuggccuaaccacgacuccaauaagggagugacagccgcuuguccccaugccggcgcgaaaucuuuuuauaagaaccugaucuggcucguuaaaaagggcaauagcuacccuaaacugucccaaagcuauauuaacgauaaggggaaggaagugcuuguccuguggggaauccaccaccccuccaccacagccgaccagcagucucucuaccagaaugcugaugccuacguguucgugggcaccagcagauauuccaaaaaguuuaaaccugagauugcuacgcggccgaagguccgcgaccaagaggggagaaugaacuacuauuggacacugguugaacccggagauaaaaucaccuucgaggccacaggcaaccugguggugccucgguacgcguuuaccauggaacgcaaugccgggagcggaauuaucauuucugacacccccguccaugauugcaacacaacgugucagaccccugagggcgcuaucaauacaucccuccccuuccagaacauccacccgauuaccaucggcaagugcccuaaauauguuaagagcacaaagcugagacuugccaccgggcugcggaaugugcccucuauucagagccgcggacucuuuggcgcuaucgccggguucauugaaggaggcuggacggggaugguggacggaugguacggcuaucaucaccaaaacgagcagggcuccggguacgccgcugaccugaaaucuacacagaaugcgaucgauaagaucaccaacaaagucaauagcgugauugagaagaugaacacccaguuuacagccguuggaaaagaguucaaucaccuugagaagagaaucgaaaaccugaauaagaaaguggacgauggcuuccucgacauuuggaccuacaacgcugagcugcugguccuccuggaaaaugagcggacacuugauuaucaugacuccaacgugaagaaccuguacgagaaaguccgcaaucaacucaagaacaaugccaaagaaaucgggaacggauguuuugaguucuaucacaagugcgauaauacguguauggaaagcgugaagaacggcaccuacgacuauccuaaauacucugaggaagccaagcugaauagagagaaaauugaugggguuaaacuugaguccacacggaucuaucagauccuggcuauuuacagcaccguggccucuucccucguccuggugguuagccugggcgcgaucuccuuuuggaugugcucuaacggaagccuccagugccgcauuuguaucuga

SEQ ID NO: 203038 - RNA, 1701 nt, Artificial Sequence
  derived and/or modified CDS sequence (opt5) from hemagglutinin__InfluenzaA__AHE38026
augaaggccauccuggugguccuccuguacaccuucgcuacagccaacgcggacacgcuuugcauuggcuaucacgcuaauaacagcaccgauacaguugacaccgugcuggagaagaaugugacagucacccauuccgugaaccuccuggaagauaagcacaaugggaaacuuuguaagcugagaggaguugcuccccuccaucugggcaaaugcaacaucgccggguggauucugggaaauccugagugugaaucucucagcacagccuccucuuggagcuacaucguggagaccuccucuagcgacaacggcacgugcuauccgggggauuuuauuaauuacgaagaacugcgggagcagcuuuccagcgucucuuccuucgaacgcuuugagaucuuccccaagaccagcucuuggccuaaccacgacuccaauaagggagugacagccgcuuguccccaugccggcgcgaaaucuuuuuauaagaaccugaucuggcucguuaaaaagggcaauagcuacccuaaacugucccaaagcuauauuaacgaaaaggggaaggaggugcuuguccuguggggaauccaccaccccuccaccacagccgaucagcagucucucuaccagaaugcugacgccuacguguucgugggcaccagcagauauuccaaaaaguuuaaaccugagauugcuauccggccgaagguccgcgaucaagaagggagaaugaacuacuauuggacgcugguugagcccggagacaaaauuacauucgaagccaccggcaaccugguggugccucgguacgcguuuacaauggagcgcaaugccgggagcggaaucauuaucucugauacccccguccaugacugcaacaccacaugucagacgccugaaggcgcuaucaauaccucccuccccuuccagaacauucacccgaucacaauuggcaagugcccuaaauauguuaagagcaccaagcugagacuugccacagggcugcggaaugugcccucuauccagagccgcggacucuuuggcgcuauugccggguucaucgagggaggcuggaccgggaugguggauggaugguacggcuaucaucaccaaaacgagcagggcuccggguacgccgcugaccugaaaucuacgcagaaugcgaucgacaagauuacaaacaaagucaauagcgugaucgaaaagaugaacacccaguuuaccgccguuggaaaagaguucaaucaccuugaaaagagaauugagaaccugaauaagaaaguggaugacggcuuccucgauaucuggacauacaacgcugaacugcugguccuccuggagaaugagcggacccuugacuaucaugauuccaacgugaagaaccuguacgaaaaaguccgcaaucaacucaagaacaaugccaaagagauugggaacggauguuuugaguucuaucacaagugcgacaauacauguauggagagcgugaagaacggcacguacgauuauccuaaauacucugaagaggccaagcugaauagagagaaaaucgacgggguuaaacuugaauccacccggaucuaucagauucuggcuaucuacagcacaguggccucuucccucguccuggugguuagccugggcgcgauuuccuuuuggaugugcucuaacggaagccuccagugccgcaucuguauuuga

SEQ ID NO: 203039 - RNA, 1701 nt, Artificial Sequence; identical to SEQ ID NO: 201955
  derived and/or modified CDS sequence (opt5) from hemagglutinin__InfluenzaA__AHE38027

SEQ ID NO: 203040 - RNA, 1683 nt, Artificial Sequence
  derived and/or modified CDS sequence (opt5) from hemagglutinin__InfluenzaA__AHF20558
augaacacccagauccugguguucgcccucauugcuaucauucccacaaaugccgacaagaucugccugggccaccaugcggucagcaacgggacgaaaguuaauacccuuacagagagaggaguggaaguggucaacgcuaccgagacaguggaacggaccaauauuccucgcaucuguuccaagggcaaaagaacaguugaucuggggcaaugcggacuccugggcaccaucacggggccgccccagugugaccaguuucuugaguucucugccgaucugauuaucgaacggcgcgagggaagcgacgugugcuacccuggcaaguuugucaacgaggaagcccucagacagauucugcgggaguccggcgggaucgauaaagaagcuaugggauucaccuauucuggcauucgcacaaauggggccaccagcgcuuguagacgguccggaucuagcuuuuacgccgagaugaaguggcugcucuccaacacagacaaugcggccuucccccaaaugaccaagagcuauaaaaacacgcgcaagucuccugcucugaucguguggggcauucaccauuccguuagcacagccgagcagaccaaacuuuacgggucuggaaauaagcuggugacagucggcuccagcaacuaucagcagucuuuugugcccuccccuggcgcuagaccgcaagugaaugggcucagcggacggaucgauuuccacuggcugaugcuuaaccccaaugacaccgucaccuuuuccuucaacggcgccuuuaucgcgccugaucgcgccucuuuccugagagggaaaagcaugggcauucaguccggaguucagguggacgcuaacugcgaaggggauuguuaccauagcggaggcacaaucauuucuaaucuccccuuucagaacaucgacucccgggccgugggcaagugcccucgcuaugucaagcaaagaagccugcugcucgcuacggggaugaaaaaugugcccgagauuccgaagggacggggccuguucggggccaucgccggauucaucgaaaacggcugggaggggcuuauugauggcugguacggauuuagacaccagaaugcucagggcgaagggaccgcggccgacuacaaaucuacacaaagcgcuaucgaccagauuaccggaaagcugaaccgccucaucgagaaaacaaaucagcaguucgagcugauugauaacgaauuuaaugagguugaaaagcaaaucggcaacgugaucaauuggacccgggacuccauuacggaggucuggucuuauaacgccgaacuucugguggccauggagaaucagcacacaaucgaucucgcugacagcgagauggauaaacuguacgaaagaguuaagcgccagcugcgggagaacgccgaagaggacgggaccggauguuucgaaauuuuucauaagugcgaugacgauuguauggcguccaucagaaauaacaccuaugaccacagcaaauaccgcgaggaggcuaugcagaaccggauucaaaucgauccugugaagcucucuuccggcuauaaagacgucauucugugguucagcuuuggggccucuugcuucauccuucuggccaucgugaugggccucgucuuuauuugcgugcagaauggaaacaugagauguacaaucggcauuuga

SEQ ID NO: 203041 - RNA, 1683 nt, Artificial Sequence
  derived and/or modified CDS sequence (opt5) from hemagglutinin__InfluenzaA__AHF20568
augaacacccagauccugguguucgcccucauugcuaucauucccacaaaugccgacaagaucugccugggccaccaugcggucagcaacgggacgaaaguuaauacccuuacagagagaggaguggaaguggucaacgcuaccgagacaguggaacggaccaauauuccucgcaucuguuccaagggcaaaagaacaguugaucuggggcaaugcggacuccugggcaccaucacggggccgccccagugugaccaguuucuugaguucucugccgaucugauuaucgaacggcgcgagggaagcgacgugugcuacccuggcaaguuugucaacgaggaagcccucagacagauucugcgggaguccggcgggaucgauaaagaagcuaugggauucaccuauucuggcauucgcacaaauggggccaccagcgcuuguagacgguccggaucuagcuuuuacgccgagaugaaguggcugcucuccaacacagacaaugcggccuucccccaaaugaccaagagcuauaaaaacacgcgcaagucuccugcucugaucguguggggcauucaccauuccguuagcacagccgagcagaccaaacuuuacgggucuggaaauaagcuggugacagucggcuccagcaacuaucagcagucuuuugugcccuccccuggcgcuagaccgcaagugaaugggcucagcggacggaucgauuuccacuggcugaugcuuaaccccaaugacaccgucaccuuuuccuucaacggcgccuuuaucgcgccugaucgcgccucuuuccugagagggaaaagcaugggcauucaguccggaguucagguggacgcuaacugcgaaggggauuguuaccauagcggaggcacaaucaugucuaaucuccccuuucagaacauugacucccgggccgugggcaagugcccucgcuaugucaagcaaagaagccugcugcucgcuacggggaugaaaaaugugcccgagaucccgaagggacggggccuguucggggccauugccggauucaucgaaaacggcugggaggggcuuaucgauggcugguacggauuuagacaccagaaugcucagggcgaagggaccgcggccgacuacaaaucuacacaaagcgcuauugaccagaucaccggaaagcugaaccgccucauugagaaaacaaaucagcaguucgagcugaucgauaacgaauuuaaugagguugaaaagcaaauuggcaacgugaucaauuggacccgggacuccaucacggaggucuggucuuauaacgccgaacuucugguggccauggagaaucagcacacaauugaucucgcugacagcgagauggauaaacuguacgaaagaguuaagcgccagcugcgggagaacgccgaagaggacgggaccggauguuucgaaaucuuucauaagugcgaugacgauuguauggcguccauuagaaauaacaccuaugaccacagcaaauaccgcgaggaggcuaugcagaaccggauccaaauugauccugugaagcucucuuccggcuauaaagacgucauccugugguucagcuuuggggccucuugcuucauucuucuggccaucgugaugggccucgucuuuaucugcgugaagaauggaaacaugagauguacaauuugcaucuga

SEQ ID NO: 203042 - RNA, 1698 nt, Artificial Sequence; identical to SEQ ID NO: 199865
  derived and/or modified CDS sequence (opt5) from hemagglutinin__InfluenzaA__AHG96108

SEQ ID NO: 203043 - RNA, 1698 nt, Artificial Sequence; identical to SEQ ID NO: 199865
  derived and/or modified CDS sequence (opt5) from hemagglutinin__InfluenzaA__AHG96120

SEQ ID NO: 203044 - RNA, 1698 nt, Artificial Sequence; identical to SEQ ID NO: 199865
  derived and/or modified CDS sequence (opt5) from hemagglutinin__InfluenzaA__AHG96132

SEQ ID NO: 203045 - RNA, 1698 nt, Artificial Sequence
  derived and/or modified CDS sequence (opt5) from hemagglutinin__InfluenzaA__AHG96144
augaaggugaaacugcucguccugcuuugcaccuucacagccacguacgcugacaccaucuguauuggcuaucacgccaacaauagcacagauaccguugacacagugcuggagaagaacgugaccgucacacauuccgugaaucuccuggaaaacucucacaaugggaaacuuugccugcucaagggaaucgcgccccugcagcugggcaacuguagcguugcuggguggauucucggaaauccugagugcgaacugcuuaucuccaaagagucuuggagcuacauuguggaaaagccgaaccccgagaauggcaccuguuauccugggcauuuugccgauuacgaggaacugagagagcaacucuccucugucagcuccuucgaacgguuugagaucuuccccaaggagagcucuuggccuaaccacacggugaccggaguuuccgccagcugcucucauaauggcgaauccagcuuuuaucgcaaccugcuuuggcugacaggcaaaaaugggcucuaccccaaccugucuaaguccuaugcuaauaacaaagagaaggaagugcugguccucuggggagugcaccacccuccgaacaucggcgugcagaaagcccuguaccauaccgagaaugcuuacgucagcguuguguccucucacuauagcagaaaguucacacccgaaauugccaagcggccuaaagugcgcgaccaggaggggagaaucaacuacuauuggacccuucuggagcccggagauacgauuaucuuugaagcgaauggcaaccucauugccccucgguacgcuuucgcccugucccgcggguuuggaagcggcaucauuaauucuaacgcucccauggacaagugugaugccaaaugccagacaccgcaaggcgcgaucaauuccagccuuccuuuccagaacguccaucccgugaccaucggggaguguccuaaguauguuagaucugccaaacugcggauggugacaggacuccgcaauauucccagcauccaguccagaggccuguuuggggcuauugccggauucaucgaaggcggguggaccggaauggucgacggcugguacggcuaucaccaccagaacgagcaagggucuggauacgcugccgaucaaaagagcacccagaaugccauuaacggcaucacaaauaaagugaacuccguuaucgaaaagaugaauacgcaguuuaccgcuguggggaaggaguucaacaaacuggagcggcgcauggaaaaccucaauaagaaagucgacgauggauucauugacaucuggacauacaacgcggagcugcuugugcugcucgaaaaugagagaacccuggauuuucaugacagcaacgucaagaaucuuuaugaaaaagugaagucucagcugaagaacaaugccaaagagauuggcaacgggugcuucgaguuuuaccacaaguguaaugacgaaugcauggaguccguuaaaaacggcacauaugauuaccccaaguauagcgaagagucuaaacucaaucgggagaagaucgacggagugaagcuggaauccaugggcgucuaccagauucuggcuaucuauagcaccguggccuccucucucguucugcuugugagccugggggccaucuccuucuggaugugcucuaacggaagccuccagugucgcauuugcaucuga

SEQ ID NO: 203046 - RNA, 1698 nt, Artificial Sequence; identical to SEQ ID NO: 199865
  derived and/or modified CDS sequence (opt5) from hemagglutinin__InfluenzaA__AHG96156

SEQ ID NO: 203047 - RNA, 1698 nt, Artificial Sequence; identical to SEQ ID NO: 199865
  derived and/or modified CDS sequence (opt5) from hemagglutinin__InfluenzaA__AHG96168

SEQ ID NO: 203048 - RNA, 1698 nt, Artificial Sequence; identical to SEQ ID NO: 199865
  derived and/or modified CDS sequence (opt5) from hemagglutinin__InfluenzaA__AHG96180

SEQ ID NO: 203049 - RNA, 1698 nt, Artificial Sequence; identical to SEQ ID NO: 199865
  derived and/or modified CDS sequence (opt5) from hemagglutinin__InfluenzaA__AHG96192

SEQ ID NO: 203050 - RNA, 1698 nt, Artificial Sequence; identical to SEQ ID NO: 199865
  derived and/or modified CDS sequence (opt5) from hemagglutinin__InfluenzaA__AHG96204

SEQ ID NO: 203051 - RNA, 1698 nt, Artificial Sequence; identical to SEQ ID NO: 199865
  derived and/or modified CDS sequence (opt5) from hemagglutinin__InfluenzaA__AHG96216

SEQ ID NO: 203052 - RNA, 1698 nt, Artificial Sequence; identical to SEQ ID NO: 199865
  derived and/or modified CDS sequence (opt5) from hemagglutinin__InfluenzaA__AHG96228

SEQ ID NO: 203053 - RNA, 1698 nt, Artificial Sequence; identical to SEQ ID NO: 203045
  derived and/or modified CDS sequence (opt5) from hemagglutinin__InfluenzaA__AHG96240

SEQ ID NO: 203054 - RNA, 1698 nt, Artificial Sequence; identical to SEQ ID NO: 199865
  derived and/or modified CDS sequence (opt5) from hemagglutinin__InfluenzaA__AHG96252

SEQ ID NO: 203055 - RNA, 1698 nt, Artificial Sequence; identical to SEQ ID NO: 199865
  derived and/or modified CDS sequence (opt5) from hemagglutinin__InfluenzaA__AHG96264

SEQ ID NO: 203056 - RNA, 1698 nt, Artificial Sequence; identical to SEQ ID NO: 199865
  derived and/or modified CDS sequence (opt5) from hemagglutinin__InfluenzaA__AHG96276

SEQ ID NO: 203057 - RNA, 1698 nt, Artificial Sequence; identical to SEQ ID NO: 199865
  derived and/or modified CDS sequence (opt5) from hemagglutinin__InfluenzaA__AHG96288

SEQ ID NO: 203058 - RNA, 1698 nt, Artificial Sequence; identical to SEQ ID NO: 199865
  derived and/or modified CDS sequence (opt5) from hemagglutinin__InfluenzaA__AHG96300

SEQ ID NO: 203059 - RNA, 1701 nt, Artificial Sequence
  derived and/or modified CDS sequence (opt5) from hemagglutinin__InfluenzaA__AHG96312
augaaggccauccuggugguccuccuguacaccuucgcuacagccaacgcggacacgcuuugcauuggcuaucacgcuaauaacagcaccgauacaguugacaccgugcuggagaaaaaugugacagucacccauuccgugaaccuccuggaagauaagcacaaugggaaacuuuguaagcugagaggaguugugccccuccaucugggcaaaugcaacaucgccggguggauucugggaaauccugagugugaaucucucagcacagccuccucuuggagcuacaucgucgagaccuccucuagcgacaacggcacgugcuauccgggggauuuuauuaauuacgaagaacugcgggagcagcuuuccagcgugucuuccuucgaacgcuuugagaucuuccccaagaccagcucuuggccuaaccacgacuccaauaagggaguuacagcugccuguccccaugcuggcgccaagagcuuuuauaagaaccugaucuggcucgugaaaaagggcaauucuuacccuaaacugucccaaagcuauauuaacgauaaggggaaggaaguccuugugcuguggggaauccaccaccccuccaccacagcggaccagcagucucucuaccagaaugccgaugcuuacguguucgucggcaccagcagauauuccaaaaaguuuaaaccugagauugccauccggccgaagguucgcgaccaagaggggagaaugaacuacuauuggacgcugguggaacccggagauaaaauuacauucgaggcuaccggcaaccugguggucccucgguacgccuuuacaauggaacgcaaugcggggagcggaaucauuaucucugacacccccgugcaugauugcaacaccacaugucagacgccugagggcgccaucaauaccucccuccccuuccagaacauucacccgaucacaauuggcaagugcccuaaauauguuaagagcaccaagcugagacuugcuacagggcugcggaaugugcccucuauccagagccgcggacucuuuggcgccauugcuggguucaucgaaggaggcuggaccgggauggucgacggaugguacggcuaucaucaccaaaacgagcagggcuccggguacgccgccgaccugaaaucuacgcagaaugcuaucgauaagauuacaaacaaagugaauagcguuaucgagaagaugaacacccaguuuaccgcggugggaaaagaguucaaucaccuugagaagagaauugaaaaccugaauaagaaagucgacgauggcuuccucgacaucuggacauacaacgccgagcugcuggugcuccuggaaaaugagcggacccuugauuaucaugacuccaacgucaagaaccuguacgagaaagugcgcaaucaacucaagaacaaugcuaaagaaauugggaacggauguuuugaguucuaucacaagugcgauaauacauguauggaaagcguuaagaacggcacguacgacuauccuaaauacucugaggaagccaagcugaauagagagaaaaucgauggggugaaacuugaguccacccggaucuaucagauucuggccaucuacagcacagucgcuucuucccucgugcugguugugagccugggcgccauuuccuuuuggaugugcucuaacggaagccuccagugccgcaucuguauuuga

SEQ ID NO: 203060 - RNA, 1701 nt, Artificial Sequence; identical to SEQ ID NO: 202112
  derived and/or modified CDS sequence (opt5) from hemagglutinin__InfluenzaA__AHG96313

SEQ ID NO: 203061 - RNA, 1701 nt, Artificial Sequence
  derived and/or modified CDS sequence (opt5) from hemagglutinin__InfluenzaA__AHG96314
augaaggccauccuggugguccuccuguacaccuucgcuacagccaacgcggacacgcuuugcauuggcuaucacgcuaauaacagcaccgauacaguugacaccgugcuggagaagaaugugacagucacccauuccgugaaccuccuggaagauaagcacaaugggaaacuuuguaagcugagaggaguugcuccccuccaucugggcaaaugcaacaucgccggguggauucugggaaauccugagugugaaucucucagcacagccuccucuuggagcuacaucguggagaccuccucuagcgacaacggcacgugcuauccgggggauuuuauuaauuacgaggaacugcgggagcagcuuuccagcgucucuuccuucgaacgcuuugagaucuuccccaagaccagcucuuggccuaaccacgacuccaauaagggagugacagccgcuuguccccaugccggcgcgaaaucuuuuuauaagaaccugaucuggcucguuaaaaagggcaauagcuacccuaaacugucccaaagcuauauuaacgauaaggggaaggaagugcuuguccuguggggaauccaccaccccuccaccacagccgaccagcagucucucuaccagaaugcugaugccuacguguucgugggcaccagcagauauuccaaaaaguuuaaaccugagauugcuauccggccgaagguccgcgaccaagaggggagaaugaacuacuauuggacgcugguugaacccggagauaaaauuacauucgaggccaccggcaaccugguggugccucgguacgcguuuacaauggaacgcaaugccgggagcggaaucauuaucucugacacccccguccaugauugcaacaccacaugucagacgccugagggcgcuaucaauaccucccuccccuuccagaacauucacccgaucacaauuggcaagugcccuaaauauguuaagagcaccaagcugagacuugccacagggcugcggaaugugcccucuauccagagccgcggacucuuuggcgcuauugccggguucaucgaaggaggcuggaccgggaugguggacggaugguacggcuaucaucaccaaaacgagcagggcuccggguacgccgcugaccugaaaucuacgcagaaugcgaucgauaagauuacaaacaaagucaauagcgugaucgagaagaugaacacccaguacaccgccguuggaaaagaauuuaaucaccuugagaagagaauugaaaaccugaauaagaaaguggacgauggcuuccucgacaucuggacauauaacgcugagcugcugguccuccuggaaaaugagcggacccuugauuaccaugacuccaacgugaagaaccuguaugagaaaguccgcaaucaacucaagaacaaugccaaagaaauugggaacggauguuucgaguuuuaccacaagugcgauaauacauguauggaaagcgugaagaacggcacguaugacuacccuaaauauucugaggaagccaagcugaauagagagaaaaucgaugggguuaaacuugaguccacccggaucuaccagauucuggcuaucuacagcacaguggccucuucccucguccuggugguuagccugggcgcgauuuccuucuggaugugcucuaacggaagccuccagugccgcaucuguauuuga

SEQ ID NO: 203062 - RNA, 1701 nt, Artificial Sequence; identical to SEQ ID NO: 202112
  derived and/or modified CDS sequence (opt5) from hemagglutinin__InfluenzaA__AHG96315

SEQ ID NO: 203063 - RNA, 1701 nt, Artificial Sequence; identical to SEQ ID NO: 202112
  derived and/or modified CDS sequence (opt5) from hemagglutinin__InfluenzaA__AHG96316

SEQ ID NO: 203064 - RNA, 1701 nt, Artificial Sequence; identical to SEQ ID NO: 202112
  derived and/or modified CDS sequence (opt5) from hemagglutinin__InfluenzaA__AHG96317

SEQ ID NO: 203065 - RNA, 1701 nt, Artificial Sequence; identical to SEQ ID NO: 202112
  derived and/or modified CDS sequence (opt5) from hemagglutinin__InfluenzaA__AHG96320

SEQ ID NO: 203066 - RNA, 1701 nt, Artificial Sequence; identical to SEQ ID NO: 202112
  derived and/or modified CDS sequence (opt5) from hemagglutinin__InfluenzaA__AHG96321

SEQ ID NO: 203067 - RNA, 1701 nt, Artificial Sequence; identical to SEQ ID NO: 202112
  derived and/or modified CDS sequence (opt5) from hemagglutinin__InfluenzaA__AHG96322

SEQ ID NO: 203068 - RNA, 1701 nt, Artificial Sequence; identical to SEQ ID NO: 202112
  derived and/or modified CDS sequence (opt5) from hemagglutinin__InfluenzaA__AHG96324

SEQ ID NO: 203069 - RNA, 1701 nt, Artificial Sequence; identical to SEQ ID NO: 202112
  derived and/or modified CDS sequence (opt5) from hemagglutinin__InfluenzaA__AHG96325

SEQ ID NO: 203070 - RNA, 1701 nt, Artificial Sequence
  derived and/or modified CDS sequence (opt5) from hemagglutinin__InfluenzaA__AHG96326
augaaggccauccuggugguccuccuguacaccuucgcuacagccaacgcggacacgcuuugcauuggcuaucacgcuaauaacagcaccgauacaguugacaccgugcuggagaagaaugugacagucacccauuccgugaaccuccuggaagauaagcacaaugggaaacuuuguaagcugagaggaguugcuccccuccaucugggcaaaugcaacaucgccggguggauucugggaaauccugagugugaaucucucagcacagccuccucuuggagcuacaucguggagaccuccaacucugacaauggcacgugcuauccgggggauuuuauuaacuacgaagaacugcgggagcagcuuagcuccgucagcucuuucgaacgcuuugagaucuuccccaagaccuccagcuggccuaaucacgacucuaacaagggagugacagccgcuuguccccaugccggcgcgaaauccuuuuauaagaaucugaucuggcucguuaaaaagggcaacagcuacccuaaacugucucaauccuauauuaaugauaaggggaaggaagugcuuguccuguggggaauccaccaccccagcaccacagccgaccagcagucccucuaccagaacgcugaugccuacguguucgugggcaccucuagauauagcaaaaaguuuaaaccugagauugcuauccggccgaagguccgcgaccaagaggggagaaugaacuacuauuggacgcugguugaacccggagauaaaauuacauucgaggccaccggcaaucugguggugccucgguacgcguuuacaauggaacgcaacgccggguccggaaucauuaucagcgacacccccguccaugauugcaauaccacaugucagacgccugagggcgcuaucaacaccucucuccccuuccagaauauucacccgaucacaauuggcaagugcccuaaauaugugaaguccaccaagcugagacuugccacagggcugcggaacguucccagcauccagucucgcggacucuuuggcgcuauugccggguucaucgaaggaggcuggaccgggaugguggacggaugguacggcuaucaucaccaaaaugagcagggcagcggguacgccgcugaccugaaauccacgcagaacgcgaucgauaagauuacaaauaaagucaacucugugaucgagaagaugaauacccaguuuaccgccguuggaaaagaguucaaccaccuugagaagagaauugaaaaucugaacaagaaaguggacgauggcuuccucgacaucuggacauacaaugcugagcugcugguccuccuggaaaacgagcggacccuugauuaucaugacagcaacgugaagaaucuguacgagaaaguccgcaaccaacucaagaauaacgccaaagaaauugggaauggauguuuugaguucuaucacaagugcgauaacacauguauggaauccgugaagaauggcacguacgacuauccuaaauacagcgaggaagccaagcugaacagagagaaaaucgaugggguuaaacuugagucuacccggaucuaucagauucuggcuaucuacuccacaguggccagcucucucguccuggugguuucccugggcgcgauuagcuuuuggaugugcuccaauggaucucuccagugccgcaucuguauuuga

SEQ ID NO: 203071 - RNA, 1701 nt, Artificial Sequence; identical to SEQ ID NO: 202112
  derived and/or modified CDS sequence (opt5) from hemagglutinin__InfluenzaA__AHG96327

SEQ ID NO: 203072 - RNA, 1701 nt, Artificial Sequence
  derived and/or modified CDS sequence (opt5) from hemagglutinin__InfluenzaA__AHG96329
augaaggccauccuggugguccuccuguacaccuucacaacggcuaacgccgacacccuuugcauuggcuaucacgcgaauaacagcacagauaccguugacacagugcuggagaaaaaugugaccgucacacauuccgugaaccuccuggaagauaagcacaaugggaaacuuuguaagcugagaggaguugcuccccuccaucugggcaaaugcaacaucgccggguggauucugggaaauccugagugugaaucucucagcaccgccuccucuuggagcuacaucguggagacguccucuagcgacaacgggaccugcuauccgggcgauuuuauuaauuacgaagaacugcgggagcagcuuuccagcgucucuuccuucgaacgcuuugagaucuuccccaagacaagcucuuggccuaaccacgacuccaauaagggagugaccgcugccuguccccaugcuggcgccaagagcuuuuauaagaaccugaucuggcucguuaaaaagggcaauucuuacccuaaacugucccaaagcuauauuaacgauaaggggaaggaagugcuuguccuguggggaauccaccaccccuccacaaccgcggaccagcagucucucuaccagaaugccgaugcuuacguguucgugggcacgagcagauauuccaaaaaguuuaaaccugagauugccauccggccgaagguccgcgaccaagaggggagaaugaacuacuauuggacacugguugaacccggagauaaaauuaccuucgaggcuacaggcaaccugguggugccucgguacgccuuuaccauggaacgcaaugcggggagcggaaucauuaucucugacacccccguccaugauugcaacacaacgugucagaccccugagggcgccaucaauacaucccuccccuuccagaacauucacccgaucaccauuggcaagugcccuaaauauguuaagagcacaaagcugagacuugcuaccgggcugcggaaugugcccucuauccagagccgcggacucuuuggcgccauugcuggguucaucgaaggaggcuggacggggaugguggacggaugguacggcuaucaucaccaaaacgagcagggcuccggguacgccgccgaccugaaaucuacacagaaugcuaucgauaagauuaccaacaaagucaauagcgugaucgagaagaugaacacccaguuuacagcgguuggaaaagaguucaaucaccuugagaagagaauugaaaaccugaauaagaaaguggacgauggcuuccucgacaucuggaccuacaacgccgagcugcugguccuccuggaaaaugagcggacacuugauuaucaugacuccaacgugaagaaccuguacgagaaaauucgcaaucaacucaagaacaaugcuaaagaaaucgggaacggauguuuugaguucuaucacaagugcgauaauacguguauggaaagcgucaagaacggcaccuacgaguauccuaaauacucugaagaggccaagcugaauagagagaaaaucgacggggugaaacuugaauccacaaaaauuuaucagauccuggccauuuacagcaccguugcuucuucccucgugcuggucgugagccugggcgccaucuccuuuuggaugugcucuaacggaagccuccagugccggauuuguaucuga

SEQ ID NO: 203073 - RNA, 1701 nt, Artificial Sequence
  derived and/or modified CDS sequence (opt5) from hemagglutinin__InfluenzaA__AHG96330
augaaggccauccuggugguccuccuguacaccuucgcuacagccacggcggacacccuuugcauuggcuaucacgcuaacaauagcacagauaccguugacacagugcuggagaagaacgugaccgucacacauuccgugaaucuccuggaagauaagcacaacgggaaacuuuguaagcugagaggaguugcuccccuccaucugggcaaaugcaauaucgccggguggauucugggaaacccugagugugaaucucucagcaccgccuccucuuggagcuacaucguggagacguccucuagcgacaaugggaccugcuauccgggcgauuuuauuaacuacgaagaacugcgggagcagcuuuccagcgucucuuccuucgaacgcuuugagaucuuccccaagacaagcucuuggccuaaucacgacuccaacaagggagugaccgccgcuuguccccaugccggcgcgaaaucuuuuuauaagaaucugaucuggcucguuaaaaagggcaacagcuacccuaaacugucccaaagcuauauuaaugauaaggggaaggaagugcuuguccuguggggaauccaccaccccuccacaaccgccgaccagcagucucucuaccagaacgcugaugccuacguguucgugggcacgagcagauauuccaaaaaguuuaaaccugagauugcuauccggccgaagguccgcgaccaagaggggagaaugaauuacuauuggacacugguugaacccggagauaaaauuaccuucgaggccacaggcaaccugguggugccucgguacgcguuuaccauggaacgcaacgccgggagcggaaucauuaucucugacacccccguccaugauugcaauacaacgugucagaccccugagggcgcuaucaacacaucccuccccuuccagaauauucacccgaucaccauuggcaagugcccuaaauauguuaagagcacaaagcugucucuugccaccgggcugagaaacgugcccagcauccagucccggggacucuuuggcgcuauugccggguucaucgaaggaggcuggacggggaugguggacggaugguacggcuaucaucaccaaaaugagcagggcucuggguacgccgcugaccugaaaagcacacagaacgcgaucgauaagauuaccaauaaagucaacuccgugaucgagaagaugaauacccaguuuacagccguuggaaaagaguucaaccaccuugagaagcgcauugaaaaucugaacaagaaaguggacgauggcuuccucgacaucuggaccuacaaugcugagcugcugguccuccuggaaaacgagagaacacuugauuaucaugacagcaaugugaagaaccuguacgagaaaauucggaaccaacucaagaauaacgccaaagaaaucgggaauggauguuuugaguucuaucacaagugcgauaacacguguauggaaucugucaagaauggcaccuacgacuauccuaaauacuccgaggaagccaagcugaaccgcgagaaaaucgauggggugaaacuugagagcacaagaauuuaucagauccuggcuauuuacucuaccguugccuccagccucgugcuggucgugucccugggcgcgaucucuuuuuggaugugcagcaauggaucccuccagugccggauuuguaucuga

SEQ ID NO: 203074 - RNA, 1701 nt, Artificial Sequence; identical to SEQ ID NO: 202112
  derived and/or modified CDS sequence (opt5) from hemagglutinin__InfluenzaA__AHG96332

SEQ ID NO: 203075 - RNA, 1701 nt, Artificial Sequence
  derived and/or modified CDS sequence (opt5) from hemagglutinin__InfluenzaA__AHG96334
augaaggccauccuggugguccuccuguacacccuugcuacagccaacgcggacacgcugugcauuggcuaucacgcuaauaacagcaccgauacaguugacaccgugcucgagaaaaaugugacagucacccauuccgugaaccugcuugaagauaagcacaaugggaaacuguguaagcucagaggaguugcuccccugcaucugggcaaaugcaacaucgccggguggauucucggaaauccugagugugaaucucugagcacagccuccucuuggagcuacaucguggagaccuccucuagcgacaacggcacgugcuauccgggggauuucauuaauuacgaggaacuucgggagcagcuguccagcgucucuuccuuugaacgcuucgagaucuuucccaagaccagcucuuggccuaaccacgacuccaauaagggagugacagccgcuuguccccaugccggcgcgaaaucuuucuauaagaaccucaucuggcugguuaaaaagggcaauagcuacccuaaacuuucccaaagcuauauuaacgauaaggggaaggaagugcugguccucuggggaauccaccaccccuccaccacagccgaccagcagucucuguaccagaaugcugaugccuacguguuugugggcaccagcagauauuccaaaaaguucaaaccugagauugcuauccggccgaagguccgcgaccaagaggggagaaugaacuacuauuggacgcugguugaacccggagauaaaauuacauuugaggccaccggcaaccucguggugccucgguacgcguucacaauggaacgcaaugccgggagcggaaucauuaucucugacacccccguccaugauugcaacaccacaugucagacgccugagggcgcuaucaauaccucccugcccuuucagaacauucacccgaucacaauuggcaagugcccuaaauauguuaagagcaccaaacuuagacuggccacagggcuccggaaugugcccucuauccagagccgcggacuguucggcgcuauugccggguuuaucgaaggaggcuggaccgggaugguggacggaugguacggcuaucaucaccaaaacgagcagggcuccggguacgccgcugaccuuaagucuacgcagaaugcgaucgauaagauuacaaacaaagucaauagcgugaucgagaagaugaacacccaguucaccgccguuggaaaagaauuuaaucaccuggagaagagaauugaaaaccucaauaagaaaguggacgauggcuuccuggacaucuggacauacaacgcugagcugcucguccugcuugaaaaugagcggacccuggauuaucaugacuccaacgugaagaaccucuacgagaaaguccgcaaucaacugaagaacaaugccaaagaaauugggaacggauguuucgaguuuuaucacaagugcgauaauacauguauggaaagcgugaagaacggcacguacgacuauccuaaauacucugaggaagccaaacuuaauagagagaagaucgaugggguuaagcuggaguccacccggaucuaucagauucucgcuaucuacagcacaguggccucuucccugguccuggugguuagccucggcgcgauuuccuucuggaugugcucuaacggaagccugcagugccgcaucuguauuuga

SEQ ID NO: 203076 - RNA, 1701 nt, Artificial Sequence
  derived and/or modified CDS sequence (opt5) from hemagglutinin__InfluenzaA__AHG96335
augaaggccauccuggugguccuccuguacaccuucgagacagcuaacgccgacacgcuuugcauuggcuaucacgcgaauaacagcaccgauacaguugacaccgugcuggagaaaaaugugacagucacccauuccgugaaccuccuggaagauaagcacaaugggaaacuuuguaagcugaaaggaguugcuccccuccaucugggcaagugcaacaucgccggguggauucugggaaauccugaaugugagucucucagcacagccuccucuuggagcuacaucguggaaaccuccucuagcgacaacggcacgugcuauccgggggauuuuauuaauuacgaggagcugagagaacagcuuuccagcgucucuuccuucgagcgguuugaaaucuuccccaagaccagcucuuggccuaaccacgacuccaauaaaggagugacagcugccuguccccaugcuggcgccaagagcuuuuauaaaaaccugaucuggcucguuaagaaaggcaauucuuacccuaagcugucccaaagcuauauuaacgauaaggggaaagaggugcuuguccuguggggaauccaccaccccuccaccacagcggaccagcagucucucuaccagaaugccgaugcuuacguguucgugggcaccagccgcuauuccaagaaauuuaagccugagauugccaucagaccgaaaguccgggaccaagaagggcgcaugaacuacuauuggacgcugguugagcccggagauaagauuacauucgaagcuaccggcaaccugguggugccuagauacgccuuuacaauggagcggaaugcggggagcggaaucauuaucucugacacccccguccaugauugcaacaccacaugucagacgccugaaggcgccaucaauaccucccuccccuuccagaacauucacccgaucacaauuggcaaaugcccuaaguaugugaaaagcaccaaacugcgccuugcuacagggcugagaaauguucccucuauccagagccggggacucuuuggcgccauugcuggguucaucgagggaggcuggaccgggaugguggacggaugguacggcuaucaucaccaaaacgagcagggcuccggguacgccgccgaccugaagucuacgcagaaugcuaucgauaaaauuacaaacaaggucaauagcgugaucgaaaagaugaacacccaguuuaccgcgguuggaaaggaguucaaucaccuugaaaagcgcauugagaaccugaauaaaaagguggacgauggcuuccucgacaucuggacauacaacgccgaacugcugguccuccuggagaaugagagaacccuugauuaucaugacuccaacgugaaaaaccuguacgaaaagguccggaaucaacucaaaaacaaugcuaaggagauugggaacggauguuuugaguucuaucacaagugcgauaauacauguauggaaagcgugaaaaacggcacguacgacuauccuaaguacucugaagaggccaaacugaaucgcgagaagaucgaugggguuaaacuugaauccaccagaaucuaucagauucuggccaucuacagcacaguggcuucuucccucguccuggugguuagccugggcgccauuuccuuuuggaugugcucuaacggaagccuccagugccggaucuguauuuga

SEQ ID NO: 203077 - RNA, 1701 nt, Artificial Sequence
  derived and/or modified CDS sequence (opt5) from hemagglutinin__InfluenzaA__AHG96336
augaaggccauccuggugguccuccuguacaccuucgcuacagccaacgcggacacgcuuugcauuggcuaucacgcuaauaacagcaccgauacaguugacaccgugcuggagaagaaugugacagucacccauuccgugaaccuccuggaagauaagcacaaugggaaacuuuguaagcugagaggaguugcuccccuccaucugggcaaaugcaacaucgccggguggauucugggaaauccugagugugaaucucucagcacagccuccucuuggagcuacaucguggagaccuccucuagcgacaacggcacgugcuauccgggggauuuuauuaauuacgaagaacugcgggagcagcuuuccagcgucucuuccuucgaacgcuuugagaucuuccccaagaccagcucuuggccuaaccacgacuccaauaagggagugacagccgcuuguccccaugccggcgcgaaaucuuuuuauaagaaccugaucuggcucguuaaaaagggcaauagcuacccuaaacugucccaaagcuauauuaacgauaaggggaaggaagugcuuguccuguggggaauccaccaccccuccaccacagccgaccagcagucucucuaccagaaugcugaugccuacguguucgugggcaccagcagauauuccaaaaaguuuaaaccugagauugcuauccggccgaagguccgcgaccaagaggggagaaugaacuacuauuggacgcugguugaacccggagauaaaauuacauucgaggccaccggcaaccugguggugccucgguacgcguuuacaauggaacgcaaugccgggagcggaaucauuaucucugacacccccgucagagauugcaacaccacaugucagacgccugagggcgcuaucaauaccucccuccccuuccagaacauucauccgaucacaauuggcaagugcccuaaauauguuaagagcaccaagcugcggcuugccacagggcugcgcaaugugcccucuauccagagcagaggacucuuuggcgcuauugccggguucaucgaaggaggcuggaccgggaugguggacggaugguacggcuaucaccaucaaaacgagcagggcuccggguacgccgcugaccugaaaucuacgcagaaugcgaucgauaagauuacaaacaaagucaauagcgugaucgagaagaugaacacccaguuuaccgccguuggaaaagaguucaaucaccuugagaagcggauugaaaaccugaauaagaaaguggacgauggcuuccucgacaucuggacauacaacgcugagcugcugguccuccuggaaaaugagcgcacccuugauuaucacgacuccaacgugaagaaccuguacgagaaagucagaaaucaacucaagaacaaugccaaagaaauugggaacggauguuuugaguucuaucauaagugcgauaauacauguauggaaagcgugaagaacggcacguacgacuauccuaaauacucugaggaagccaagcugaaucgggagaaaaucgaugggguuaaacuugaguccacccgcaucuaucagauucuggcuaucuacagcacaguggccucuucccucguccuggugguuagccugggcgcgauuuccuuuuggaugugcucuaacggaagccuccagugcagaaucuguauuuga

SEQ ID NO: 203078 - RNA, 1701 nt, Artificial Sequence
  derived and/or modified CDS sequence (opt5) from hemagglutinin__InfluenzaA__AHG96338
augaaggccauccuggugguccuccuguacaccuucgcuacagccaacgcggacacgcuuugcauuggcuaucacgcuaauaacagcaccgauacaguugacaccgugcuggagaagaaugugacagucacccauuccgugaaccuccuggaagauaagcacaaugggaaacuuuguaagcugagaggaguugcuccccuccaucugggcaaaugcaacaucgccggguggauucugggaaauccugagugugaaucucucagcacagccuccucuuggagcuacaucguggagaccuccucuagcgacaacggcacgugcuauccgggggauuuuauuaauuacgaagaacugcgggagcagcuuuccagcgucucuuccuucgaacgcuuugagaucuuccccaagaccagcucuuggccuaaccacgacuccaauaagggagugacagccgcuuguagccaugccggcgcgaaaucuuuuuauaagaaccugaucuggcucguuaaaaagggcaauuccuaccccaaacugagccaauccuauauuaacgauaaggggaaggaagugcuuguccuguggggaauccaccacccuucuaccacagccgaccagcagagccucuaccagaaugcugaugccuacguguucgugggcaccuccagauauagcaaaaaguuuaaacccgagauugcuauccggccuaagguccgcgaccaagaggggagaaugaacuacuauuggacgcugguugaaccgggagauaaaauuacauucgaggccaccggcaaccugguggugccccgguacgcguuuacaauggaacgcaaugccgggucuggaaucauuaucuccgacaccccuguccaugauugcaacaccacaugucagacgcccgagggcgcuaucaauaccagccucccuuuccagaacauucaccccaucacaauuggcaagugcccgaaauaugugaagucuaccaagcugagacuugccacagggcugcggaauguuccuagcauccagucccgcggacucuuuggcgcuauugccggguucaucgaaggaggcuggaccgggaugguggacggaugguacggcuaucaucaccaaaacgagcagggcucuggguacgccgcugaccugaaaagcacgcagaaugcgaucgauaagauuacaaacaaagucaauuccgugaucgagaagaugaacacccaguuuaccgccguuggaaaagaguucaaucaccuugagaagagaauugaaaaccugaauaagaaaguggacgauggcuuccucgacaucuggacauacaacgcugagcugcugguccuccuggaaaaugagcggacccuugauuaucaugacagcaacgugaagaaccuguacgagaaaguccgcaaucaacucaagaacaaugccaaagaaauugggaacggauguuuugaguucuaucacaagugcgauaauacauguauggaaucugugaagaacggcacguacgacuaucccaaauacuccgaggaagccaagcugaauagagagaaaaucgaugggguuaaacuugagagcacccggaucuaucagauucuggcuaucuacucuacaguggccuccagccucguccuggugguuucccugggcgcgauuucuuuuuggaugugcagcaacggaucccuccagugccgcaucuguauuuga

SEQ ID NO: 203079 - RNA, 1701 nt, Artificial Sequence
  derived and/or modified CDS sequence (opt5) from hemagglutinin__InfluenzaA__AHG96339
augaaggccauccuggugguccuccuguacaccuucgcuacagccaacgcggacacgcuuugcauuggcuaucacgcuaauaacagcaccgauacaguugacaccgugcuggagaagaaugugacagucacccauuccgugaaccuccuggaagauaagcacaaugggaaacuuuguaagcugagaggaguugcuccccuccaucugggcaaaugcaacaucgccggguggauucugggaaauccugagugugaaucucucagcacagccuccucuuggagcuacaucguggagaccuccucuagcgacaacggcacgugcuauccgggggauuuuauuaauuacgaagaacugcgggagcagcuuuccagcgucucuuccuucgaacgcuuugagaucuuccccaagaccagcucuuggccuaaccacgacuccaauaagggagugacagccgcuuguccccaugccggcgcgaaaucuuuuuauaagaaccugaucuggcucguuaaaaagggcaauagcuacccuaaacugucccaaagcuauauuaacgauaaggggaaggaaauccuugugcuguggggcauucaccaccccuccaccacagccgaccagcagucucucuaccagaaugcugaugccuacgucuucgugggaaccagcagauauuccaaaaaguuuaaaccugagaucgcuauucggccgaaggugcgcgaccaagaggggagaaugaacuacuauuggacgcuggucgaacccggagauaaaaucacauucgaggccaccggcaaccugguugugccucgguacgcguuuacaauggaacgcaaugccgggagcggaauuaucaucucugacacccccgugcaugauugcaacaccacaugucagacgccugagggcgcuauuaauaccucccuccccuuccagaacauccacccgauuacaaucggcaagugcccuaaauaugucaagagcaccaagcugagacuugccacagggcugcggaaugugcccucuauucagagccgcggacucuuuggcgcuaucgccggguucaucgaaggaggcuggaccgggaugguugacggaugguacggcuaucaucaccaaaacgagcagggcuccggguacgccgcugaccugaaaucuacgcagaaugcgauugauaagaucacaaacaaagugaauagcgucauugagaagaugaacacccaguuuaccgccgugggaaaagaguucaaucaccuugagaagagaaucgaaaaccugaauaagaaaguugacgauggcuuccucgacauuuggacauacaacgcugagcugcuggugcuccuggaaaaugagcggacccuugauuaucaugacuccaacgucaagaaccuguacgagaaagugcgcaaucaacucaagaacaaugccaaagaaaucgggaacggauguuuugaguucuaucacaagugcgauaauacauguauggaaagcgucaagaacggcacguacgacuauccuaaauacucugaggaagccaagcugaauagagagaaaaucgauggggugaaacuugaguccacccggauuuaucagauccuggcuauuuacagcacaguugccucuucccucgugcuggucgugagccugggcgcgaucuccuuuuggaugugcucuaacggaagccuccagugccgcauuuguaucuga

SEQ ID NO: 203080 - RNA, 1701 nt, Artificial Sequence; identical to SEQ ID NO: 202112
  derived and/or modified CDS sequence (opt5) from hemagglutinin__InfluenzaA__AHG96340

SEQ ID NO: 203081 - RNA, 1701 nt, Artificial Sequence
  derived and/or modified CDS sequence (opt5) from hemagglutinin__InfluenzaA__AHG96341
augaaggccauccuggugguccuccuguacaccuucgcuacagccaacgcggacacgcuuugcauuggcuaucacgcuaauaacagcaccgauacaguugacaccgugcuggagaaaaaugugacagucacccauuccgugaaccuccuggaagauaagcacaaugggaaacuuuguaagcugagaggaguugcuccccuccaucugggcaaaugcaacaucgccggguggauucugggaaauccugagugugaaucucucagcacagccuccucuuggagcuacaucguggagaccuccucuagcgacaacggcacgugcuauccgggggauuuuauuaauuacgaagaacugcgggagcagcuuuccagcgucucuuccuucgaacgcuuugagaucuuccccaagaccagcucuuggccuaaccacgacuccaauaagggagugacagccgcuuguccccaugccggcgcgaaaucuuuuuauaagaaccugaucuggcucguuaaaaagggcaauagcuacccuaaacugucccaaagcuauauuaacgauaaggggaaggaagugcuuguccuguggggaauccaccaccccuccaccacagccgaccagcagucucucuaccagaaugcugaugccuacguguucgugggcaccagcaaauauuccaagaaauuuaagccugagauugcuaucagaccgaaaguccgggaccaagaggggcgcaugaacuacuauuggacgcugguugaacccggagauaagauuacauucgaggccaccggcaaccugguggugccuagauacgcguuuacaauggaacggaaugccgggagcggaaucauuaucucugacacccccguccaugauugcaacaccacaugucagacgccugagggcgcuaucaauaccucccuccccuuccagaacauucacccgaucacaauuggcaaaugcccuaaguauguuaagagcaccaaacugcgccuugccacagggcugagaaauauccccucuauucagagccggggacucuuuggcgcuaucgccggguucaucgaaggaggcuggaccgggaugguggacggaugguacggcuaucaucaccaaaacgagcagggcuccggguacgccgcugaccugaagucuacgcagaaugcgauugauaaaaucacaaacaaggugaauagcgucauugagaaaaugaacacccaguuuaccgccgugggaaaggaguucaaucaccuugagaagcgcaucgaaaaccugaauaaaaagguugacgauggcuuccucgacauuuggacauacaacgcugagcugcuggugcuccuggaaaaugagagaacccuugauuaucaugacuccaacgucaaaaaccuguacgagaaggugcggaaucaacucaaaaacaaugccaaggaaaucgggaacggauguuuugaguucuaucacaagugcgauaauacauguauggaaagcgucaaaaacggcacguacgacuauccuaaguacucugaggaagccaaacugaaucgcgagaagaucgauggggugaaacuugaguccaccagaauuuaucagauccuggcuauuuacagcacaguugccucuucccucgugcuggucgugagccugggcgcgaucuccuuuuggaugugcucuaacggaagccuccagugccggauuuguaucuga

SEQ ID NO: 203082 - RNA, 1701 nt, Artificial Sequence
  derived and/or modified CDS sequence (opt5) from hemagglutinin__InfluenzaA__AHG96342
augaaggccauccuggugguccuccuguacaccuucgcuacagccaacgcggacacgcuuugcauuggcuaucacgcuaauaacagcaccgauacaguugacaccgugcuggagaagaaugugacagucacccauuccgugaaccuccuggaagauaagcacaaugggaaacuuuguaagcugagaggaguugcuccccuccaucugggcaaaugcaacaucgccggguggauucugggaaauccugagugugaaucucucagcacagccuccucuuggagcuacaucguggagaccuccucuagcgacaacggcacgugcuauccgggggauuuuauuaauuacgaagaacugcgggagcagcuuuccagcgucucuuccuucgaacgcuuugagaucuuccccaagaccagcucuuggccuaaccacgacuccaauaagggagugacagccgcuuguccccaugccggcgcgaaaucuuuuuauaagaaccugaucuggcucguuaaaaagggcaauagcuacccuaaacugucccaaagcuauauuaacgauaaggggaaggaagugcuuguccuguggggaauccaccaccccuccaccacagccgaccagcagucucucuaccagaaugcugaugccuacguguucgugggcaccagcagauauuccaaaaaguuuaaaccugagauugcuauccggccgaagguccgcgaccaagaggggagaaugaacuacuauuggacgcugguugaacccggagauaaaauuacauucgaggccaccggcaaccugguggugccucgguacgcguuuacaauggaacgcaaugccgggagcggaaucauuaucucugacacccccguccaugauugcaacaccacaugucagacgccugagggcgcuaucaauaccucccuccccuuccagaacauucacccgaucacaauuggcaagugcccuaaauauguuaagagcaccaagcugagacuugccacagggcugcggaauauccccucuauucagagccgcggacucuuuggcgcuaucgccggguucaucgaaggaggcuggaccgggaugguggacggaugguacggcuaucaucaccaaaacgagcagggcuccggguacgccgcugaccugaaaucuacgcagaaugcgauugauaagaucacaaacaaagugaauagcgucauugagaagaugaacacccaguuuaccgccgugggaaaagaguucaaucaccuugagaagagaaucgaaaaccugaauaagaaaguugacgauggcuuccucgacauuuggacauacaacgcugagcugcuggugcuccuggaaaaugagcggacccuugauuaucaugacuccaacgucaagaaccuguacgagaaagugcgcaaucaacucaagaacaaugccaaagaaaucgggaacggauguuuugaguucuaucacaagugcgauaauauguguauggaaagcgucaagaacggcacauacgacuauccuaaauacucugaggaagccaagcugaauagagagaaaaucgauggggugaaacuugaguccacgcggauuuaucagauccuggcuauuuacagcaccguugccucuucccucgugcuggucgugagccugggcgcgaucuccuuuuggaugugcucuaacggaagccuccagugccgcauuuguaucuga

SEQ ID NO: 203083 - RNA, 1701 nt, Artificial Sequence
  derived and/or modified CDS sequence (opt5) from hemagglutinin__InfluenzaA__AHG96343
augaaggccauccuggugguccuccuguacaccuucgcuacagccacggcggacacccuuugcauuggcuaucacgcuaacaauagcacagauaccguugacacagugcuggagaagaacgugaccgucacacauuccgugaaucuccuggaagauaagcacaacgggaaacuuuguaagcugagaggaguugcuccccuccaucugggcaaaugcaauaucgccggguggauucugggaaacccugagugugaaucucucagcaccgccuccucuuggagcuacaucguggagacguccaauucugacaacgggaccugcuauccgggcgauuuuauuaauuacgaagaacugcgggagcagcuuagcuccgucagcucuuucgaacgcuuugagaucuuccccaagacauccagcuggccuaaccacgacucuaauaagggagugaccgccgcuuguccccaugccggcgcgaaauccuuuuauaagaaccugaucuggcucguuaaaaagggcaauagcuacccuaaacugucucaauccuauauuaacgauaaggggaaggaagugcuuguccuguggggaauccaccaccccagcacaaccgccgaccagcagucccucuaccagaaugcugaugccuacguguucgugggcacgucuagauauagcaaaaaguuuaaaccugagauugcuauccggccgaagguccgcgaccaagaggggagaaugaacuacuauuggacacugguugaacccggagauaaaauuaccuucgaggccacaggcaaccugguggugccucgguacgcguuuaccauggaacgcaaugccggguccggaaucauuaucagcgacacccccguccaugauugcaacacaacgugucagaccccugagggcgcuaucaauacaucucuccccuuccagaacauucacccgaucaccauuggcaagugcccuaaauaugugaaguccacaaagcugagacuugccaccgggcugcggaauguucccagcauccagucucgcggacucuuuggcgcuauugccggguucaucgaaggaggcuggacggggaugguggacggaugguacggcuaucaucaccaaaacgagcagggcagcggguacgccgcugaccugaaauccacacagaaugcgaucgauaagauuaccaacaaagucaauucugugaucgagaagaugaacacccaguuuacagccguuggaaaagaguucaaucaccuugagaagagaauugaaaaccugaauaagaaaguggacgauggcuuccucgacaucuggaccuacaacgcugagcugcugguccuccuggaaaaugagcggacacuugauuaucaugacagcaacgugaagaaccuguacgagaaaguccgcaaucaacucaagaacaaugccaaagaaauugggaacggauguuuugaguucuaucacaagugcgauaauacguguauggaauccgugaagaacggcaccuacgacuauccuaaauacagcgaggaagccaagcugaauagagagaaaaucgaugggguuaaacuugagucuacacggaucuaucagauucuggcuaucuacuccaccguggccagcucucucguccuggugguuucccugggcgcgauuagcuuuuggaugugcuccaacggaucucuccagugccgcaucuguauuuga

SEQ ID NO: 203084 - RNA, 1701 nt, Artificial Sequence; identical to SEQ ID NO: 202112
  derived and/or modified CDS sequence (opt5) from hemagglutinin__InfluenzaA__AHG96344

SEQ ID NO: 203085 - RNA, 1701 nt, Artificial Sequence; identical to SEQ ID NO: 203075
  derived and/or modified CDS sequence (opt5) from hemagglutinin__InfluenzaA__AHG96345

SEQ ID NO: 203086 - RNA, 1701 nt, Artificial Sequence; identical to SEQ ID NO: 202112
  derived and/or modified CDS sequence (opt5) from hemagglutinin__InfluenzaA__AHG96346

SEQ ID NO: 203087 - RNA, 1701 nt, Artificial Sequence; identical to SEQ ID NO: 202112
  derived and/or modified CDS sequence (opt5) from hemagglutinin__InfluenzaA__AHG96347

SEQ ID NO: 203088 - RNA, 1701 nt, Artificial Sequence; identical to SEQ ID NO: 202112
  derived and/or modified CDS sequence (opt5) from hemagglutinin__InfluenzaA__AHG96348

SEQ ID NO: 203089 - RNA, 1701 nt, Artificial Sequence; identical to SEQ ID NO: 202112
  derived and/or modified CDS sequence (opt5) from hemagglutinin__InfluenzaA__AHG96349

SEQ ID NO: 203090 - RNA, 1701 nt, Artificial Sequence; identical to SEQ ID NO: 202112
  derived and/or modified CDS sequence (opt5) from hemagglutinin__InfluenzaA__AHG96350

SEQ ID NO: 203091 - RNA, 1701 nt, Artificial Sequence; identical to SEQ ID NO: 202112
  derived and/or modified CDS sequence (opt5) from hemagglutinin__InfluenzaA__AHG96351

SEQ ID NO: 203092 - RNA, 1701 nt, Artificial Sequence; identical to SEQ ID NO: 202112
  derived and/or modified CDS sequence (opt5) from hemagglutinin__InfluenzaA__AHG96352

SEQ ID NO: 203093 - RNA, 1701 nt, Artificial Sequence
  derived and/or modified CDS sequence (opt5) from hemagglutinin__InfluenzaA__AHG96353
augaaggccauccuggugguccuccuguacaccuucgcuacaacgaacgccgacacccuuugcauuggcuaucacgcgaauaacagcacagauaccguugacacagugcuggagaaaaaugugaccgucacacauuccgugaaccuccuggaagauaagcacaaugggaaacuuuguaagcugagaggaguugcuccccuccaucugggcaaaugcaacaucgccggguggauucugggaaauccugagugugaaucucucagcaccgccuccucuuggagcuacaucguggagacguccucuagcgacaacgggaccugcuauccgggcgauuuuauuaauuacgaagaacugcgggagcagcuuuccagcgucucuuccuucgaacgcuuugagaucuuccccaagacaagcucuuggccuaaccacgacuccaauaagggagugaccgcugccuguccccaugcuggcgccaagagcuuuuauaagaaccugaucuggcucguuaaaaagggcaauucuuacccuaaacugucccaaagcuauauuaacgauaaggggaaggaagugcuuguccuguggggaauccaccaccccuccacaaccgcggaccagcagucucucuaccagaaugccgaugcuuacguguucgugggcacgagcagauauuccaaaaaguuuaaaccugagauugccauccggccgaagguccgcgaccaagaggggagaaugaacuacuauuggacacugguugaacccggagauaaaauuaccuucgaggcuacaggcaaccugguggugccucgguacgccuuuaccauggaacgcaaugcggggagcggaaucauuaucucugacacccccguccaugauugcaacacaacgugucagaccccugagggcgccaucaauacaucccuccccuuccagaacauucacccgaucaccauuggcaagugcccuaaauauguuaagagcacaaagcugagacuugcuaccgggcugcggaaugugcccucuauccagagccgcggacucuuuggcgccauugcuggguucaucgaaggaggcuggacggggaugguggacggaugguacggcuaucaucaccaaaacgagcagggcuccggguacgccgccgaccugaaaucuacacagaaugcuaucgauaagauuaccaacaaagucaauagcgugaucgagaagaugaacacccaguuuacagcgguuggaaaagaguucaaucaccuugagaagagaauugaaaaccugaauaagaaaguggacgauggcuuccucgacaucuggaccuacaacgccgagcugcugguccuccuggaaaaugagcggacacuugauuaucaugacuccaacgugaagaaccuguacgagaaaguccgcaaucaacucaagaacaaugcuaaagaaauugggaacggauguuuugaguucuaucacaagugcgauaauacguguauggaaagcgugaagaacggcaccuacgacuauccuaaauacucugaggaagccaagcugaauagagagaaaaucgaugggguuaaacuugaguccacacggaucuaucagauucuggccaucuacagcaccguggcuucuucccucguccuggugguuagccugggcgccauuuccuuuuggaugugcucuaacggaagccuccagugccgcaucuguauuuga

SEQ ID NO: 203094 - RNA, 1701 nt, Artificial Sequence; identical to SEQ ID NO: 202112
  derived and/or modified CDS sequence (opt5) from hemagglutinin__InfluenzaA__AHG96354

SEQ ID NO: 203095 - RNA, 1701 nt, Artificial Sequence
  derived and/or modified CDS sequence (opt5) from hemagglutinin__InfluenzaA__AHG96355
augaaggccauccuggugguccuccuguacacccuugcuacagccaacgcggacacgcugugcauuggcuaucacgcuaauaacagcaccgauacaguugacaccgugcucgagaaaaaugugacagucacccauuccgugaaccugcuugaagauaagcacaaugggaaacuguguaagcucagaggaguugcuccccugcaucugggcaaaugcaacaucgccggguggauucucggaaauccugagugugaaucucugagcacagccuccucuuggagcuacaucguggagaccuccucuagcgacaacggcacgugcuauccgggggauuucauuaauuacgaggaacuucgggagcagcuguccagcgucucuuccuuugaacgcuucgagaucuuucccaagaccagcucuuggccuaaccacgacuccaauaagggagugacagccgcuuguccccaugccggcgcgaaaucuuucuauaagaaccucaucuggcugguuaaaaagggcaauagcuacccuaaacuuucccaaagcuauauuaacgauaaggggaaggaagugcugguccucuggggaauccaccaccccuccaccacagccgaccagcagucucuguaccagaaugcugaugccuacguguuugugggcaccagcagauauuccaaaaaguucaaaccugagauugcuauccggccgaagguccgcgaccaagaggggagaaugaacuacuauuggacgcugguugaacccggagauaaaauuacauuugaggccaccggcaaccucguggugccucgguacgcguucacaauggaacgcaaugccgggagcggaaucauuaucucugacacccccguccaugauugcaacaccacaugucagacgccugagggcgcuaucaauaccucccugcccuuucagaacauucacccgaucacaauuggcaagugcccuaaauauguuaagagcaccaaacuuagacuggccacagggcuccggaaugugcccucuauccagagccgcggacuguucggcgcuauugccggguuuaucgaaggaggcuggaccgggaugguggacggaugguacggcuaucaucaccaaaacgagcagggcuccggguacgccgcugaccuuaagucuacgcagaaugcgaucgauaagauuacaaacaaagucaauagcgugaucgagaagaugaacacccaguucaccgccguuggaaaagaauuuaaucaacuggagaagagaauugaaaaccucaauaagaaaguggacgauggcuuccuggacaucuggacauacaacgcugagcugcucguccugcuugaaaaugagcggacccuggauuaucacgacuccaacgugaagaaccucuacgagaaaguccgcaaucagcugaagaacaaugccaaagaaauugggaacggauguuucgaguuuuaucauaagugcgauaauacauguauggaaagcgugaagaacggcacguacgacuauccuaaauacucugaggaagccaaacuuaauagagagaagaucgaugggguuaagcuggaguccacccggaucuaucagauucucgcuaucuacagcacaguggccucuucccugguccuggugguuagccucggcgcgauuuccuucuggaugugcucuaacggaagccugcaaugccgcaucuguauuuga

SEQ ID NO: 203096 - RNA, 1701 nt, Artificial Sequence; identical to SEQ ID NO: 201930
  derived and/or modified CDS sequence (opt5) from hemagglutinin__InfluenzaA__AHG96356

SEQ ID NO: 203097 - RNA, 1701 nt, Artificial Sequence
  derived and/or modified CDS sequence (opt5) from hemagglutinin__InfluenzaA__AHG96359
augaagaccaucauugcccugagcuacauccucugccugguguucgcucagaaacuucccggcaacgacaauuccacagccacgcugugucucgggcaccaugcggucccuaacggaaccauuguuaagacaaucaccaaugaucaaauugaggugacaaacgcuaccgaacuggugcagucuagcuccacaggcgggaucugcgacucuccgcaccagauccuugauggagagaauuguacccugauugacgcccuccugggcgauccccagugcgacggguuucaaaacaaaaagugggaucuguucgucgaaagaagcaaagccuauuccaauuguuacccuuaugacgugcccgauuacgcuucucuccggagccugguugccuccagcggaacgcuugaguuuaacgacgaaucuuucaauuggaccggcgugacacagaacggcaccuccagcucuugcaagcgcagauccaauaacagcuuuuucucucggcugaauuggcucacacaucugaaguuuaaauauccugcucuuaacgucaccaugcccaauaacgagaaguucgauaaacuguacaucuggggagugcaccauccuguuacggacaacgaucagauuuuucucuaugcccaggcguccgggcgcaucacagugagcaccaagagaucccaacagacagucauuccgaauaucggcucucggccccgcauuagaaacaucccuagccggaucuccauuuacuggaccaucgugaaacccggggacauucugcugaucaauagcaccggaaaccucauugccccucgcggcuacuucaagaucagaucugggaaguccagcaucaugcggucugacgcucccauuggaaaauguaauagcgagugcaucacaccgaacggcuccauuccuaaugauaagcccuuucagaacgugaaucgcaucacguauggcgccuguccuagauacgucaaacagaacacccugaagcuggcuacagggaugcggaauguucccgaaaaacaaacccgcggaauuuucggcgccaucgcgggguuuaucgagaacggaugggaaggcaugguggacgggugguauggauucagacaccaaaauucugagggcauuggccaggccgcugaucuuaagagcacacaggccgcuaucaaccagauuaaugggaaacucaaccggcugaucggaaagaccaacgagaaguuccaccagauugaaaaagaguuuuccgaaguggagggcagaauccaggaccuugaaaaguacgucgaggauacgaaaauugaccuguggagcuauaaugccgagcuccugguggcccuggaaaaccaacauacaaucgaucucaccgacucugagaugaauaagcuguucgaacgcaccaaaaagcagcuucgggagaacgcugaagauauggggaauggaugcuuuaagaucuaccacaaaugugacaacgcgugcauuggcuccaucagaaaugggacauaugaucaugacguuuaccgcgacgaggcccugaacaaucgguuccagauuaagggcguggagcucaaaagcggauacaaggauuggauccuguggauuucuuuugcuaucuccugcuuccuucugugugucgcccuccugggcuuuaucaugugggccugccagaaagggaacauuagauguaauaucugcauuuga

SEQ ID NO: 203098 - RNA, 1701 nt, Artificial Sequence; identical to SEQ ID NO: 203097
  derived and/or modified CDS sequence (opt5) from hemagglutinin__InfluenzaA__AHG96371

SEQ ID NO: 203099 - RNA, 1701 nt, Artificial Sequence; identical to SEQ ID NO: 203097
  derived and/or modified CDS sequence (opt5) from hemagglutinin__InfluenzaA__AHG96383

SEQ ID NO: 203100 - RNA, 1698 nt, Artificial Sequence; identical to SEQ ID NO: 199865
  derived and/or modified CDS sequence (opt5) from hemagglutinin__InfluenzaA__AHG96395

SEQ ID NO: 203101 - RNA, 1701 nt, Artificial Sequence; identical to SEQ ID NO: 203097
  derived and/or modified CDS sequence (opt5) from hemagglutinin__InfluenzaA__AHG96407

SEQ ID NO: 203102 - RNA, 1701 nt, Artificial Sequence; identical to SEQ ID NO: 203097
  derived and/or modified CDS sequence (opt5) from hemagglutinin__InfluenzaA__AHG96419

SEQ ID NO: 203103 - RNA, 1701 nt, Artificial Sequence; identical to SEQ ID NO: 203097
  derived and/or modified CDS sequence (opt5) from hemagglutinin__InfluenzaA__AHG96431

SEQ ID NO: 203104 - RNA, 1701 nt, Artificial Sequence; identical to SEQ ID NO: 203097
  derived and/or modified CDS sequence (opt5) from hemagglutinin__InfluenzaA__AHG96443

SEQ ID NO: 203105 - RNA, 1701 nt, Artificial Sequence; identical to SEQ ID NO: 203097
  derived and/or modified CDS sequence (opt5) from hemagglutinin__InfluenzaA__AHG96455

SEQ ID NO: 203106 - RNA, 1701 nt, Artificial Sequence; identical to SEQ ID NO: 203097
  derived and/or modified CDS sequence (opt5) from hemagglutinin__InfluenzaA__AHG96467

SEQ ID NO: 203107 - RNA, 1701 nt, Artificial Sequence; identical to SEQ ID NO: 203097
  derived and/or modified CDS sequence (opt5) from hemagglutinin__InfluenzaA__AHG96479

SEQ ID NO: 203108 - RNA, 1701 nt, Artificial Sequence; identical to SEQ ID NO: 203097
  derived and/or modified CDS sequence (opt5) from hemagglutinin__InfluenzaA__AHG96491

SEQ ID NO: 203109 - RNA, 1701 nt, Artificial Sequence; identical to SEQ ID NO: 194428
  derived and/or modified CDS sequence (opt5) from hemagglutinin__InfluenzaA__AHG96503

SEQ ID NO: 203110 - RNA, 1698 nt, Artificial Sequence; identical to SEQ ID NO: 199865
  derived and/or modified CDS sequence (opt5) from hemagglutinin__InfluenzaA__AHG96515

SEQ ID NO: 203111 - RNA, 1698 nt, Artificial Sequence; identical to SEQ ID NO: 199865
  derived and/or modified CDS sequence (opt5) from hemagglutinin__InfluenzaA__AHG96527

SEQ ID NO: 203112 - RNA, 1698 nt, Artificial Sequence; identical to SEQ ID NO: 199865
  derived and/or modified CDS sequence (opt5) from hemagglutinin__InfluenzaA__AHG96539

SEQ ID NO: 203113 - RNA, 1698 nt, Artificial Sequence; identical to SEQ ID NO: 199865
  derived and/or modified CDS sequence (opt5) from hemagglutinin__InfluenzaA__AHG96551

SEQ ID NO: 203114 - RNA, 1698 nt, Artificial Sequence; identical to SEQ ID NO: 203045
  derived and/or modified CDS sequence (opt5) from hemagglutinin__InfluenzaA__AHG96563

SEQ ID NO: 203115 - RNA, 1698 nt, Artificial Sequence; identical to SEQ ID NO: 199865
  derived and/or modified CDS sequence (opt5) from hemagglutinin__InfluenzaA__AHG96575

SEQ ID NO: 203116 - RNA, 1698 nt, Artificial Sequence; identical to SEQ ID NO: 199865
  derived and/or modified CDS sequence (opt5) from hemagglutinin__InfluenzaA__AHG96587

SEQ ID NO: 203117 - RNA, 1698 nt, Artificial Sequence; identical to SEQ ID NO: 199865
  derived and/or modified CDS sequence (opt5) from hemagglutinin__InfluenzaA__AHG96599

SEQ ID NO: 203118 - RNA, 1698 nt, Artificial Sequence; identical to SEQ ID NO: 199865
  derived and/or modified CDS sequence (opt5) from hemagglutinin__InfluenzaA__AHG96611

SEQ ID NO: 203119 - RNA, 1698 nt, Artificial Sequence; identical to SEQ ID NO: 199865
  derived and/or modified CDS sequence (opt5) from hemagglutinin__InfluenzaA__AHG96623

SEQ ID NO: 203120 - RNA, 1698 nt, Artificial Sequence; identical to SEQ ID NO: 199865
  derived and/or modified CDS sequence (opt5) from hemagglutinin__InfluenzaA__AHG96635

SEQ ID NO: 203121 - RNA, 1698 nt, Artificial Sequence; identical to SEQ ID NO: 199865
  derived and/or modified CDS sequence (opt5) from hemagglutinin__InfluenzaA__AHG96647

SEQ ID NO: 203122 - RNA, 1698 nt, Artificial Sequence; identical to SEQ ID NO: 199865
  derived and/or modified CDS sequence (opt5) from hemagglutinin__InfluenzaA__AHG96659

SEQ ID NO: 203123 - RNA, 1698 nt, Artificial Sequence; identical to SEQ ID NO: 199865
  derived and/or modified CDS sequence (opt5) from hemagglutinin__InfluenzaA__AHG96671

SEQ ID NO: 203124 - RNA, 1698 nt, Artificial Sequence; identical to SEQ ID NO: 199865
  derived and/or modified CDS sequence (opt5) from hemagglutinin__InfluenzaA__AHG96683

SEQ ID NO: 203125 - RNA, 1701 nt, Artificial Sequence; identical to SEQ ID NO: 203097
  derived and/or modified CDS sequence (opt5) from hemagglutinin__InfluenzaA__AHG96695

SEQ ID NO: 203126 - RNA, 1701 nt, Artificial Sequence; identical to SEQ ID NO: 203097
  derived and/or modified CDS sequence (opt5) from hemagglutinin__InfluenzaA__AHG96707

SEQ ID NO: 203127 - RNA, 1701 nt, Artificial Sequence; identical to SEQ ID NO: 203097
  derived and/or modified CDS sequence (opt5) from hemagglutinin__InfluenzaA__AHG96719

SEQ ID NO: 203128 - RNA, 1701 nt, Artificial Sequence; identical to SEQ ID NO: 203097
  derived and/or modified CDS sequence (opt5) from hemagglutinin__InfluenzaA__AHG96731

SEQ ID NO: 203129 - RNA, 1701 nt, Artificial Sequence; identical to SEQ ID NO: 203097
  derived and/or modified CDS sequence (opt5) from hemagglutinin__InfluenzaA__AHG96743

SEQ ID NO: 203130 - RNA, 1701 nt, Artificial Sequence; identical to SEQ ID NO: 203097
  derived and/or modified CDS sequence (opt5) from hemagglutinin__InfluenzaA__AHG96755

SEQ ID NO: 203131 - RNA, 1701 nt, Artificial Sequence; identical to SEQ ID NO: 203097
  derived and/or modified CDS sequence (opt5) from hemagglutinin__InfluenzaA__AHG96767

SEQ ID NO: 203132 - RNA, 1701 nt, Artificial Sequence; identical to SEQ ID NO: 203097
  derived and/or modified CDS sequence (opt5) from hemagglutinin__InfluenzaA__AHG96779

SEQ ID NO: 203133 - RNA, 1701 nt, Artificial Sequence
  derived and/or modified CDS sequence (opt5) from hemagglutinin__InfluenzaA__AHG96791
augaagaccaucauugcccugagcuacauccucugccugguguucgcucagaaacuucccggcaacgacaauuccacagccacgcugugucucgggcaccaugcggucccuaacggaaccauuguuaagacaaucaccaaugaucaaauugaggugacaaacgcuaccgaacuggugcagucuagcuccacaggcgggaucugcgacucuccgcaccagauccuugauggagagaauuguacccugauugacgcccuccugggcgauccccagugcgacggguuucaaaacaaaaagugggaucuguucgucgaaagaagcaaagccuauuccaauuguuacccuuaugacgugcccgauuacgcuucucuccggagccugguugccuccagcggaacgcuugaguuuaacgacgaaucuuucaauuggaccggcgugacacagaacggcaccuccagcucuugcaagcgcagauccaauaacagcuuuuucucucggcugaauuggcucacacagcugaaguuuaaauauccugcucuuaacgucaccaugcccaauaacgagaaguucgauaaacuguacaucuggggagugcaucacccuguuacggacaacgaucagauuuuucucuaugcccaagcguccgggcgcaucacagugagcaccaagagaucccagcagacagucauuccgaauaucggcucucggccccgcauuagaaacaucccuagccggaucuccauuuacuggaccaucgugaaacccggggacauucugcugaucaauagcaccggaaaccucauugccccucgcggcuacuucaagaucagaucugggaaguccagcaucaugcggucugacgcucccauuggaaaauguaauagcgagugcaucacaccgaacggcuccauuccuaaugauaagcccuuucagaacgugaaucgcaucacguauggcgccuguccuagauacgucaaacaaaacacccugaagcuggcuacagggaugcggaauguucccgaaaaacagacccgcggaauuuucggcgccaucgcgggguuuaucgagaacggaugggaaggcaugguggacgggugguauggauucagacaucaaaauucugagggcauuggccaggccgcugaucuuaagagcacacaggccgcuaucaaccagauuaaugggaaacucaaccggcugaucggaaagaccaacgagaaguuccaccagauugaaaaagaguuuuccgaaguggagagacgcauccaagaccuugaaaaguacgucgaggauacgaaaauugaccuguggagcuauaaugccgagcuccugguggcccuggaaaaccagcacacaaucgaucucaccgacucugagaugaauaagcuguucgaacggaccaaaaagcagcuuagagagaacgcugaagauaugggcaaugggugcuuuaagaucuaccauaaaugugacaacgcgugcauuggauccauccgcaauggcacauaugaucacgacguuuaccgggacgaggcccugaacaauagauuccagauuaaggggguggagcucaaaagcggcuacaaggauuggauccuguggauuucuuuugcuaucuccugcuuccuucugugugucgcccuccugggauuuaucaugugggccugccaaaaaggcaacauucgcuguaauaucugcauuuga

SEQ ID NO: 203134 - RNA, 1701 nt, Artificial Sequence; identical to SEQ ID NO: 203097
  derived and/or modified CDS sequence (opt5) from hemagglutinin__InfluenzaA__AHG96803

SEQ ID NO: 203135 - RNA, 1701 nt, Artificial Sequence; identical to SEQ ID NO: 203097
  derived and/or modified CDS sequence (opt5) from hemagglutinin__InfluenzaA__AHG96815

SEQ ID NO: 203136 - RNA, 1701 nt, Artificial Sequence; identical to SEQ ID NO: 203097
  derived and/or modified CDS sequence (opt5) from hemagglutinin__InfluenzaA__AHG96827

SEQ ID NO: 203137 - RNA, 1701 nt, Artificial Sequence; identical to SEQ ID NO: 203097
  derived and/or modified CDS sequence (opt5) from hemagglutinin__InfluenzaA__AHG96839

SEQ ID NO: 203138 - RNA, 1701 nt, Artificial Sequence; identical to SEQ ID NO: 203097
  derived and/or modified CDS sequence (opt5) from hemagglutinin__InfluenzaA__AHG96851

SEQ ID NO: 203139 - RNA, 1701 nt, Artificial Sequence; identical to SEQ ID NO: 203097
  derived and/or modified CDS sequence (opt5) from hemagglutinin__InfluenzaA__AHG96863

SEQ ID NO: 203140 - RNA, 1701 nt, Artificial Sequence; identical to SEQ ID NO: 203097
  derived and/or modified CDS sequence (opt5) from hemagglutinin__InfluenzaA__AHG96875

SEQ ID NO: 203141 - RNA, 1701 nt, Artificial Sequence; identical to SEQ ID NO: 203097
  derived and/or modified CDS sequence (opt5) from hemagglutinin__InfluenzaA__AHG96887

SEQ ID NO: 203142 - RNA, 1701 nt, Artificial Sequence; identical to SEQ ID NO: 203097
  derived and/or modified CDS sequence (opt5) from hemagglutinin__InfluenzaA__AHG96899

SEQ ID NO: 203143 - RNA, 1701 nt, Artificial Sequence; identical to SEQ ID NO: 203097
  derived and/or modified CDS sequence (opt5) from hemagglutinin__InfluenzaA__AHG96911

SEQ ID NO: 203144 - RNA, 1701 nt, Artificial Sequence; identical to SEQ ID NO: 203097
  derived and/or modified CDS sequence (opt5) from hemagglutinin__InfluenzaA__AHG96923

SEQ ID NO: 203145 - RNA, 1701 nt, Artificial Sequence; identical to SEQ ID NO: 203097
  derived and/or modified CDS sequence (opt5) from hemagglutinin__InfluenzaA__AHG96935

SEQ ID NO: 203146 - RNA, 1701 nt, Artificial Sequence; identical to SEQ ID NO: 203097
  derived and/or modified CDS sequence (opt5) from hemagglutinin__InfluenzaA__AHG96947

SEQ ID NO: 203147 - RNA, 1701 nt, Artificial Sequence; identical to SEQ ID NO: 203097
  derived and/or modified CDS sequence (opt5) from hemagglutinin__InfluenzaA__AHG96959

SEQ ID NO: 203148 - RNA, 1701 nt, Artificial Sequence; identical to SEQ ID NO: 203097
  derived and/or modified CDS sequence (opt5) from hemagglutinin__InfluenzaA__AHG96971

SEQ ID NO: 203149 - RNA, 1701 nt, Artificial Sequence; identical to SEQ ID NO: 203097
  derived and/or modified CDS sequence (opt5) from hemagglutinin__InfluenzaA__AHG96983

SEQ ID NO: 203150 - RNA, 1701 nt, Artificial Sequence; identical to SEQ ID NO: 203097
  derived and/or modified CDS sequence (opt5) from hemagglutinin__InfluenzaA__AHG96995

SEQ ID NO: 203151 - RNA, 1701 nt, Artificial Sequence; identical to SEQ ID NO: 203097
  derived and/or modified CDS sequence (opt5) from hemagglutinin__InfluenzaA__AHG97007

SEQ ID NO: 203152 - RNA, 1701 nt, Artificial Sequence; identical to SEQ ID NO: 203097
  derived and/or modified CDS sequence (opt5) from hemagglutinin__InfluenzaA__AHG97019

SEQ ID NO: 203153 - RNA, 1701 nt, Artificial Sequence; identical to SEQ ID NO: 203097
  derived and/or modified CDS sequence (opt5) from hemagglutinin__InfluenzaA__AHG97031

SEQ ID NO: 203154 - RNA, 1701 nt, Artificial Sequence; identical to SEQ ID NO: 203097
  derived and/or modified CDS sequence (opt5) from hemagglutinin__InfluenzaA__AHG97043

SEQ ID NO: 203155 - RNA, 1701 nt, Artificial Sequence
  derived and/or modified CDS sequence (opt5) from hemagglutinin__InfluenzaA__AHH00866
augaagaccaucauugcccugagcuacauccucugccuggcuuucgcccagaaacuucccggcaacgacaauuccacagcgacgcugugucucgggcaccaugcugugccuaacggaacccuggucaagacaauuaccaaugaucaaaucgagguuacaaacgccaccgaacuugugcagucuagcuccacaggcagaauuugcgacucuccgcaccagauccuggauggggagaauuguacccucaucgacgcccugcugggagauccccauugcgacggcuuucagaacaaagaaugggaucucuucguggagcggagcaaggcuuauuccaauuguuacccuuaugacguccccgauuacgccucucugcgcagccuuguggcuuccagcgggacgcuggaauuuaacaaugagucuuucaacuggaccggaguugcccaaaauggcacauccagcgcgugcaaaagacggucuauuaaguccuuuuucagccgccucaacuggcugcaccagcuugagaauagauauccugcccugaacgugaccaugcccaauaacgacaaguuugauaaacucuacaucuggggcguccaucacccuucuacagacuccgaucagauuagcguguaugcucaggccuccgggcggguuaccgugucuacgaagcgcagccaacagacagucaucccgaacauuggauccagacccugggugcggggcaucagcucucgcauuuccaucuacuggaccaucgugaauccuggggacauucugcugaucaacagcacaggaaaucucauugcucccagaggcuacuucaaaauccggucuggaaagagcuccauuaugcgcucugacgccccuaucgggaaauguaacagcgaaugcaucacccccaauggcuccauuccgaacgauaagccuuuucagaaugucaacagaaucaccuauggcgcguguccccgguacguuaagcagaauacacugaaacuugccacggggaugcgcaacgugccugagaagcaaaccagaggaauuuucggcgcuaucgccggguuuauugaaaauggaugggagggcaugauggacgggugguauggauuccggcaccagaacagcgagggcacaggccaggcugccgaucugaaaucuacccaagccgcuaucaaucagaucaacgggaagcucaauaaacugauugaaaagacaaacgagaaauuucaucagaucgaaaaggaguucuccgaaguggagggacgcauucaggaccuugagaaguacgucgaagauaccaaaaucgaccuguggagcuauaacgcggagcuccugguggcccuggaaaaucaacacacgauugaucucacagacucugagaugaacaagcuguucgaaagaacccggaaacagcuuagagagaaugcugaggauaugggcaacgggugcuuuaagaucuaccauaaaugugacaaugccugcauuggauccauccgcaacggcaccuaugaucacgacguuuaccgggacgaagcccugaauaacagauuccagaucaaggggguggagcucaagagcggcuacaaagauuggauucuguggaucuccuuugcuauuucuugcuuccuucugugugucgugcuccugggauuuaucaugugggccugccagaagggcaauauucgcuguaacaucugcaucuga

SEQ ID NO: 203156 - RNA, 1701 nt, Artificial Sequence
  derived and/or modified CDS sequence (opt5) from hemagglutinin__InfluenzaA__AHH00870
augaagaccaucauugcccugagcuacauccucugccuggcuuucgcccagaaacuucccggcaacgacaauuccacagcgacgcugugucucgggcaccaugcugugccuaacggaacccuggucaagacaauuaccaaugaucaaaucgagguuacaaacgccaccgaacuugugcagucuagcuccacaggcagaauuugcgacucuccgcaccagauccuggauggggagaauuguacccucaucgacgcccugcugggagauccccauugcgacggcuuucagaacaaagaaugggaucucuucguggagcggagcaaggcuuauuccaauuguuacccuuaugacguccccgauuacgccucucugcgcagccuuguggcuuccagcgggacgcuggaauuuaacaaugagucuuucaacuggaccggaguugcccaaaauggcacauccagcgcgugcaaaagacggucuauuaaguccuuuuucagccgccucaacuggcugcaccagcuugagaauagauauccugcccugaacgugaccaugcccaauaacgacaaguuugauaaacucuacaucuggggcguccaucacccuucuacagacuccgaucagauuagcguguaugcucaggccuccgggcggguuaccgugucuacgaagcgcagccaacagacagucaucccgaacauuggauccagacccugggugcggggcaucagcucucgcauuuccaucuacuggaccaucgugaaaccuggggacauucugcugaucaauagcacaggaaaccucauugcucccagaggcuacuucaagauccggucugggaaaagcuccauuaugcgcucugacgccccuaucggaaaguguaauagcgaaugcaucacccccaacggcuccauuccgaaugauaagccuuuucagaacgucaauagaaucaccuauggcgcguguccccgguacguuaaacagaacacacugaaacuugccacggggaugcgcaaugugccugagaaacaaaccagaggaauuuucggcgcuaucgccggguuuauugaaaacggaugggagggcaugauggacgggugguauggauuccggcaccagaauagcgagggcacaggccaggcugccgaucugaagucuacccaagccgcuaucaaccagaucaaugggaaacucaacaagcugauugaaaagacaaaugagaaguuucaucagaucgaaaaggaguucuccgaaguggagggacgcauucaggaccuugagaaauacgucgaagauaccaagaucgaccuguggagcuauaacgcggagcuccugguggcccuggaaaaccaacacacgauugaucucacagacucugagaugaauaaacuguucgaaagaacccggaagcagcuuagagagaacgcugaggauaugggcaaugggugcuuuaaaaucuaccauaagugugacaacgccugcauuggauccauccgcaauggcaccuaugaucacgacguuuaccgggacgaagcccugaacaauagauuccagaucaaggggguggagcucaaaagcggcuacaaggauuggauucuguggaucuccuuugcuauuucuugcuuccuucugugugucgugcuccugggauuuaucaugugggccugccagaaaggcaacauucgcuguaauaucugcaucuga

SEQ ID NO: 203157 - RNA, 1701 nt, Artificial Sequence
  derived and/or modified CDS sequence (opt5) from hemagglutinin__InfluenzaA__AHJ57430
augaaggccauccuggugguccuccuguacaccuucgcuacagccaacgcggacacgcuuugcauuggcuaucacgcuaauaacagcaccgauacaguugacaccgugcuggagaagaaugugacagucacccauuccgugaaccuccuggaagauaagcacaaugggaaacuuuguagacugcggggaguugcuccccuccaucugggcaagugcaacaucgccggguggauucugggaaauccugagugugaaucucucagcacagccuccucuuggagcuacaucguggagaccuccucuagcgacaacggcacgugcuauccgggggauuuuauuaauuacgaggaacugcgcgagcagcuuuccagcgucucuuccuucgaaagauuugagaucagccccaaaaccucuuccuggccuaaccacgacagcaauaagggagugcgggccgcuuguccccaugccggcgcgaagucuuucuauaaaaaccugaucuggcucguuaagaaaggcaauuccuacccuaagcugagcaaauccuauauuaacgauaaggggaaggaagugcuuguccuguggggaauccaccaccccucuacaagcgccgaccaacagucccucuaccagaaugcugaugccuacguguuugugggcaccagccgcuauucuaaaaaguucaaaccugagauugcuaucagaccgaagguccgggggcaggagggacgcaugaacuacuauuggacacugguugaacccggcgacaaaauuaccuuugaggccacggggaaccugguggugccuagauacgcguucgccauggaacggaaugcugccuccggaaucauuaucagcgauacacccguccaugacugcaacaccacaugucaaaccccuaagggcgcugugaauaccucucuccccuuucagaacauccacccgauuacaaucggcaaaugcccuaaguauguuaagagcacgaaacugcgccuugccaccgggcugagaaauauucccuccauccagucucggggacucuucggcgccauugcuggguuuaucgagggaggcuggacagggaugguggauggaugguacggcuaucaucaccagaacgaacaaggcagcggguacgcggccgaccugaaguccacccagaaugcuaucgacgagauuacaaacaaagucaauagcgugaucgagaagaugaacacccaguucacggccguuggaaaagaauuuaaucaccuugagaagcgcauugaaaaccugaauaagaaaguggaugacggcuuccucgauaucuggacauacaacgccgagcugcugguccuccuggaaaaugagagaacccuugacuaucaugauucuaacgugaagaaccuguacgagaaaguccggucccagcucaagaauaacgcuaaagaaauugggaauggauguuucgaguuuuaucacaagugcaacaauaccuguauggaaagcgugaagaacggcacauacgacuauccuaaauacucugaggaagccaagcugaaucgcgagaaaaucgaugggguuaaacuugaguccaccagaaucuaucaaauucuggcgaucuacagcacaguggcuuccucucucguccuggugguuagccugggcgccauuuccuucuggaugugcucuaacggaagccuccagugccggaucuguauuuga

SEQ ID NO: 203158 - RNA, 1701 nt, Artificial Sequence
  derived and/or modified CDS sequence (opt5) from hemagglutinin__InfluenzaA__AHJ57431
augaaggccauccuggugguccuccuguacaccuucgcuacagccaacgcggacacgcuuugcauuggcuaucacgcuaauaacagcaccgauacaguugacaccgugcuggagaaaaaugugacagucacccauuccgugaaccuccuggaagauaagcacaaugggaaacuuuguaagcugagaggaguugcuccccuccaucugggcaaaugcaacaucgccggguggauucugggaaauccugagugugaaucucucagcacagccuccucuuggagcuacaucguggagaccuccucuagcgacaacggcacgugcuauccgggggauuuuauugacuacgaagaacugcgggagcagcuuuccagcgucucuuccuucgaacgcuuugagaucuuccccaagaccagcucuuggccuaaucacgauuccaacaagggagugagagccgcuuguccccaugccggcgcgaaaucuuuuuauaagaaucugaucuggcucguuaaaaagggcaacagcuacccuaaacugucccaaagcuauauuaaugacaaggggaaggaagugcuuguccuguggggaauccaccaccccuccacaucugccgaucagcagagccucuaccagaacgcugacgccuacguguucgugggcaccucccgguauagcaaaaaguuuaaaccugagauugcuauccgcccgaaggucagagaucaagaggggcggaugaauuacuauuggacacugguugaacccggagacaaaauuaccuucgaggccacgggcaaccugguggugccucgcuacgcguuugccauggaaagaaacgcugggucuggaaucauuaucuccgauacacccguccaugacugcaauaccacaugucagaccccuaagggcgccaucaacaccagccuccccuuccagaauauucacccgaucacaauuggcaaaugcccuaaguaugugaagucuacgaaacugcggcuugcuaccgggcugcgcaacauccccagcauucaguccagaggacucuuuggcgccaucgccggguucaucgagggaggcuggacagggaugguugacggaugguacggcuaucaucaccaaaaugaacagggcucuggguacgcugcggaucuuaagagcacccagaacgccauugacaaaaucacaaauaaggugaacuccgucauugagaaaaugaauacccaguuuacggcugugggaaaggaguucaaccaccuggaaaagcggaucgagaaucugaacaaaaagguugaugacggcuuccucgauauuuggacauacaaugccgaacugcuggugcuccuggagaacgaacgcacccuugacuaucaugauagcaaugucaaaaaccuguacgagaaggugagaaaccaacucaaaaauaacgccaaggagaucgggaauggauguuuugaguucuaucacaagugcgacaacaccuguauggagucugucaaaaauggcacauacgauuauccuaaguacuccgaagaggcuaaacugaaccgggaaaagaucgacggggugaaacuugagagcacccgcauuuaucagauccuggccauuuacucuacaguugcguccagccucgugcuggucgugucccugggcgcuaucucuuuuuggaugugcagcaauggaucccuccagugcagaauuuguaucuga

SEQ ID NO: 203159 - RNA, 1701 nt, Artificial Sequence
  derived and/or modified CDS sequence (opt5) from hemagglutinin__InfluenzaA__AHJ57432
augaaggccauccuggugguccuccuguacaccuucgcuacagccaacgcggacacgcuuugcauuggcuaucacgcuaauaacagcaccgauacaguugacaccgugcuggagaaaaaugugacagucacccauuccgugaaccuccuggaagauaagcacaaugggaaacuuuguaagcugagaggaguugcuccccuccaucugggcaaaugcaacaucgccggguggauucugggaaauccugagugugaaucucucagcacagccuccucuuggagcuacaucguggagaccuccucuagcgacaacggcacgugcuauccgggggauuuuauugacuacgaagaacugcgggagcagcuuuccagcgucucuuccuucgaacgcuuugagaucuuccccaagaccagcucuuggccuaaucacgauuccaacaagggagugacagccgcuuguccccaugccggcgcgaaaucuuuuuauaagaaucugaucuggcucguuaaaaagggcaacagcuacccuaaacuguccaagagcuauauuaaugacaaggggaaagaagugcuuguccuguggggaauccaccaccccuccaccacagccgaucaacagucucucuaccagaacgcugacgccuacguguucgugggcaccagcagauauuccaagaaauuuaagccucagauugcuauccggccgaaaguccgcgaucaagaggggagaaugaauuacuauuggacgcugguugagcccggagacaagauuacauucgaagccaccggcaaccugguggugccucgguacgcguuugcccucgagcgcaacgcugggagcggaaucauuaucucugauacacccguccaugacugcaauaccaccugucagacaccuaaaggcgccaucaacacgucccugcccuuccagaauauucacccgaucaccauuggcaagugcccuaaguaugugaaaagcacaaaacuuagacuggcuaccgggcuccggaacguucccucuauccagagccgcggacuguuuggcgccauugccggguucaucgaaggaggcuggacagggaugguggagggaugguacggcuaucaucaccaaaaugaacagggcuccggguacgcugcggaccuuaaaucuacccagaacgccaucgauaagauuacgaauaaagucaacagcgugaucgagaagaugaauacacaguuuaccgcuguuggaaaggaguucaaccaccuggaaaagagaauugagaaucucaacaagaaaguggacgauggcuuccuggacaucuggaccuacaaugccgaacugcucguccugcuugagaacgaacggacacuggauuaucaugacuccaaugugaagaaccucuacgagaaaguccgcaaccaacugaagaauaacgccaaggagauugggaauggauguuuugaguucuaucacaaaugcgauaacaccuguauggagagcgugaagaauggcacauacgacuauccuaaauacucugaagaggcuaaacuuaacagagaaaagaucgaugggguuaagcuggaguccacgcggaucuaucagauucucgccaucuacagcaccguggcgucuucccugguccuggugguuagccucggcgcuauuuccuuuuggaugugcucuaauggaagccugcagugccgcaucuguauuuga

SEQ ID NO: 203160 - RNA, 1701 nt, Artificial Sequence
  derived and/or modified CDS sequence (opt5) from hemagglutinin__InfluenzaA__AHJ57433
augaaggccauccuggugguccuccuguacaccuucgcuacagccaacgcggacacgcuuugcauuggcuaucacgcuaauaacagcaccgauacaguugacaccgugcuggagaagaaugugacagucacccauuccgugaaccuccuggaagauaagcacaaugggaaacuuuguaagcugagaggaguugcuccccuccaucugggcaaaugcaacaucgccggguggauucugggaaauccugagugugaaucucucagcacagccuccucuuggagcuacaucguggagaccuccucuagcgacaacggcacgugcuauccgggggauuuuauuaauuacgaagaacugcgggagcagcuuuccagcgucucuuccuucgaacgcuuugagaucuuccccaagaccagcucuuggccuaaccacgacuccaauaagggagugacagccgcuuguccccaugccggcgcgaaaucuuuuuauaagaaccugaucuggcucguuaaagaaggcaauagcuacccuaagcuguccaaaagcuauauuaacgauaaggggaaggaggugcuuguccuguggggaauccaccaccccuccaccacagccgaccaacagucucucuaccagaaugcugaugccuacguguucgugggcaccagcagauauuccaaaaaguuuaaaccugagauugcuauccggccgaagguccgcgaccaggaagggagaaugaacuacuauuggacgcugauugagcccggagauaaaaucacauucgaagccaccggcaaccugguugugccucgguacgcguuugccauggagcgcaaugcugggagcggaauuaucaucucugacacacccgugcaugauugcaacaccaccugucaaacaccugaaggcgccauuaauacgucccuccccuuccagaacauccacccgauuaccaucggcaagugcccuaaauaugucaagagcacaaagcugagacuugcuaccgggcugcggaaugugcccucuauucagagccgcggacucuuuggcgccaucgccggguucaucgagggaggcuggacagggaugguugacggaugguacggcuaucaucaccagaacgagcaaggcuccggguacgcugcggaccugaaaucuacccagaaugccauugauaagaucacgaacaaagugaauagcgucauugaaaagaugaacacacaguuuaccgcugugggaaaagaguucaaucaccuugaaaagagaaucgagaaccugaauaagaaaguugacgauggcuuccucgacauuuggaccuacaacgccgaacugcuggugcuccuggagaaugagcggacacuugauuaucaugacuccaacgucaagaaccuguacgaaaaagugcgcaaucagcucaagaacaaugccaaagagaucgggaacggauguuuugaguucuaucacaagugcgauaauaccuguauggagagcgucaagaacggcacauacgacuauccuaaauacucugaagaggcuaagcugaauagagagaaaaucgauggggugaaacuugaauccacgcggauuuaucaaauccuggccauuuacagcaccguugcgucuucccucgugcuggucgugagccugggcgcuaucuccuuuuggaugugcucuaacggaagccuccagugccgcauuuguaucuga

SEQ ID NO: 203161 - RNA, 1701 nt, Artificial Sequence
  derived and/or modified CDS sequence (opt5) from hemagglutinin__InfluenzaA__AHJ57434
augaaggccauccuggugguccuccuguacaccuucgcuacagccaacgcggacacgcuuugcauuggcuaucacgcuaauaacagcaccgauacaguugacaccgugcuggagaaaaaugugacagucacccauuccgugaacccccucgaagauaagcacaaugggaaacuguguaaacuuagaggaguugccccucugcaucucggcaagugcaacaucgccggguggauucugggaaauccggagugugaaucucugagcacagcuuccucuuggagcuacaucguggagaccuccucuagcgacaacggcacgugcuaucccggggauuuuauugacuacgaagaacuccgggagcagcuguccagcgucucuuccuucgaacgcuuugagaucuucccuaagaccagcucuuggcccaaucacgauuccaacaagggagugacagccgcuuguccucaugccggcgcgaaaucuuuuuauaagaaucuuaucuggcugguuaaagaaggcaacagcuaccccaagcucuccaaaagcuauauuaaugacaaggggaaggaggugcugguccuuuggggaauccaccacccuuccaccacagccgaucaacagucucuguaccagaacgcugacgccuacguguucgugggcaccagcagauauuccaaaaaguuuaaaccggagauugcuauccggcccaagguccgcgaucaggaagggagaaugaauuacuauuggacgcucguugagccuggagacaaaauuacauucgaagccaccggcaaccugguggugccccgguacgcguuugccauggagcgcaacgcugggagcggaaucauuaucucugauacaccuguccaugacugcaauaccaccugucaaacacccgaaggcgccaucaacacgucccugccguuccagaauauucacccuaucaccauuggcaagugccccaaauauguuaagagcacaaagcucagacuggcuaccgggcuucggaacgugccuucuauccagagccgcggacuguuuggcgccauugccggguucaucgagggaggcuggacagggaugguggacggaugguacggcuaucaucaccagaaugagcaaggcuccggguacgcugcggaucucaaaucuacccagaacgccaucgacaagauuacgaauaaagucaacagcgugaucgaaaagaugaauacacaguuuaccgcuguuggaaaagaguucaaccaccuggaaaagagaauugagaaucuuaacaagaaaguggaugacggcuuccuggauaucuggaccuacaaugccgaacuccugguccugcucgagaacgagcggacacuggacuaucaugauuccaaugugaagaaccuuuacgaaaaaguccgcaaccagcugaagaauaacgccaaagagauugggaauggauguuuugaguucuaucacaagugcgacaacaccuguauggagagcgugaagaauggcacauacgauuaucccaaauacucugaagaggcuaagcucaacagagagaaaaucgacgggguuaagcuggaauccacgcggaucuaucaaauucuugccaucuacagcaccguggcgucuucccugguccucgugguuagccugggcgcuauuuccuuuuggaugugcucuaauggaagccugcagugccgcaucuguauuuga

SEQ ID NO: 203162 - RNA, 1701 nt, Artificial Sequence
  derived and/or modified CDS sequence (opt5) from hemagglutinin__InfluenzaA__AHJ57435
augaaggccauccuggugguccuccuguacaccuucgcuacagccaacgcggacacgcuuugcauuggcuaucacgcuaauaacagcaccgauacaguugacaccgugcuggagaaaaaugugacagucacccauuccgugaaccuccuggaagauaagcacaaugggaaacuuuguaagcugagaggaguugcgccccuccaucugggcaaaugcaacaucgccggguggauucugggaaauccugagugugaaucucucagcacagcuuccucuuggagcuacaucguggagaccuccucuagcgacaacggcacgugcuauccgggggauuuuauuaauuacgaagaacugcgggagcagcuuuccagcgucucuuccuucgaacgcuuugagaucuuccccaagaccagcucuuggccuaaccacgacuccaauagaggagugacagccgcuuguccccaugccggcgccaagagcuuuuauaaaaaccugaucuggcucguuaagaaaggcaauucuuacccuaagcugucccaaagcuauauuaacgauaaagggaaggaagugcuuguccuguggggaauccaccaccccuccaccacagccgaccagcagucucucuaccagaaugcugaugccuacguguucgugggcaccagccgguauuccaagaaauuuaagccugagauugcuauccgcccgaaagucagagaccaagaggggcggaugaacuacuauuggacgcugguugaacccggagauaagauuacauucgaggccaccggcaaccugguggugccucgcuacgcguuugccauggaaagaaaugcugggagcggaaucauuaucucugacacacccguccaugauugcaacaccaccugucagacaccugagggcgccaucaauacgucccuccccuuccagaacauucacccgaucaccauuggcaaaugcccuaaguaugugaaaagcacaaagcugcggcuugcuaccgggcugcgcaauguucccucuauccagagcagaggacucuuuggcgccauugccggguucaucgaaggaggcuggacagggaugguggacggaugguacggcuaucaucaccaaaacgagcagggcuccggguacgcugcggaccugaagucuacccagaaugccaucgauaaaauuacgaacaaggucaauagcgugaucgagaaaaugaacacacaguuuaccgcuguuggaaaggaguucaaucaccuugagaaacggauugaaaaccugaauaagaagguggacgauggcuuccucgacaucuggaccuacaacgccgagcugcugguccuccuggaaaaugagcgcacacuugauuaucaugacuccaacgugaaaaaccuguacgagaaggucagaaaucaacucaaaaacaaugccaaggaaauugggaacggauguuuugaguucuaucacaaaugcgauaauaccuguauggaaagcgugaagaacggcacauacgacuauccuaaguacucugaggaagcuaaacugaaucgggagaagaucgaugggguuaaacuugaguccacgcgcaucuaucagauucuggccaucuacagcaccguggcgucuucccucguccuggugguuagccugggcgcuauuuccuuuuggaugugcucuaacggaagccuccagugcagaaucuguauuuga

SEQ ID NO: 203163 - RNA, 1701 nt, Artificial Sequence
  derived and/or modified CDS sequence (opt5) from hemagglutinin__InfluenzaA__AHJ57436
augaagaccaucauugcccugagcuacauccucugccugguguucgcucagaaacuucccggcaacgacaauuccacagccacgcugugucucgggcaccaugcggucccuaacggaaccauuguuaagacaaucaccaaugaucaaauugaggugacaaacgcuaccgaacuggugcagucuagcuccacaggcgagaucugcgacucuccgcaccagauccuugauggggaaaauuguacccugauugacgcccuccugggagauccccagugcgacggcuuucaaaacaaaaagugggaucuguucgucgagagaagcaaagccuauuccaauuguuacccuuaugacgugcccgauuacgcuucucuccggagccugguugccuccagcgggacgcuugaauuuaacaaugagucuuucaacuggaccggagugacacagaauggcaccuccagcgcuugcauccgcagaucuaacuccagcuuuuucucucggcugaauuggcucacacaucugaacuuuaaguauccugcccuuaaugucaccauucccaacaacgagcaguucgacaagcuguacaucuggggcgugcaccauccugggacggauaaagaccagauuuuucucuaugcgcaagccuccggacgcaucacaguuagcaccaagagaucccagcagacagugauuccgaauaucggcucucggccccgcgucagaaacaucccuagccggauuuccaucuacuggaccauugugaaacccggggauauccugcugauuaauagcaccggaaaccucaucgcuccucgcggcuacuucaagaucagaucugggaaauccagcauuaugcggucugacgcccccaucggaaaguguaauagcgaaugcauuacaccgaacggcuccaucccuaaugacaagcccuuucagaacgugaaucgcauuacguauggcgcuuguccuagauacgucaaacaaaacacccugaagcuggccacagggaugcggaauguucccgagaaacagacccgcggaaucuucggcgcgaucgccggguuuauugaaaacggaugggagggcaugguggaugggugguauggauucagacaccaaaauucugagggccggggccaggcugccgaccuuaagagcacacaggcugccaucgaucagauuaacgggaaacucaauagacugaucggaaagaccaacgaaaaauuccaccagauugagaaggaauuuuccgagguggaaggccgcauccaagaccuugagaaguacgucgaggauacgaaaauugaccuguggagcuauaacgccgaacuccugguggcucuggagaaucagcauacaaucgaucucaccgacucugaacugaacaagcuguucgagaaaaccaagaaacagcugcgggaaaaugcggaggauauggggaacggaugcuuuaagaucuaccacaagugugacaaugccugcauuggcuccaucagaaacgggacauaugaucaugacguuuaccgcgacgaggcucucaauaaccgguuccagauuaaaggcguggaacuuaagagcggauacaaagauuggauccuuuggauuucuuuugccaucuccugcuuccugcucugugucgcccugcugggcuuuaucaugugggcuugccaaaaggggaauauuagauguaacaucugcauuuga

SEQ ID NO: 203164 - RNA, 1701 nt, Artificial Sequence
  derived and/or modified CDS sequence (opt5) from hemagglutinin__InfluenzaA__AHJ57437
augaagaccaucauugcccugagcuacauccucugccugguguucgcucagaaacuucccggcaacgacaauuccacagccacgcugugucucgggcaccaugcggucccuaacggaaccauuguuaagacaaucaccaaugaucaaauugaggugacaaacgcuaccgaacuggugcaaaauucuagcacaggcgagaucugcgacuccccgcaccagauccuugauggggaaaacuguacccugauugacgcccuccugggagauccccagugcgacggcuuucagaauaaaaagugggaucuguucgucgagagaucuaaagccuauagcaacuguuacccuuaugacgugcccgauuacgcuucccuccggucucugguugccagcuccgggacgcuugaauuuaauaacgagagcuucaauuggaccggagugacacagaacggcaccucuuccgcuugcauccgcagaagcaauucuuccuuuuucagccggcugaacuggcucacacaucugaauuuuaaguauccugcccuuaacgucaccaugcccaacaaugagcaguucgacaagcuguacauuuggggcgugcaccauccugggacggauaaagaccagaucuuucucuaugcgcaaucuuccggacgcauuacaguuagcaccaagagaucccagcagacagugaucccgaacauuggcucucggccccgcgucagaaauaucccuagccggaucuccauuuacuggaccaucgugaaacccggggauauucugcugaucaacagcaccggaaaucucauugccccucgcggcuacuucaagaucagaucugggaaauccagcaucaugcggucugacgcucccauuggaaaguguaacagcgaaugcaucacaccgaauggcuccauuccuaacgacaagcccuuucagaaugugaaccgcaucacguauggcgccuguccuagauacgucaaacaaucuacccugaaacuugcuacagggaugcggaauguucccgagaagcagacccgcggaauuuucggcgccaucgcgggguuuaucgaaaacggaugggagggcaugguggaugggugguauggauucagacaccagaauagcgagggccggggccaagccgcugaccugaaguccacacaggccgcuauugaucagaucaacgggaaacucaauagacugauuggaaagaccaacgaaaaauuccaccagaucgagaaggaauuuagcgagguggaaggccgcauucaagaccuugagaaguacgucgaggauacgaaaaucgaccuguggucuuauaacgccgaacuccugguggcccuggagaaucagcauacaauugaucucaccgacuccgaaaugaacaagcuguucgagaaaaccaagaaacagcuuaaggaaaaugcugaggauauggggaacggaugcuuuaagaucuaccacaaaugugacaaugcgugcaucggcagcauucggaacgggacauaugaucaugacguuuacagagacgaggcccugaauaaccgcuuccagaucaagggcguggaacucaaaucuggauacaaggauuggauucuguggaucuccuuugcuauuagcugcuuccuucugugugucgcccuccugggcuuuaucaugugggccugccaaaaagggaauauccgguguaacauuugcaucuga

SEQ ID NO: 203165 - RNA, 1701 nt, Artificial Sequence
  derived and/or modified CDS sequence (opt5) from hemagglutinin__InfluenzaA__AHJ57438
augaagaccaucauugcccugagcuacauccucugccugguguucgcucagaaacuucccggcaacgacaauuccacagccacgcugugucucgggcaccaugcggucccuaacggaaccauuguuaagacaaucaccaaugaucaaauugaggugacaaacgcuaccgaacuggugcaaaauucuagcacaggcgagaucugcgacuccccgcaccagauccuugauggggaaaacuguacccugauugacgcccuccugggagauccccagugcgacggcuuucagaauaaaaagugggaucuguucgucgagagaucuaaagccuauagcaacuguuacccuuaugacgugcccgauuacgcuucccuccggucucugguugccagcuccgggacgcuugaauuuaauaacgagagcuucaauuggaccggagugacacagaacggcaccucuuccgcuugcauccgcagaagcaauucuuccuuuuucagccggcugaaguggcucacacaucugaacuuuaaguauccugcccuuaaugucaccaugcccaacaacgagcaguucgacaaacuguacauuuggggcgugcaccauccugggacggauaaggaccagaucuuucucuaugcgcaagccucuggacgcauuacaguuuccaccaaaagaagccagcaggcugugaucccgaauauuggcucccggccccgcaucagaaacaucccuucucggauuagcaucuacuggacaauugucaagcccggggauauccugcugauuaauuccaccggaaaccucaucgccccucgcggcuacuucaaaaucagaagcgggaagucuuccauuaugcggagcgacgcucccaucggaaaguguaauucugaaugcauuaccccgaacggcagcaucccuaaugacaaacccuuucagaacgugaaucgcauuacauauggcgauuguccuagauacgugaagcaauccacgcugaaacuugccaccgggaugcggaacguccccgagaagcagacacgcggaaucuucggcgcgaucgccggguuuauugaaaauggaugggagggcaugguugacgggugguauggauucagacaccagaacucugagggccggggccaagcugccgaucugaaaagcacccaggcugccaucgaccagauuaaugggaagcucaacagacugaucggaaaaacaaaugaaaaguuccaccagauugagaaggaauuuuccgagguggaaggccgcauccaagaucuugagaaauacguggaggacaccaagauugaucuguggagcuauaacgccgaacuccuggucgcucuggagaaccagcauacgaucgaccucacagauucugaaaugaauaaacuguucgagaagaccaaaaagcagcuucgggaaaacgcggaggacauggggaauggaugcuuuaagaucuaccacaaaugugauaacgccugcaccggcuccauuagaaaugggacauaugaccaugacguguaccgcgaugaggcucugaacaaucgguuccagaucaagggcguugaagugaaaagcggauacaaggacuggauucucuggaucucuuuugccauuuccugcuuccugcuuugugucgcccugcucggcuuuaucaugugggcuugccaaaaagggaacaucagauguaauauuugcaucuga

SEQ ID NO: 203166 - RNA, 1701 nt, Artificial Sequence
  derived and/or modified CDS sequence (opt5) from hemagglutinin__InfluenzaA__AHJ57651
augaucgccuucauugugaucgcuauucuggccgcgaccggcaagagcgacaaaaucugcauuggguaccacgcuaacaauuccacaacgaaggucgauaccauccucgagaaaaacguuacagugacccauucuguggaacugcuugagaaucagaaggaagagagauuuuguaaaaucagcaacaaggcuccccuggaccuccgggauugcacacuggaaggauggauucuuggcaauccucgcugugggauccugcucgccgaccaauccuggucuuauauugucgagagaccgaacgcccggaauggaaucugcuaccccggcacccugaacgagguggaggaacugaaggcccucauugggagcggagaacgcguugagagauucgagauguuuccuaaauccacaugggcuggcguggauaccgacucuggcgucagcuccgccuguccccuggggaauggaccuagcuucuaucggaaccuucuguggaucauuaagcucaaaucuuccgaauaccccgugauccgcggcacguuuaauaacaccggggauaagagcauccuguauuucuggggaguucaccauccuccggugacaaccgagcaggaagcgcuuuacggcucuggggacagauauguccggaugggaacagaguccaugaauuuugcccgcagccccgaaauugcugccagaccugcugugaacggccagcggggccgcaucgauuacuucuggucuauucugaaacccggggagacccucaauguggaguccaacggaaaccugaucgccccuugguacgcguauagauuugucaauaaggacagcaagggcgccauuuuccgguccacgcugcccaucgaaaacugcgaugcuacaugucagaccacagaggggguuauccgcaccaauaaaaccuuucaaaacgugucuccgcucuggauuggagaaugcccuaaguacgugaaaagcaagucccugagacuugccacaggccugcggaaugucccccagaucgagacgagagggcuuuucggagcuauugccggcuuuaucgaaggcggguggaccggaaugauugacggcugguauggguaccaccaugagaacagccagggaucuggcuaugccgcugaucgcgaguccacacagaaagcgaucgacgggaucaccaauaaggugaacagcauuaucgacaaaaugaauacacaauucgaagccguuggccacgaguucucuaaccuggaacggagaauugauaaucuuaacaagcgcauggaggacggauuucuggauguguggaccuacaaugcugaacuccugguccugcucgagaacgagcggacgcuggacaugcacgaugccaaugugaagauccuuuaugaaaaaguuagaagccagcugcgcgacaacgccaaggaucucggcaacggguguuucgaguuuuggcauaaaugcgacaaugaauguauugaguccgugaagaacggaacauacaauuacccuaaauaucagucugagagccggcugaacagacagaccaucgaauccgucaagcucgagaaucugggcguguaccaaauucucgcuaucuauagcaccgucucuuccagccuggugcugguugggcucauccuggccaugggacuuuggaugugcucuaacggcuccaugcagugccgcauuuguaucuga

SEQ ID NO: 203167 - RNA, 1701 nt, Artificial Sequence
  derived and/or modified CDS sequence (opt5) from hemagglutinin__InfluenzaA__AHJ57663
augaucgccuucauugugaucgcuacccuggucgccacaggcaagagcgacaaaauuugcaucggguaccacgcgaacaauuccacgaccaagguugauacaauucucgagaaaaacgugaccgugacacauucugucgaacugcuugagaaucagaaggaagagagauuuuguaaaaucagcaacaaggcuccccuggaccuccgggauugcacccuggaaggauggauccuuggcaauccucgcugugggauucugcucgccgaccaauccuggucuuauaucguggagagaccgaacgcccggaauggaauuugcuaccccggcacacugaacgaggcugaagaacugaaggcccucaucgggagcggagaacgcguugagagauucgagauguuuccuaaauccaccuggacgggcguggauaccgaaucuggcgucagcuccgcuuguccccuggggaauggaccuagcuucuaucggaaccuucuguggauuaucaagcucaaaucuuccgaguaccccgugauucgcggcacauuuaauaacaccggggacaagagcauccuguauuucuggggaguucaccauccuccggugacaaccgaacagaaugcccuuuacggcucuggggauagauauguccggaugggaacggaguccaugaacuuugcgcgcagccccgaaaucgccgcuagaccugccgugaauggccagcggggccgcauugacuacuucuggucuauccugaaacccggggagacacucaacguggaguccaacggaaaucugauugcuccuugguacgccuauagauuugucaacaaggauagcaagggcgcgaucuuccgguccaaucugcccauugaaaacugcgacgccaccugucagacaaccgaggggguuauccgcaccaauaaaacauuucaaaacgugucuccgcucuggaucggagaaugcccuaaguacgugaaaagcaagucccugagacuugcuacgggccugcggaaugucccccagauugagaccagaggacucuucggggccaucgcuggcuuuauugaaggcggguggacaggaaugaucgauggcugguauggguaccaccaugagaacagccagggaucuggcuaugccgccgacaaagaguccacccagaaggcuauugaugggaucacaaauaaagugaacagcaucauugacaagaugaauacccaauucgaagcgguuggccacgaguucucuaaccuggaacgccggaucgacaaucuuaacaagagaauggaggauggauuucuggacguguggacguacaaugccgaacuccugguccugcucgagaacgagcgcacacuggaucuucacgacgcuaacgugaaaaaucugcaugaacggguuaagagccagcucagagauaacgccaaugaccugggcaacggguguuucgaguuuuggcacaaaugcgauaaugaauguauggaguccgugaagaacggaaccuauaauuacccuaaauaccaggccgagucucgccuuaacaagcagaagauugaaagcgucaaacuggaggaguucggcguguaucaaauccucgcuauuuacuccaccgucucuagcucccuggugcugguugggcucaucauggccaugggacuguggaugugccccaauggcagcaugcagugccggauuuguaucuga

SEQ ID NO: 203168 - RNA, 1701 nt, Artificial Sequence
  derived and/or modified CDS sequence (opt5) from hemagglutinin__InfluenzaA__AHJ57674
augaucgccuucauugugaucgcuauucuggucaccacaggcaagagcgacaaaaucugcauuggguaccacgccaacaauuccacgaccaagguugauacaauccucgagaaaaacgugaccgugacacauucugucgaacugcuugagaaucagaaggaagagagauuuuguaaaaucagcaacaaggcgccccuggaccuccgggauugcacccuggaaggauggauucuuggcaauccucgcugugggauccugcucgcugaccaauccuggucuuauauuguggagagaccgaacgcccggaauggaaucugcuaccccggcacacugaacgagguugaagaacugaaggcccucauugggagcggagaacgcguggagagauucgagauguuuccuaaauccaccugggcuggcgucgauaccaauucuggcgugagcuccgccuguccccugggggaaggaccuagcuucuaucggaaccuucuguggaucauuaagcacacgacaucuggcuaccccguuaucaaagggaccuaucgcaauacaggagacaaguccgugcucuacuuuuggggcguccaucacccuccggauaccacggagcagaacgugcuguaugggagcggaaauagauacgugcggaugggcacagaaucuaugaacuucgcucgcucccccgagaucgccgcgagaccugccgucaauggccagcgggggcgcauugacuacuuuuggagcauccuuaaacccggagaaacccugaacguugagucuaacggcaaucucauugcuccuugguaugccuacagauucgugaacaaggauuccaagggggcuaucuuucggagcaaucugcccauugagaacugcgacgccacaugucagaccaccgaaggagugauccgcacaaauaaaacguuccaaaacgucuccccgcuguggaucggcgagugcccuaaguaugugaaaucuaagagccucagacuggcgaccgggcuucggaauguuccccagauugaaacaagaggacuguuuggcgccaucgcuggcuucauugaagggggauggaccggcaugaucgaugggugguacggauaucaucacgaaaacucccagggcagcggguacgccgcugaccgcgagucuacacagaaagccauugauggcaucaccaauaaggugaacuccaucauugacaaaaugaauacgcaauuugaggccgucggacacgaguucagcaaccucgagcggagaaucgacaaucugaacaagcgcauggaagauggcuuccuugacguguggacauauaaugcugagcugcucguucugcuggaaaacgagcggacccucgaucugcaugacgcgaacgugaagaaucuucacgagagaguccgcucucagcugcgggauaacgccaaugaccucgggaacggauguuuugaguucuggcauaaaugcgauaaugaguguauggaaagcgugaagaacggcaccuacaauuacccuaaauaucaggcugaguccagacugaaccgccagaagauugagucugucaaacuugaagaguuugggguguaccaaauccuggccauuuauagcacaguuuccagcucucucgugcuggucggacugaucauggccaugggccucuggaugugcuccaaugggagcaugcagugccggauuuguaucuga

SEQ ID NO: 203169 - RNA, 1701 nt, Artificial Sequence
  derived and/or modified CDS sequence (opt5) from hemagglutinin__InfluenzaA__AHJ57686
augaucgccuucauugugaucgcuauucuggccgcgaccggcaagagcgacaaaaucugcauuggguaccacgcuaacaauuccacaacgaaggucgauaccauccucgagaaaaacguuacagugacccauucuguggaacugcuugagaaucagaaggaaggaagauuuuguaaaaucagcaacaaggcuccccuggaccuccgggauugcacacuggagggcuggauucuugggaauccucgcuguggaauccugcucgccgaccaauccuggucuuauauugucgaaagaccgaacgcccggaauggcaucugcuaccccgggauucugaacgaggccgaggaacugaaggcucucaucggaagcggcgagcgcguggaaagauucgagauguuuccuaaauccaccugggccggcguugauacaaauucuggggugagcuccgcguguccccugggaaacggcccuagcuucuaucggaaucuucuguggauuaucaagcucaaaucuuccgccuaccccgucauccgcgggaccuuuaacaauacgggagacaagagcauucuguauuucuggggcgugcaccauccuccgguugcuaccgagcaggaagcccuuuacgggucuggaaacagauaugugcggaugggcacagaguccaugaauuuugcucgcaaccccgaaaucgccgcgagaccugccgucaacggccagcgggggcgcauugauuacuucuggagcauccugaaacccggagagacccucaauguggaaucuaacggcaaucugauugcuccuugguacgccuauagauuugugaacaaggacuccaagggggcuaucuuccggagcaaucugcccaucgagaacugcgaggccacaugucagaccacggaaggagucauucgcacaaauaaaaccuuucaaaacguuuccccgcucuggaucggcgagugcccuaaguacgugaaaucuaagagccugagacuugccacagggcugcggaaugugccccagauugaaaccagaggacucuucggcgcuaucgcgggcuuuauugaagggggauggaccggcaugaucgaugggugguauggauaccaccaugaaaacucccagggcagcggguaugccgcugaccgcgagucuacacagaaagccaucgauggcauuacgaauaaggucaacuccaucauugacaaaaugaauacccaauucgaggccgugggacacgaguucagcaaccuggagcggagaaucgauaaucuuaacaagcgcauggaagacggcuuucuggacguuuggacauacaacgcugagcuccuggugcugcucgaaaaugagcggacccuggaucuucacgacgccaacgucaagaaucugcaugagaaagugagaucucagcuccgcgauaacgcgaaugaccuggggaacggauguuucgaauuuuggcacaagugcgauaaugaguguauggaaagcguuaaaaacggcacauaugacuacccuaaguaccaggcugagucccggcuuaauagacagaaaauugagucugugaagcuggaaaacuucgaugucuaucaaauccucgccauuuacagcaccguguccagcucucugguccugguggggcucaucauggccaugggacuguggaugugcuccaauggcagcaugcagugccgcaucuguauuuga

SEQ ID NO: 203170 - RNA, 1701 nt, Artificial Sequence
  derived and/or modified CDS sequence (opt5) from hemagglutinin__InfluenzaA__AHJ57697
augaucgccuucauugugaucgcuauucuggccgcgaccggcaagagcgacaaaaucugcauuggguaccacgcuaacaauuccacaacgaaggucgauaccauccucgagaaaaacguuacagugacccauucuguggaacugcuugagaaucagaaggaagagagauuuuguaaaaucagcaacaaggcuccccuggaccuccgggauugcacacuggaaggauggauucuuggcaauccucgcugugggauccugcucgccgaccaauccuggucuuauauugucgagagaccgaacgcccggaauggaaucugcuaccccggcacccugaacgagguggaggaacugaaggcccucauugggagcggagaacgcguugagagauucgagauguuuccuaaauccacaugggcuggcguggauaccaauucuggcgucagcuccgccuguccccuggggaacggaccuagcuucuaucggaaucuucuguggaucauuaagcucaaaucuuccgaauaccccgugauccgcggcacguuuaacaauaccggggacaagagcauccuguauuucuggggaguucaccauccuccggugacaaccgagcaggaagcgcuuuacggcucuggggauagauauguccggaugggaacagaguccaugaacuuugcccgcagccccgaaauugcugccagaccugcugugaauggccagcggggccgcaucgacuacuucuggucuauucugaaacccggggagacccucaacguggaguccaacggaaaucugaucgccccuugguacgcguauagauuugucaacaaggauagcaagggcgccauuuuccgguccaaucugcccaucgaaaacugcgacgcuacgugucagacaaccgaggggguuauccgcacaaauaaaaccuuucaaaacgugucuccgcucuggauuggagaaugcccuaaguacgugaaaagcaagucccugagacuugccaccggccugcggaaugucccccagaucgagacaagaggacucuucggggcuauugccggcuuuaucgaaggcggguggacgggaaugauugauggcugguauggguaccaccaugagaacagccagggaucuggcuaugccgcugaccgcgaguccacccagaaagcgaucgaugggaucacaaauaaggugaacagcauuaucgacaaaaugaauacccaauucgaagccguuggccacgaguucucuaaccuggaacggagaauugacaaucuuaacaagcgcauggaggauggauuucuggacguguggacauacaaugcugaacuccugguccugcucgagaacgagcggacccuggaucuucacgacgccaacgugaagaaucugcaugaaaaaguuaagagccagcucagagauaacgccaaugaccugggcaacggguguuucgaguuuuggcacaaaugcgauaaugaauguauggaguccgugaagaacggaacguaugacuacccuaaauaccaggcugagucucgccuuaaucggcagaagaucgaaagcgucaagcuggagaacuucgauguguaucaaauucucgccaucuacuccacagucucuagcucccuggugcugguuggccucauuauggcgauggggcuguggaugugcagcaauggaucuaugcagugcagaaucuguaucuga

SEQ ID NO: 203171 - RNA, 1701 nt, Artificial Sequence
  derived and/or modified CDS sequence (opt5) from hemagglutinin__InfluenzaA__AHJ57707
augaucgccuucauugugaucgcuauucuggucaccacaggcaagagcgacaagaucugcguuggguaccacgccaacaauuccacgaccaagguggauacaauucucgagaaaaacgugaccgucacacauucuguggaacugcuugagaaucagaaggaagagagauuuuguaaaaucagcaacaaggcgccccuggaccuccgggauugcacccuggaaggauggauccuuggcaauccucgcugugggauucugcucgcugaccaauccuggucuuauaucguugagagaccgaacgcccggaauggaauuugcuaccccggcacacugaacgagguggaagaacugaaggcccucaucgggagcggagaacgcgucgagagauucgagauguuuccuaaauccaccuggacgggcguggauaccaauucuggcguuagcuccgcuuguccccugggggaaggaccuagcuucuaucggaaccuucuguggauuaucaagcacacaaccucuggcuaccccgugauuaaagggacauaucgcaauaccggagacaaguccguccucuacuuuuggggcgugcaucacccuccggauacgacagagcagaacgugcuguaugggagcggaaauagauacguccggaugggcaccgaaucuaugaacuucgcccgcucccccgagaucgcugccagaccugcgguuaauggccagcgggggcgcaucgacuacuuuuggagcauucuuaaacccggagaaacacugaacguggagucuaacggcaaucucaucgccccuugguaugcuuacagauucgugaacaaggauuccaagggggccauuuuucggagcaaucugcccaucgagaacugcgacgcuaccugucagaccacagaaggagucauucgcacgaauaaaaccuuccaaaacguguccccgcuguggaucggcgagugcccuaaguauguuaaaucuaagagccucagacuggccacagggcuucggaaugugccccagaucgaaaccagaggacuguuuggcgcgauugccggcuucaucgaagggggauggacaggcaugauugaugggugguacggauaucaucacgaaaacucccagggcagcggguacgcugccgaccgcgagucuacccagaaagcuaucgauggcauuacgaauaaggucaacuccaucaucgacaaaaugaauacacaauuugaggccgugggacacgaguucagcaaccucgagcggagaauugacaaucugaacaagcgcauggaagauggcuuccuugacguuuggaccuauaaugccgagcugcucgugcugcuggaaaacgagcggacccucgaucugcaugacgcuaacgucaagaaucuucacgagagagugcgcucucagcugcgggauaacgcgaaugaccucgggaacggauguuuugaguucuggcauaaaugcgauaaugaguguauggaaagcgucaagaacggcacauacaauuacccuaaauaucaggccgaguccagacugaacaagcagaaaaucgagucugugaaacuugaagaguuugggguuuaccaaauucuggcuaucuauagcaccguguccagcucucucguccuggugggacugauuauggccaugggccucuggaugugcuccaaugggagcaugcagugccgcaucuguauuuga

SEQ ID NO: 203172 - RNA, 1701 nt, Artificial Sequence
  derived and/or modified CDS sequence (opt5) from hemagglutinin__InfluenzaA__AHJ57719
augaucgccuucauugugaucgcuauucuggccgcgaccggcaagagcgacaaaaucugcauuggguaccacgcuaacaauuccacaacgaaggucgauaccauccucgagaaaaacguuacagugacccauucuguggaacugcuugagaaucagaaggaagagagauuuuguaaaaucagcaacaaggcuccccuggaccuccgggauugcacacuggaaggauggauucuuggcaauccucgcugugggauccugcucuccgaccaaucuuggagcuauauugucgagagaccgaacgcccggaauggaaucugcuaccccggcauucugaacgaggccgaagaacugaaggcccucaucggguccggagaacgcguggagagauucgagauguuuccuaaaucuaccugggcuggcguugauacaaauagcggcguguccagcgccuguccccuggggaacggaccuucuuucuuucggaaucuucuguggauuaucaagcucaaauccagcaccuaucccgucauccgcggcacguucaacaauaccggggacaagucuauucuguacuuuuggggagugcaccauccuuccguuacaaccgaacaggaggcgcuuuauggcagcgggaacagauacgugcggaugggaacagaaucuaugaauuucgcccgcuccccggagaucgcugccagacccgcugucaacggccagcggggccgcauugauuauuuuuggagcauccugaaaccuggggaaacccucaacguggaguccaauggaaaccugauugcccccugguacgcguacagauucgugaauaaggacucuaagggcgccaucuuucggagcaaccugccuaucgagaauugcgaugcuacgugucagacaauugaaggggucauccgcaccaacaaaacauuccaaaauguuagcccccucuggauuggagagugcccgaaguaugugaaauccaagucucugagacuugccaccggccugcggaacgugccucagaucgaaaccagagggcucuuuggagcuauugccggcuucaucgagggcggguggacaggaaugaucgacggcugguacggguaucaccaugaaaauucccagggaagcggcuacgccgaugacaaagagucuacgcagaaggcuauugaugggaucaccaacaaagucaauagcauuaucgacaagaugaacacacaauucgaggcggugggccacgaauuuuccaaucuggagcgccggauugacaaccuuaauaagagaauggaagauggauuccuggacguuuggaccuauaacgccgagcuccuggugcugcucgaaaacgagcgcacacuggaucuucacgacgcuaaugucaaaaaccugcaugagaaggugcggucucagcucagagauaaugccaacgaccugggcaauggguguuuugaguucuggcacaaaugcgauaacgaguguauggaaagcguuaagaauggaaccuacgacuaucccaaauaccaggccgagucccgccuuaaccggcagaagaucgagagcgugaagcuggaaaauuuugaugucuaccaaauucucgcuaucuauucuacgguguccagcucucugguccuggugggccucaucauggccauggggcuguggaugugcuccaacggaagcaugcagugcagaauuuguaucuga

SEQ ID NO: 203173 - RNA, 1701 nt, Artificial Sequence
  derived and/or modified CDS sequence (opt5) from hemagglutinin__InfluenzaA__AHJ57731
augaucgccuucauugugaucgcuauucuggccgcgaccggcaagagcgacaaaaucugcauuggguaccacgcuaacaauuccacaacgaaggucgauaccauccucgagaaaaacguuacagugacccauucuguggaacugcuugagaaucagaaggaagagagauuuuguaaaaucagcaacaaggcuccccuggaccuccgggauugcacacuggaaggauggauucuuggcaauccucgcugugggauccugcucgccgaccaauccuggucuuauauugucgagagaccgaacgcccggaauggaaucugcuaccccggcauucugaacgaggccgaggaacugaaggcucucaucgggagcggagaacgcguggagagauucgagauguuuccuaaauccaccugggccggcguugauacagacucuggcgugagcuccgcguguccccuggggaauggaccuagcuucuaucggaaccuucuguggauuaucaagcucaaaucuuccgaauaccccgucauccgcggcaccuuuaauaacacgggggauaagagcauucuguauuucuggggagugcaccauccuccgguuaccacagagcaggaagcccuuuacggcucugggaauagauaugugcggaugggaaccgaguccaugaacuuugcucgcagccccgaaaucgccgcuagaccugccgucaauggccagcggggccgcauugacuacuucuggucuauccugaaacccggggagacacucaacguggaguccaacggaaaucugauugcgccuugguacgccuauagauuugugaacaaggauagcaagggcgcuaucuuccgguccaaucugcccaucgaaaacugcgacgccaccugucagacgacagagggggucauucgcaccaauaaaacauuucaaaacguuucuccgcucuggaucggagaaugcccuaaguacgugaaaagcaagucccugagacuugcuaccggccugcggaaugugccccagauugagaccagaggacucuucggggccaucgccggcuuuauugaaggcggguggacaggaaugaucgauggcugguauggguaccaccaugagaacagccagggaucuggcuaugcugcggaccgcgaguccacgcagaaagccaucgaugggauuaccaauaaggucaacagcaucauugacaaaaugaauacacaauucgaagcugugggccacgaguucucuaaccuggaacggagaaucgacaaucuuaacaagcgcauggaggauggauuucuggacguuuggaccuacaaugccgaacuccuggugcugcucgagaacgagcggacacuggaucuucacgacgccaacgucaagaaucugcaugaaaaagugagaagccagcuccgcgauaacgcuaaugaccugggcaacggguguuucgaguuuuggcacaagugcgauaaugaauguauggaguccguuaaaaacggaaccuaugacuacccuaaguaccagacggagucucggcuuaauagacagaaaauugaaagcgugaagcuggagaacuucgaugucuaucaaauccucgccauuuacuccacagugucuagcucccugguccuggugggccucaucauggcgauggggcuguggaugugcagcaauggaucuaugcagugccgcaucuguauuuga

SEQ ID NO: 203174 - RNA, 1701 nt, Artificial Sequence
  derived and/or modified CDS sequence (opt5) from hemagglutinin__InfluenzaA__AHJ57743
augaucgccuucauugugaucgcuauucuggucgccaccggcaagagcgacaagaucugcauuggguaccacgcgaacaauuccacaacgaagguugauaccauccucgagaaaaacgugacagugacccauucugucgaacugcuugagaaucagaaggaagagagauuuuguaaaaucagcaacaaggcuccccuggaccuccgggauugcacaauugaaggauggauccugggcaauccucgcugugggauucuucuggccgaccaauccuggucuuauaucguggagagaccggaugcccggaacggaauuugcuaccccggcacccucaaugaggcugaagaacugaaggcccugaucgggagcggagaaaaaguugagcgcuucgagauguuuccuaaguccacaugggcuggcguggacaccucuagcggcgucuccagcgccuguccccucgggaacggaccuucuuucuauagaaaucugcuuuggauuaucaaacugaaguccagcgaauaccccgugauccggggcacguuuaacaauaccggggauaaaucuguucucuauuucuggggagugcaccauccuccggucacaaccgagcagaacgcgcuguacggcuccgggaaucgcuaugugagaaugggaacagaaagcaugaacuuugcccggucucccgagauugcugcccgcccugcugugaauggccagagaggccggaucgacuacuucugguccauucuuaagcccggggaaacccugaacgucgagagcaacggaaaucucaucgccccuugguacgcguaucgcuuuguuaacaaggauuccaaaggcgccauuuucagaucuaaucugcccaucgagaacugcgacgcuacgugucagacaaucgaaggggugauucggaccaauaagacauuucaaaacgugagcccgcuguggaucggagagugcccuaaauacgucaaguccaaaagccuccgccuggccaccggccuuagaaaugugccccagauugaaacccgggggcuguucggagcuaucgccggcuuuauugagggcggguggacaggaaugaucgauggcugguauggguaccaccaugaaaacucucagggauccggcuaugccgcugacagagagagcacgcagaaggcgaucgaugggauuaccaauaaaguuaacucuaucauugacaagaugaauacacaauucgaggccgcuggccacgaguucagcaaccucgagcgccggaucgacaaucugaacaagagaauggaagauggauuucuugacguguggaccuacaaugccgagcugcucguccugcuggaaaacgagcgcacacucgaucugcacgacgccaacgugaaaaaucuucaugagaagguuaaaucccagcugcgggauaacgcuaaugaccucggcaacggguguuucgaauuuuggcacaagugcgauaaugaguguauggaaucugugaaaaacggaaccuaugacuacccuaaguaccagaaggagagcagacugaaucgccagaaaauugaguccgucaaacuugaaaacuucgauguguaucaaauccuggccauuuacagcacggucucuuccagccucgugcugguuggccugaucauggcgauggggcucuggaugugcucuaauggauccaugcagugccggaucuguauuuga

SEQ ID NO: 203175 - RNA, 1701 nt, Artificial Sequence
  derived and/or modified CDS sequence (opt5) from hemagglutinin__InfluenzaA__AHJ57755
augaucgccuucauugugaucgcuauucuggucgccaccggcaagagcgacaaaaucugcauuggguaccacgcgaacaauuccacaacgaagguugauaccauccucgagaaaaacgugacagugacccauucugucgaacugcuugagaaucagaaggaagagagauuuuguaaaaucagcaacaaggcuccccuggaccuccgggauugcacaauugaaggauggauccugggcaauccucgcugugacauucuucuggccgaucaauccuggucuuauaucguggagagaccgaacgcccggaaugggauuugcuaccccggaacccucaacgaggcugaagaacugaaggcccugaucggcagcggggaaggaguugagcgcuucgagauguuuccuaaauccacaugggugggcgucgacaccucuagcggcguguccagcgcuuguccccucgggaauggaccuucuuucuauagaaaccugcuuuggauuaucaagcugaaauccagcgaauaccccguuauccggggcacguuuaauaacaccggggauaagucugugcucuauuucuggggaguccaccauccuccggugacaaccgagcagaaugcccuguacggcuccgggaaccgcuaugugagaaugggaacagaaagcaugaauuuugcgcggucucccgagauugccgcucgcccugccgucaacggccagagaggccggaucgacuacuucugguccauucuuaaacccggggaaacccugaacguugagagcaauggaaaccucaucgcuccuugguacgccuaucgcuuugugaauaaggauaacaagggcgcgauuuucagauccaaucugcccaucgagaacugcgacgccacgugucagacaaccgaaggggugauccggacaaauaaaaccuuucaaaacgucucuccgcuguggauuggagagugcccuaaguacgugaaaagcaagucccuccgccuggcuaccggccuuagaaauguuccccagaucgaaacacgggggcuguucggagccauugcuggcuuuaucgagggcggguggacgggaaugauugauggcugguauggguaccaccaugaaaacagccagggaucuggcuaugccgccgacagagaguccacccagaaagcuaucgaugggaucacaaauaaggugaacagcauuaucgacaaaaugaauacccaauucgaggcggccggccacgaguucucuaaccucgagcgccggauugacaaucugaacaagagaauggaagauggauuucuugacgucuggacauacaacgcugagcugcucgugcugcuggaaaaugagcgcacccucgaucugcacgacgccaacguuaagaaucuucaugagaaagugaagucucagcugcgggauaacgccaaugaccucggcaacggguguuucgaauuuuggcacaaaugcgauaaugaguguauggaauccgucaagaacggaacguaugacuacccuaaauaccagaaggagucuagacugaaucgccagaagaucgagagcgugaaacuugaaaacuucgaugucuaucaaauucuggcuaucuacuccacagugagcagcucccucguuguggucggccugauuauggccauggggcuguggaugugcagcaauggaucuaugcagugccggaucuguaucuga

SEQ ID NO: 203176 - RNA, 1701 nt, Artificial Sequence
  derived and/or modified CDS sequence (opt5) from hemagglutinin__InfluenzaA__AHJ57767
augaucgccuucauugugaucgcuauucuggccgcgaccggcaagagcgacaaaaucugcauuggguaccacgcuaacaauuccacaacgaaggucgauaccauccucgagaaaaacguuacagugacccauucuguggaacugcuugagaaucagaaggaagagagauuuuguaaaaucagcaacaaggcuccccuggaccuccgggauugcacacuggaaggauggauucuuggcaauccucgcugugggauccugcucgccgaccaauccuggucuuauauugucgagagaccgaacgcccggaauggaaucugcuaccccggcacccugaacgagguggaggaacugaaggcccucauugggagcggagaacgcguugagagauucgagauguuuccuaaauccacaugggcuggcguggauaccaauucuggcgucagcuccgccuguccccuggggaacggaccuagcuucuaucggaaucuucuguggaucauuaagcucaaaucuuccgaauaccccgugauccgcggcacguuuaacaauaccggggacaagagcauccuguauuucuggggaguucaccauccuccggugacaaccgagcaggaagcgcuuuacggcucuggggauagauauguccggaugggaacagaguccaugaacuuugcccgcagccccgaaauugcugccagaccugcugugaauggccagcggggccgcaucgacuacuucuggucuauucugaaacccggggagacccucaacguggaguccaacggaaaucugaucgccccuugguacgcguauagauuugucaacaaggauagcaagggcgccauuuuccgguccaaucugcccaucgaaaacugcgacgcuacgugucagacaaccgaggggguuauccgcacaaauaaaaccuuucaaaacgugucuccgcucuggauuggagaaugcccuaaguacgugaaaagcaagucccugagacuugccaccggccugcggaaugucccccagaucgagacaagaggacucuucggggcuauugccggcuuuaucgaaggcggguggacgggaaugauugauggcugguauggguaccaccaugagagcucucagggauccggcuaugccgcugacaaagagagcacccagaaggcgaucgaugggaucacaaacaaaguuaauucuauuaucgacaagaugaacacccaauucgaagccgugggccacgaguucagcaaucuggaacgccggauugacaaccuuaauaagagaauggaggauggauuucuggacguguggacauacaacgcugaacuccugguccugcucgagaaugagcgcacccuggaucuucacgacgccaacgugaaaaaccugcaugaaaagguucggucccagcucagagauaaugccaacgaccugggcaauggguguuucgaguuuuggcacaaaugcaacaaugaauguauggagucugugaagaacggaacguaugauuacccuaaauaccagaaggagagccgccuuaaucggcagaagaucgaauccgucaaacuggagaacuucgacguguaucaaauucucgcuaucuacagcacagucucuuccagccuggugcugguuggccucauucuggccauggggcuuuggaugugcucuaauggauccaugcagugcagaaucuguaucuga

SEQ ID NO: 203177 - RNA, 1701 nt, Artificial Sequence
  derived and/or modified CDS sequence (opt5) from hemagglutinin__InfluenzaA__AHJ57779
augaucgccauuaucauuaucgcuauucugguggccaccggcaagagcgacaaaaucugcaucggguaccacgcgaacaauuccacaacgaaggucgauaccauucucgagaaaaacguuacagugacccauucuguggaacugcuugaggaccagaaggaagagagauucuguaaaaucagcaauaaggcuccccuggaucuccgggacugcacaauugaaggauggauccugggcaacccucgcugugggauucuucuggccgaucaauccuggucuuauaucgucgagagaccgaaugcccggaacggaauuugcuaccccggcacccucaaugaggcugaagaacugaaggcccugaucgggagcggagaaggcguggagcgcuuugagauguucccuaaauccacaugggcuggcguugacaccaacucuggggugagcuccgccuguccccucggaaauggcccuagcuuuuauagaaaccugcuuuggaucauuaagcugaaaucuuccgaauaccccgucauccgggggacguucaauaacaccggagauaagagcgugcucuauuuuuggggcguucaccauccuccggugacaaccgagcagaaugcgcuguacgggucuggaaaccgcuaugucagaaugggcacagaauccaugaauuucgcccggagccccgagauugcugcccgcccugcugugaacggccagagagggcggaucgacuacuuuuggucuauucuuaaacccggagaaacccugaacguggaguccaauggcaaccucaucgccccuugguacgcguaucgcuucgucaauaaggauagcaagggggccaucuuuagauccaaccugcccauugagaauugcgacgcuacgugucagacaaccgaaggaguuauccggacaaacaaaaccuuccaaaaugugucuccgcuguggauuggcgagugcccuaaguacgugaaaagcaagucccuccgccuggccaccgggcuuagaaacgucccccagaucgaaacacggggacuguuuggcgcuauugccggcuucaucgaagggggauggacgggcaugaucgaugggugguauggauaccaccaugaaaauagccagggcucuggguaugccgcugacagagaguccacccagaaagcgauugauggcaucacaaacaaggugaauagcauuaucgacaaaaugaacacccaauuugaggccgcuggacacgaguucucuaaucucgagcgccggauugacaaccugaauaagagaauggaagauggcuuccuugacguuuggacauacaacgccgagcugcucgugcugcuggaaaacgagcgcacccucgaucugcacgacgccaaugucaagaaccuucaugagaaagugaagucucagcugcgggauaaugcuaacgaccucgggaauggauguuuugaguucuggcacaaaugcgauaacgaguguauggaauccguuaagaauggcacguaugacuacccuaaauaccagaaggagucuagacugaaccgccagaagaucgagagcgugaaacuugaaaauuuugaugucuaucaaauucuggccaucuacuccacagugagcagcucccucguccugguggggcugaucauggcgaugggacucuggaugugcagcaacggcucuaugcagugcaugauuuguaucuga

SEQ ID NO: 203178 - RNA, 1701 nt, Artificial Sequence
  derived and/or modified CDS sequence (opt5) from hemagglutinin__InfluenzaA__AHJ57791
augaucgccauuaucauuaucgcuauucuggugaccacaggcaagagcgacaaaaucugcaucggguaccacgccaacaauuccacgaccaaggucgauacaauucucgagaaaaacguuaccgugacacauucuguggaacugcuugagaauaagaaagaagagagauucuguaagaucagcaacaaggcgccccuggaccuccgggauugcacccuggaaggauggauucuuggcaauccucgcugugggauccugcucgcugaccaguccuggucuuauauugucgagagaccgaacgcccggaauggaaucugcuaccccggcacacugaacgaggugaaagaacugaaggcccucauugggagcggagagcgcguuaaaagauuugaaauguucccuaaguccaccugggcuggcguggauacgaauagcggcgucagcuccagcuguccccuggggaacggaccuucuuuuuaucggaaucuucuguggaucaucaaacacaccacauccggcuaccccgugauuaaggggaccuauacaaacaccggagacaagagcguucucuacuucuggggcauccaucacccuccggauacgacagagcaaaaugugcuguaugggucuggaaaccgcuacgucagaaugggcaccgaguccaugaauuuugcccggagccccgaaauugcugcccgcccugcggugaacggccagagagggcggaucgacuacuucuggucuauucuuaaacccggagagacacugaacguggaauccaauggcaaccucaucgccccuugguaugcuuaccgcuuugucaauaaggauagcaaaggggccaucuucagauccaaccugcccauugaggacugcgaugcuaccugucagaccacagaaggaguuauccggacgaauaagaccuuucagaacgugucuccgcuguggauuggcgagugcccuaaauaugucaagagcaaaucccuccgccuggccacagggcuuagaaaugugccccaaaucgagacccggggacuguucggcgcgauugccggcuuuaucgaagggggauggacaggcaugaucgacgggugguacggauaucaucacgagaacagccagggcucuggguacgcugccgauagagaauccacccagaaggcuauugacggcaucacgaauaaggugaacagcauuaucgacaaaaugaauacacaguucgaggccguuggacacgaauuuucuaaccucgagcgccggauugauacccugaauaagagaauggaggacggcuuccuugauguguggaccuauaacgccgaacugcucguccugcuggagaaugaacgcacacucgaccugcaugaugcuaacgugaaaaaccuucacgagcggguuaagagccaacugagagacaaugcgaacgaucucgggaauggauguuucgaauuuuggcauaaaugcgacaacgaguguauggaguccgugaagaauggcaccuacaacuacccuaaguaucaggccgaaucucgccugaauaaacagaagaucgagagcgucaaacuugaagaguucgggguguaccagauucuggcuaucuauuccacagucucuucuucccucgugcugguuggacugaucauggccauggugcucuggaugugcagcaacggcucuaugcaaugccgggucuguauuuga

SEQ ID NO: 203179 - RNA, 1701 nt, Artificial Sequence
  derived and/or modified CDS sequence (opt5) from hemagglutinin__InfluenzaA__AHJ57815
augaucgccuucauuaucauuaccauccuggugacaacgggcaagagcgacaaaauuugcaucggguaccacgcuaacaauuccaccacaaaggucgauaccauccucgagaaaaacguuacagugacccauucuguggaacugcuugagaaucagaaggaagagagauuuugucggauuagcaacaaagcgccccuggaccucaaggaaugcacacuggagggauggauccuuggcaauccucaaugugaucugcuccugggggaccaguccuggucuuauauugucgagcgcccgaacgccagaaauggaaucugcuaccccggcacccugaacgaaguggaggaacuccgggcucugauugggagcggagagggcguugagcgcuucgaaauguuuccuaaguccacgugggccggcguggauaccaauagaggggucacaucuagcugucccuucggauccggcagcucuuuuuaucggaaccuucuguggaucgugaaacacaccacauccagcuacccuguuauuaaggggaccuuccgcaauacgggagacaaaucugugcucuauuuuuggggcguccaucaccccuucgauacaaacgagcagaaugugcuguacggguccggaaacagauaugugcggaugggcaccgaaagcaugaauuuugcccgcggcccugaggucgcugccagaccgguugugaacgggcagcggggacgcaucgacuacuucuggucuauccuuaagcccggcgaaacacugaacauugaguccaaugggaaccucaucgcuccuugguacgccuauagauuugugaauaaagauagcaagggagcgauuuuccgguccaaccugcccaucgaggacugcgaugccaccugucaaaccauugaaggcgucauccgcacaaauaagacguuucagaacgugucuccucuguggaucggggagugccccaaauacguuaagagcgaaucccucagacuggcuaccggacuucggaaugugccgcagauugagacaagaggccuguucggcgccaucgcuggguucauugaaggaggcuggaccgggaugaucgacggaugguauggcuaccaucacgagaacagccaggggucuggcuaugccgcggaucgcgaguccacacaaaaagccauugacggaaucaccacgaaggucaauagcaucauugacaaaaugaacacacaguuugaagcugugggccacgaguucucuaaucucgaacggagaaucgauaaccugaauaagcgccuugaggacggguuucuggauguuuggaccuacaacgccgaacuccuggugcugcucgagaaugagcggacccuggaccuucaugaugcuaacgucaaaaaccugcacgaaagagugcgcagccagcuccgggacaaugccaacgaucugggaaauggcuguuucgaguuuuggcauaagugcgacaacgaauguauggaguccgucaagaaugggacauauaacuacccuaaauaccaggccgagucuagacuuaauaagcaacgcauugaaagcgugaaacuggagaacuucgauguuuaucagauccucgcuauuuacuccaccgugucuagcucccugguccuggugggacucauccuggcgaugggccuuuggaugugcagcaaugggucuaugcagugccggauuuguaucuga

SEQ ID NO: 203180 - RNA, 1701 nt, Artificial Sequence
  derived and/or modified CDS sequence (opt5) from hemagglutinin__InfluenzaA__AHJ57827
augaucgccuucauugugaucgcuauucuggucgccaccggcaagagcgacaaaaucugcauuggguaccacgcgaacaauuccacaacgaagguugauaccauccucgagaaaaacgugacagugacccauucugucgaacugcuugagaaucagaaggaagagagauuuuguaaaaucagcaacaaggcuccccuggaccuccgggauugcacaauugaaggauggauccugggcaauccucgcugugggauucuucuggccgaccaauccuggucuuauaucguggagagaccgaacgcccggaauggaauuugcuaccccggcacccucaacgagguugaagaacugaaggcucugaucgggagcggagaacgcguggagagauucgagauguuuccuaaauccacaugggccggcgucgauaccaauucuggcgugagcuccgcuuguccccucgggaacggaccuagcuucuaucggaaucugcuuuggauuaucaagacgaaaucuuccgaauaccccguuaucaagggcaccuuuaacaauacaggggacaaaagcgugcuguauuucuggggaguccaccauccuccgucucgcaacgagcagaaugugcucuacggcuccggggauagauaugugcggaugggaaccgaaagcaugaacuuugcccgcucucccgagauugcggccagaccugcugucaacggccagcggggccgcaucgacuacuucugguccauucugaagcccggggaaacacuuaauguugagagcaacggaaaucugaucgccccuugguacgcuuauagauuugugaacaaggauucccggggcgccauuuuccgcucuaaucuccccaucgagaacugcgacgcgaccugucagacggccgaaggggugaucagaacaaauaaaaccuuucaaaacgucagcccgcuguggauuggagagugcccuaaguacgugaaauccaagagccugcggcucgcuacaggccugagaaauguuccccagaucgaaacccgcgggcuuuucggagccauugcuggcuuuaucgagggcggguggaccggaaugauugauggcugguauggguaccaccaugaaaacucucagggauccggcuaugccgccgaccgggagagcacacagaaagcuaucgaugggaucacgaauaaggugaacucuauuaucgacaaaaugaauacccaauucgaggcggucggccacgaguucagcaaccuggagagacgcauugacaaucucaacaagcggauggaagauggauuucuggacguguggacauacaacgccgagcuucugguucuccuggaaaaugagagaacccuggaucuccacgacgcuaacgugaagaaucugcaugagcgcgucaaaucccagcuucgggauaacgccaaugaccugggcaacggguguuucgaauuuuggcacaagugcgauaaugaguguauggaaucugugaaaaacggaacauaugacuacccuaaguaccagaaagagagcagacucaaucgccagaagaucgaguccgucaagcuggaaaacuucgauguguaucaaauucuugccaucuacagcaccguuucuuccagccuggugcucgucggccugauuauggcuauggggcuguggaugugcucuaauggauccaugcagugccggaucuguaucuga

SEQ ID NO: 203181 - RNA, 1701 nt, Artificial Sequence
  derived and/or modified CDS sequence (opt5) from hemagglutinin__InfluenzaA__AHJ57850
augaucgccuucauugugaucgcuauucuggccaccacaggcaagagcgacaaaaucugcauuggguaccacgcgaacaauuccacgaccaaggucgauacaauccucgagaaaaacguuaccgugacacauucuguggaacugcuugagaaucagaaggaagagagauuuuguaaaaucagcaacaaggcuccccuggaccuccgggauugcacccuggaaggauggauucuuggcaauccucgcugugggauccugcucgccgaccaauccuggucuuauauugucgagagaccgaacgcccggaauggaaucugcuaccccggcauucugaacgaggcugaggaacugaaggcccucaucgggagcggagaacgcguggagagauucgagauguuuccuaaauccacaugggcuggcguugauaccgacucuggcgugagcuccgccuguccccuggggaauggaccuagcuucuaucggaaccuucuguggauuaucaagcucaaaucuuccgaauaccccgucauccgcggcacguuuaauaacaccggggauaagagcauucuguauuucuggggagugcaccauccuccgguuacaaccgagcaggaagcgcuuuacggcucugggaauagauaugugcggaugggaacagaguccaugaacuuugcccgcacccccgaaaucgcugccagaccugcugucaauggccagcggggccgcauugacuacuucuggagcauccugaaacccggggagacgcucaacguggagucuaacggaaaucugauugccccuugguacgcguauagauuugugaacaaggauuccaagggcgccaucuuccggagcaaucugcccaucgaaaacugcgacgcuacaugucagaccacagagggggucauucgcaccaauaaaaccuuucaaaacguuuccccgcucuggaucggagaaugcccuaaguacgugaaaucuaagagccugagacuugccacaggccugcggaaugugccccagauugagacgagaggacucuucggggcuaucgccggcuuuauugaaggcggguggaccggaaugaucgauggcugguauggguaccaccaugagaacucccagggaagcggcuaugccgcugaccgcgagucuacacagaaagcgaucgaugggauuaccaauaaggucaacuccaucauugacaaaaugaauacacaauucgaagccgugggccacgaguucagcaaccuggaacggagaaucgacaaucuuaacaagcgcauggaggauggauuucuggacguuuggaccuacaaugcugaacuccuggugcugcucgagaacgagcggacgcuggaucuucacgacgccaacgucaagaaucugcaugaaaaagugagaucucagcuccgcgauaacgccaaugaccugggcaacggguguuucgaguuuuggcacaagugcgauaaugaauguauggagagcguuaaaaacggaacauaugacuacccuaaguaccaggcugagucccggcuuaauagacagaaaauugaaucugugaagcuggagaacuucgaugucuaucaaauccucgccauuuacagcaccguguccagcucucugguccuggugggccucaucauggcgauggggcuguggaugugcuccaauggaagcaugcagugccgcaucuguauuuga

SEQ ID NO: 203182 - RNA, 1701 nt, Artificial Sequence
  derived and/or modified CDS sequence (opt5) from hemagglutinin__InfluenzaA__AHJ57862
augaucgccuucauugugaucgcuauucuggccgcgaccggcaagagcgacaaaaucugcauuggguaccacgcuaacaauuccacaacgaaggucgauaccauccucgagaaaaacguuacagugacccauucuguggaacugcuugagaaucagaaggaagagagauuuuguaaaaucagcaacaaggcuccccuggaccuccgggauugcacacuggaaggauggauucuuggcaauccucgcugugggauccugcucgccgaccaauccuggucuuauauugucgagagaccgaacgcccggaauggaaucugcuaccccggcauucugaacgaggccgaggaacugaaggcucucaucgggagcggagaacgcguggagagauucgagauguuuccuaaauccaccugggccggcguugauacaaauucuggcgugagcuccgcguguccccuggggaacggaccuagcuucuaucggaaucuucuguggauuaucaagcucaaaucuuccgaauaccccgucauccgcggcaccuuuaacaauacgggggacaagagcauucuguauuucuggggagugcaccauccuccgguuaccacagagcaggaagcccuuuacggcucugggaacagauaugugcggaugggaaccgaguccaugaauuuugcucgcagccccgaaaucgccgcuagaccugccgucaacggccagcggggccgcauugauuacuucuggucuauccugaaacccggggagacacucaacguggaguccaauggaaaccugauugcgccuugguacgccuauagauuugugaauaaggacagcaagggcgcuaucuuccgguccaaccugcccaucgaaaauugcgaugccaccugucagacgacagagggggucauucgcaccaacaaaacauuucaaaauguuucuccgcucuggaucggagaaugcccuaaguacgugaaaagcaagucccugagacuugcuaccggccugcggaacgugccccagauugagaccagaggacucuucggggccaucgccggcuuuauugaaggcggguggacaggaaugaucgacggcugguauggguaccaccaugagaauagccagggaucuggcuaugcugcggaucgcgaguccacgcagaaagccaucgacgggauuaccaacaaggucaauagcaucauugauaaaaugaacacacaauucgaagcugugggccacgaguucucuaaucuggaacggagaaucgacaaccuuaauaagcgcauggaggacggauuucuggauguuuggaccuacaacgccgaacuccuggugcugcucgagaacgagcggacacuggaccuucacgaugccaaugucaagaaccugcaugaaaaagugagaagccagcuccgcgacaaugcuaacgaucugggcaauggguguuucgaguuuuggcacaagugcgacaacgaauguauggaguccguuaaaaauggaaccuaugauuacccuaaguaccaggccgagucucggcuuaacagacagaaaauugaaagcgugaagcuggagaauuucgacgucuaucaaauccucgcgauuuacuccacggugucuagcucccugguccuggugggccucaucauggcuauggggcuguggaugugcagcaacggaucuaugcagugccgcaucuguauuuga

SEQ ID NO: 203183 - RNA, 1701 nt, Artificial Sequence
  derived and/or modified CDS sequence (opt5) from hemagglutinin__InfluenzaA__AHJ57873
augaucgccuucauugugaucgcuacccuggucgccacaggcaagagcgacaaaauuugcaugggguaccacgcgaacaauuccacgaccaagguugauacaauccucgagaaaaacgugaccgugacacauucugucgaacugcuugagaaucagaaggaagagagauuuuguaaaauuagcaacaaggcuccccuggaccuccgggauugcacccuggaaggauggauccuuggcaauccucgcugugggauccugcucgccgaccaauccuggucuuauauuguggagagaccgaacgcccggaauggaaucugcuaccccggcacacugaacgaggcugaggaacugaaggcccucauugggagcggagaacgcguugagagauucgagauguuuccuaaauccaccuggacgggcguggauaccgaaucuggcgucagcuccgcuuguccccuggggaauggaccuagcuucuaucggaaccuucuguggaucauuaagcucaaaucuuccgaguaccccgugauccgcggcacauuuaauaacaccggggacaagagcauucuguauuucuggggaguucaccauccuccggugacaaccgaacagaaugcccuuuacggcucuggggauagauauguccggaugggaacggaguccaugaacuuugcgcgcagccccgaaaucgccgcuagaccugccgugaauggccagcggggccgcaucgacuacuucuggucuauucugacacccggggagacccucaacguggaguccaacggaaaucugaucgcuccuugguacgccuauagauuugucaacaaagauagcaagggcgcgauuuuccgguccaaucugcccaucgaaaacugcgacgccacaugucagaccaccgaggggguuauucgcacaaauaagacguuucaaaacgugucuccgcucuggaucggagaaugcccuaaauacgugaagucuaaaucccugagacuugcuaccggccugcggaaugucccccagaucgagacaagaggacucuucggggccauugcuggcuuuaucgaaggcggguggaccggaaugauugauggcugguauggguaccaccaugagaacagccagggaucuggcuaugccgccgacaaggaguccacacagaaagcuaucgaugggauuaccaauaaggugaacagcaucaucgacaaaaugaauacgcaauucgaagcgguuggccacgaguucucuaaccuggaacgccggauugacaaucuuaacaagagaauggaggauggauuucuggacguguggacauacaaugccgaacuccugguccugcucgagaacgagcgcacccuggaucuucacgacgcuaacgugaagaaucugcaugaaaaaguucggagccagcucagagauaacgccaaugaccugggcaacggguguuucgaguuuuggcacaagugcgauaaugaauguauggaguccgugaaaaacggaaccuaugacuacccuaaguaccagaaagagucucgccuuaaucggcagaagaucgaaagcgucaagcuggagaacuucgauguguaucaaauucucgccaucuacuccacagucagcagcucccuggugcugguuggccucauucuggcuauggggcuuuggaugugcagcaauggaucuaugcauugcagaaucuguauuuga

SEQ ID NO: 203184 - RNA, 1701 nt, Artificial Sequence
  derived and/or modified CDS sequence (opt5) from hemagglutinin__InfluenzaA__AHJ57885
augaucgccuucauugugauggcuauccuggccgcgaccggcaagagcgacaagauuugcaucggguaccacgcuaacaauuccacaacgaaggucgauaccauucucgagaaaaacguuacagugacccauucuguggaacugcuugagaaucagaaggaagagagauuuuguaaaaucagcaacaaggcuccccuggaccuccgggauugcacacuggaaggauggauccuuggcaauccucgcugugggauucugcucgccgaccaauccuggucuuauaucgucgagagaccgaacgcccggaauggaauuugcuaccccggcauccugaacgaggccgaagaacugaaggcucucauugggagcggagaacgcguggagagauucgagauguuuccuaaauccaccugggccggcguugauacagacucuggcgugagcuccgcguguccccuggggaauggaccuagcuucuaucggaaccuucuguggaucauuaagcgcaaaucuuccgccuaccccgucaucagaggcaccuuuaauaacacgggggauaagagcauccucuauuucuggggagugcaccauccuccgguuaccacagaacaggaggcucuguacggcucugggaaucgguaugugcgcaugggaaccgaauccaugaacuuugccagaaaucccgagauugcugcccggccugcggucaacggccagcgcggcagaaucgacuacuucuggagcauucuuaaacccggggaaacacugaacaucgagucuaauggaaaccucauugccccuugguacgcuuaucgguuugugaauaaggauuccaagggcgccaucuuccgcagcaaccugcccaucgaggacugcgaugcuuccugucagaccacggaaggggugauuagaacaaauaaaaccuuucaaaacgucucuccgcuguggaucggagagugcccuaaguacguuaaaagcaagucccuccggcuggccacaggccuuagaaaugugccccagauugaaacccgcgggcuguucggagccaucgcuggcuuuauugagggcggguggaccggaaugaucgacggcugguauggguaccaccaugaaaacagccagggaucuggcuaugcggccgaucgggaguccacacagaaagcuaucgacgggauuacgaauaaggugaacagcaucauugacaaaaugaauacccaauucgaggccgucggccacgaguucucuaaccucgagagacgcaucgauaaucuggacaagcggauggaagauggauuucuugacguguggacauacaacgccgagcugcucguucugcuggaaaaugagagaacccucgaucugcacgacgcuaacgugaagaaccuucaugagaaaguccgcagccagcugcgggauaaugccaacgaccucggcaauggguguuucgaauuuuggcacaagugcgauaacgaguguauggaauccgugaaaaauggaacauaugacuacccuaaguaccaggcggagucuagacugaaccgccagaaaauugagagcguuaaacuugaaaauuucgauguguaucaaauccuggcuauuuacuccaccgucucuagcucccucgugcuggucggccugaucauggccauggggcucuggaugugcagcaacggaucuaugcagugccggaucuguauuuga

SEQ ID NO: 203185 - RNA, 1701 nt, Artificial Sequence
  derived and/or modified CDS sequence (opt5) from hemagglutinin__InfluenzaA__AHJ57897
augaucgccuucauugugaucgcuauucuggccgcgaccggcaagagcgacaagaucugcauuggguaccacgcuaacaauuccacaacgaaggucgauaccauccucgagaaaaacguuacagugacccauucuguggaacugcuugagaaucagaaggaagagagauuuuguaaaaucagcaacaaggcuccccuggaccuccgggauugcacacuggaaggauggauucuuggcaauccucgcugugggauccugcucgccgaccaauccuggucuuauauugucgagagaccgaacgcccggaauggaaucugcuaccccggcauucugaacgaggccgaagaacugaaggcucucaucgggagcggagaacgcguggagagauucgagauguuuccuaaauccaccugggccggcguugauacagacucuggcgugagcuccgcguguccccuggggaauggaccuagcuucuaucggaaccuucuguggauuaucaagcgcaaaucuuccgccuaccccgucaucagaggcaccuuuaauaacacgggggauaagagcauucucuauuucuggggagugcaccauccuccgguuaccacagaacaggaggcucuguacggcucugggaaucgguaugugcgcaugggaaccgaauccaugaacuuugccagaaaucccgagaucgcugcccggccugcggucaacggccagcgcggcagaauugacuacuucuggagcauccuuaaacccggggaaacacugaacauugagucuaauggaaaccucaucgccccuugguacgcuuaucgguuugugaauaaggauuccaagggcgccaucuuccgcagcaaccugcccauugaggacugcgaugcuuccugucagaccacggaaggggugaucagaacaaauaaaaccuuucaaaacgucucuccgcuguggauuggagagugcccuaaguacguuaaaagcaagucccuccggcuggccacaggccuuagaaaugugccccagaucgaaacccgcgggcuguucggagccauugcuggcuuuaucgagggcggguggaccggaaugaucgacggcugguauggguaccaccaugaaaacagccagggaucuggcuaugcggccgaucgggaguccacacagaaagcuauugacgggaucacgaauaaggugaacagcauuaucgacaaaaugaauacccaauucgaggccgucggccacgaguucucuaaccucgagagacgcauugauaaucugaacaagcggauggaagacggauuucuugauguguggacauacaaugccgagcugcucguucugcuggaaaacgagagaacccucgaccugcacgaugcuaacgugaagaaucuucaugagaaaguccgcagccagcugcgggacaacgccaaugaucucggcaacggguguuucgaauuuuggcacaagugcgacaaugaguguauggaauccgugaaaaacggaacauaugauuacccuaaguaccaggcggagucuagacugaaucgccagaaaaucgagagcguuaaacuugaaaacuucgacguguaucaaauucuggcuaucuacuccaccgucucuagcucccucgugcuggucggccugaucauggccauggggcucuggaugugcagcaauggaucuaugcagugccggauuuguaucuga

SEQ ID NO: 203186 - RNA, 1701 nt, Artificial Sequence
  derived and/or modified CDS sequence (opt5) from hemagglutinin__InfluenzaA__AHJ57908
augaucgccuucauugugaucgcuauucuggucgccaccggcaagagcgacaaaaucugcauuggguaccacgcgaacaauuccacaacgaagguugauaccauccucgagaaaaacgugacagugacccauucugucgaacugcuugagaaucagaaggaagagagauuuuguaaaaucagcaacaaggcuccccuggaccuccgggauugcacaguggaaggauggauucugggcaauccucgcugugggauccuuauugccgaccaauccuggucuuauaucguugagagaccgaacgcccggaauggaauuugcuaccccggcacccugaacgaggcugaggagcucaaggcccugaucgggagcggagaaggcguggagcgcuucgagauguuuccuaaauccacaugggcuggcgucgauaccucuagcgggguguccagcgccuguccccugggaaauggcccuucuuucuauagaaaccuccuguggauuaucaaacuuaaguccagcgaauaccccguuauccgggggacguuuaauaacaccggagacaagucugugcuguauuucuggggcguccaccauccuccggugacaaccgagcaggaugcgcucuacggguccggaaaucgcuaugugagaaugggcacagaaagcaugaacuuugcccggucucccgagauugcugcccgcccugcugucaauggccagagagggcggaucgacuacuucugguccguucugaaacccggagaaacccuuaacguggagagcaacggcaaucugauugccccuugguacgcguaucgcuuugugaacaaggauaauaagggggccaucuucagauccaaccuccccauugagaauugcgacgcuacgugucagacaaccgaaggagucauccggacaaacaaaaccuuucaaaaugugucuccgcuguggaucggcgagugcccuaaguacguuaaaagcaagucccugcgccucgccaccgggcugagaaacgugccccagauugaaacacggggacuuuucggcgcuaucgccggcuuuauugaagggggauggacgggcaugaucgaugggugguauggauaccaccaugaaaauagccagggcucuggguaugccgcugacagagaguccacccagaaagcgauugauggcaucacaaacaaggucaauagcaucauugacaaaaugaacacccaauucgaggccgcuggacacgaguucucuaaucuggaacgccggaucgacaaccucaauaagagaauggaagauggcuuucuggacguguggacauacaacgccgagcuucugguucuccuggaaaacgagcgcacccuggaucuccacgacgccaaugugaagaaccugcaugagaaagucaagagccagcuucgggauaaugcuaacgaccuggggaauggauguuucgaauuuuggcacaaaugcgauaacgaguguauggaauccgugaagaauggcacguaugacuacccuaaauaccagaaggagucuagacucaaccgccagcggauugagagcgucaagcuggaaaauuucgauguguaucaaauccuugccauuuacuccacaguuucuagcucccugguggucguggggcucaucauggcgaugggacuguggaugugcagcaacggcucuaugcagugcaugauuuguaucuga

SEQ ID NO: 203187 - RNA, 1701 nt, Artificial Sequence
  derived and/or modified CDS sequence (opt5) from hemagglutinin__InfluenzaA__AHJ57920
augaucgccauuaucauuaucgcuauucugguggccaccggcaagagcgacaaaaucugcaucggguaccacgcgaacaauuccacaacgaaggucgauaccauucucgagaaaaacguuacagugacccauucuguggaacugcuugagaaucagaaggaagagagauucuguaaaaucagcaacaaggcuccccuggaccuccgggauugcacaauugaaggauggauccugggcaauccuuggugugggauucuucuggccgaccaauccuggucuuauaucgucgagcgcccgaacgccagaaauggaauuugcuaccccggcacccucaacgagguggaagaacugaaggcucugaucgggagcggagaacggguugagcgcuuugagauguucccuaaauccacaugggccggcguggauaccaauucuggcgucagcuccgcuuguccccucgggaacggaccuagcuuuuauagaaaucugcuuuggaucauuaagacgaaaucuuccgaauaccccgugaucaagggcaccuucaacaauacaggggacaaaagcguucuguauuuuuggggagugcaccauccuccgucucggaacgagcagaauguccucuacggcuccggggaucgcuaugugagaaugggaaccgaaagcaugaacuucgcccggucucccgagauugcggcccgcccugcugugaacggccagagaggccggaucgacuacuuuugguccauucugaagcccggggaaacacuuaaugucgagagcaacggaaaucugaucgccccuugguacgcuuaucgcuucguuaacaaggauuccagaggcgccaucuuucggucuaaucuccccauugagaacugcgacgcgaccugucagacggccgaaggggugauccgcacaaauaaaaccuuccaaaacgugagcccgcuguggauuggagagugcccuaaguacgucaaauccaagagccugagacucgcuacaggccugcggaaugugccccagaucgaaaccagagggcuuuuuggagccauugcuggcuucaucgagggcggguggaccggaaugaucgauggcugguauggguaccaccaugaaaacucucagggauccggcuaugccgccgaccgcgagagcacacagaaagcuacggaugggauuaccaauaagguuaacucuaucauugacaaaaugaauacacaauuugaggcggugggccacgaguucagcaaccuggagcggagaaucgacaaucucaacaagcgcauggaagauggauuccuggacgucuggaccuacaacgccgagcuucuggugcuccuggaaaaugagcggacacuggaucuccacgacgcuaacguuaagaaucugcaugagagagugaaaucccagcuucgcgauaacgccaaugaccugggcaacggguguuuugaguucuggcacaagugcgauaaugaauguauggaaucugucaaaaacgacaccuaugauuacccuaaguaccagaaagagagccggcucaauagacagaagauugaguccgugcgccuggaaaacuuugacgucuaucaaauccuugccauuuacagcacggugucuuccagccugguucucgugggacugaucauggcuaugggccuguggaugugcucuaauggguccaugcagugccggaucuguauuuga

SEQ ID NO: 203188 - RNA, 1701 nt, Artificial Sequence
  derived and/or modified CDS sequence (opt5) from hemagglutinin__InfluenzaA__AHJ57932
augaucgcccugauuaucauuaccauccucgugacaacgggcaagagcgacaaaauuugcaucggguaccacgcuaacaauuccaccacaaaggucgauaccauccuggagaaaaacguuacagugacccauucuguggaacuucuggagaaucagaaggaagagagauucugucggauuagcaacaaagcgccccucgaccugaaggaaugcacacuugagggauggauccugggcaauccucaaugugaucuccugcugggggaccaguccuggucuuauauugucgagcgcccgaacgccagaaauggaaucugcuaccccggcacccucaacgaaguggaggaacugcgggcucuuauugggagcggagagggcguugagcgcuuugaaauguucccuaaguccacgugggccggcguggauaccaauagaggggucacaucuagcugucccuuuggauccggcagcucuuucuaucggaaccugcucuggaucgugaaacacaccacauccagcuacccuguuauuaaggggaccuuucgcaauacgggagacaaaucugugcuguauuucuggggcguccaucaccccuuugauacaaacgagcagaaugugcuuuacggguccggaaacagauaugugcggaugggcaccgaaagcaugaauuucgcccgcggcccugaggucgcugccagaccgguugugaacgggcagcggggacgcaucgacuacuuuuggucuauccugaagcccggcgaaacacucaacauugaguccaaugggaaccugaucgcuccuugguacgccuauagauucgugaauaaagauagcaagggagcgauuuuucgguccaaccugcccaucgaggacugcgaugccaccugucaaaccauugaaggcgucauccgcacaaauaagacguuccagaacgugucuccucucuggaucggggagugccccaaauacguuaagagcgaaucccugagacuugcuaccggacugcggaaugugccgcagauugagacaagaggccucuuuggcgccaucgcuggguucauugaaggaggcuggaccgggaugaucgacggaugguauggcuaccaucacgagaacagccaggggucuggcuaugccgcggaucgcgaguccacacaaaaagccauugacggaaucaccacgaaggucaauagcaucauugacaaaaugaacacacaguucgaagcugugggccacgaguuuucuaaucuggaacggagaaucgauaaccuuaauaagcgccuggaggacggguuccucgauguuuggaccuacaacgccgaacugcuggugcuccuggagaaugagcggacccuugaccugcaugaugcuaacgucaaaaaccuccacgaaagagugcgcagccagcugcgggacaaugccaacgaucuuggaaauggcuguuuugaguucuggcauaagugcgacaacgaauguauggaguccgucagaaaugggacauauaacuacccuaaguaccaggccgagucucgccugaauaaacaacggauugaaagcgugaagcucgagaacuuugauguuuaucagauccuggcuauuuacuccaccgugucuagcucccugguccucgugggacugauccuugcgaugggccuguggaugugcagcaaugggucuaugcagugcagaauuuguaucuga

SEQ ID NO: 203189 - RNA, 1701 nt, Artificial Sequence
  derived and/or modified CDS sequence (opt5) from hemagglutinin__InfluenzaA__AHJ57943
augaucgccuucauugugaucgcuacccuggucgccacaggcaagagcgacaaaauuugcaucggguaccacgcgaacaauuccacgaccaagguugauacaauucucgagaaaaacgugaccgugacacauucugucgaacugcuugagaaucagaaggaagagagauuuuguaaaaucagcaacaaggcuccccuggaccuccgggauugcacccuggaaggauggauccuuggcaauccucgcugugggauucugcucgccgaccaauccuggucuuauaucguggagagaccgaacgcccggaauggaauuugcuaccccggcacacugaacgaggcugaggaacugaaggcccucaucgggagcggagaacgcguugagagauucgagauguuuccuaaauccaccuggacgggcguggauaccgaaucuggcgucagcuccgcuuguccccuggggaauggaccuagcuucuaucggaaccuucuguggauuaucaagcucaaaucuuccgaguaccccgugauucgcggcacauuuaauaacaccggggacaagagcauccuguauuucuggggaguucaccauccuccggugacaaccgaacagaaugcccuuuacggcucuggggauagauauguccggaugggaacggaguccaugaacuuugcgcgcagccccgaaaucgccgcuagaccugccgugaauggccagcggggccgcauugacuacuucuggucuauccugaaacccggggagacacucaacguggaguccaacggaaaucugauugcuccuugguacgccuauagauuugucaacaaggauagcaagggcgcgaucuuccgguccaaucugcccauugaaaacugcgacgccaccugucagacaaccgaggggguuauccgcaccaauaaaacauuucaaaacgugucuccgcucuggaucggagaaugcccuaaguacgugaaaagcaagucccugagacuugcuacgggccugcggaaugucccccagauugagaccagaggacucuucggggccaucgcuggcuuuauugaaggcggguggacaggaaugaucgauggcugguauggguaccaccaugagaacagccagggaucuggcuaugccgccgacaaagaguccacccagaaggcuauugaugggaucacaaauaaagugaacagcaucauugacaagaugaauacccaauucgaaacgguuggccacgaguucucuaaccuggaacgccggaucgacaaucuuaacaagagaauggaggauggauuucuggacguguggacauacaaugcggaacuccugguccugcucgagaacgagcgcacccuggaucuucacgacgccaacgugaaaaaucugcaugaaaagguucggagccagcucagagauaacgcuaaugaccugggcaacggguguuucgaguuuuggcacaaaugcaauaacgaauguauggaguccgugaagaauggaaccuaugauuacccuaaauaccagaaggagucucgccuuaaccggcagaagauugaaagcgucaaacuggagaauuucgacguguaucaaauccucgccauuuacuccacagucucuagcucccuggugcugguuggccucauccuggccauggggcuuuggaugugcagcaacggaucuaugcagugcagaauuuguaucuga

SEQ ID NO: 203190 - RNA, 1701 nt, Artificial Sequence
  derived and/or modified CDS sequence (opt5) from hemagglutinin__InfluenzaA__AHJ57954
augaucgccuucauugugaucgcuauucuggccgcgaccggcaagagcgacaaaaucugcauuggguaccacgcuaacaauuccacaacgaaggucgauaccauccucgagaaaaacguuacagugacccauucuguggaacugcuugagaaucagaaggaagagagauuuuguaaaaucagcaacaaggcuccccuggaccuccgggauugcacacuggaaggauggauucuuggcaauccucgcugugggauccugcucgccgaccaauccuggucuuauauugucgagagaccgaacgcccggaauggaaucugcuaccccggcauucugaacgaggccgaagaacugaaggcucucaucgggagcggagaacgcguggagagauucgagauguuuccuaaauccaccugggccggcguugauacaaauucuggcgugagcuccgcguguccccuggggaacggaccuagcuucuaucggaaucuucuguggauuaucaagcagaaaucuuccgccuaccccgucauccgcggcaccuuuaacaauacgggggacaagagcauucucuauuucuggggagugcaccauccuccgguuaccacagaacaggaggcucuguacggcucugggaacagauaugugcggaugggaaccgaauccaugaauuuugcccgcaaccccgagaucgcugccagaccugcggucaacggccagcggggccgcauugauuacuucuggagcauccuuaaacccggggaaacacugaauguggagucuaacggaaaucucauugccccuugguacgcuuauagauuugugaacaaggacuccaagggcgccaucuuccggagcaaucugcccaucgagaacugcgaugcuaccugucaaacgacagaaggggucauucgcaccaauaaaacauuucagaacguuuccccgcuguggaucggagagugcccuaaguacgugaaaucuaagagccucagacuggccaccggccuucggaaugugccccagauugaaaccagagggcuguucggagccaucgcuggcuuuauugagggcggguggacaggaaugaucgacggcugguauggguaccaccaugaaaacucccagggaagcggcuaugcggccgaucgcgagucuacgcaaaaagcuaucgacgggauuaccaauaaggucaacuccaucauugauaaaaugaauacacaguucgaggccgugggccacgaguucagcaaccucgagcggagaaucgacaaucugaacaagcgcauggaagacggauuucuugauguuuggaccuacaacgccgagcugcucgugcugcuggaaaaugagcggacacucgaccugcacgaugcuaacgucaagaaucuucaugagaaagugagaucucagcugcgcgacaacgccaaugaucucggcaacggguguuucgaauuuuggcacaagugcgacaaugaguguauggaaagcguuaaaaacggaaccuaugauuacccuaaguaccaggcggagucccggcugaauagacaaaagauugagucugugaaacuugaaaacuucgacgucuaucagauccuggcuauuuacagcacgguguccagcucucucguccuggugggccugaucauggccauggggcucuggaugugcuccaauggaagcaugcagugccgcaucuguauuuga

SEQ ID NO: 203191 - RNA, 1701 nt, Artificial Sequence
  derived and/or modified CDS sequence (opt5) from hemagglutinin__InfluenzaA__AHJ57965
augaucgccuucauuaucauuaccauccuggugacaacgggcaagagcgacaaaauuugcaucggguaccacgcuaacaauuccaccacaaaggucgauaccauccucgagaaaaacguuacagugacccauucuguggaacugcuugagaaucagaaggaagagagauuuuguaaaauuagcaacaaggcgccccuggaccucaaggaaugcacacuggagggauggauccuuggcaauccucaaugugaucugcuccugggggaccaguccuggucuuauauugucgagcggccgaacgcccgcaauggaaucugcuaccccggcacccugaacgaaguggaggaacucaaagcucugauugggagcggagagagaguugagcgguucgaaauguuuccuaaguccacgugggccggcguggauaccaauucuggcgucacaagcuccuguagcuucgggucuggauccagcuuuuaucgcaaccuucuguggaucauuaaacacaccacaucuuccuaccccgugaucaagggcaccuucagaaauacgggggacaaaagcguucucuauuuuuggggagugcaucacccuaucgauacaaccgagcagaacguccuguacggcucugggaaucgguaugugcgcaugggaacagaauccaugaacuucgccagaagccccgagauugcugcccggccuguggucaauggccagcgcggcagaaucgacuacuuuugguccauucuuaagccgggggaaacccugaacaucgagucuaacggaaaucucauugcucccugguacgccuaucgguucguuaacaaggauagcaaaggcgcgaucuuucgcuccaaucugccuaucgagaacugcgacgccaccugucaaacaauugaaggggugaucagaacgaauaagaccuuccagaacgugagcccccuguggauuggagagugcccuaaauacgucaagucugaaucccuccggcuggcuacaggccuucgcaaugugccccagaucgagaccagagggcuguuuggagccauugcuggcuucaucgaaggcggguggacaggaaugaucgauggcugguauggguaccaucacgagaacagccagggaucuggcuaugccgcggaccgggagagcacccaaagagccauugaugggaucacgacaaaaguuaauuccauuaucgacaagaugaacacccaguucgaagcugugggccacgaguuuucuaaucucgaacgccggauugacaaccugaauaaaagaauggaggauggauuccuugacgucuggaccuacaacgccgaacugcucgugcugcuggagaaugagcgcacacucgaucugcaugacgcuaacguuaagaaccuucacgaacgggugagaagccagcugcgcgauaaugccaacgacggcgggaauggauguuuugaguucuggcauaagugcgauaacgaauguauggaguccgucaaaaauggcaccuaugacuacccgaaguaccaggccgagagccggucuaacagacaacgcaucgaauccgugaaacucgagaauuuugaugucuaucagauucuggcuaucuacagcacagugucuuccagccuuguuguggucuggcugauccucgcgauggggcuguggaugugcgccaacggauccaugcagugccggauuuguaucuga

SEQ ID NO: 203192 - RNA, 1701 nt, Artificial Sequence
  derived and/or modified CDS sequence (opt5) from hemagglutinin__InfluenzaA__AHJ57977
augaucgccuucauugugaucgcuauucuggccgcgaccggcaagagcgacaaaaucugcauuggguaccacgcuaacaauuccacaacgaaggucgauaccauccucgagaaaaacguuacagugacccauucuguggaacugcuugagaaucagaaggaagagagauuuuguaaaaucagcaacaaggcuccccuggaccuccgggauugcacaauugaaggauggauccugggcaauccucgcugugggauucuucuggccgaccaauccuggucuuauaucgucgagagaccgaacgcccggaauggaauuugcuaccccggcacccucaacgagguggaggaacugaaggcccugaucgggagcggagaacgcguugagagauucgagauguuuccuaaauccacaugggcuggcguggauaccaauucuggcgucagcuccgccuguccccucgggaacggaccuagcuucuaucggaaucugcuuuggauuaucaagcugaaaucuuccgaauaccccgugauccgcggcacguuuaacaauaccggggacaagagcauucucuauuucuggggaguucaccauccuccggugacaaccgagcaggaagcgcuguacggcucuggggauagauauguccggaugggaacagaguccaugaacuuugcccgcagccccgaaaucgcugccagaccugcugugaauggccagcggggccgcauugacuacuucuggucuauccuuaaacccggggagacccugaacguggaguccaacggaaaucucauugccccuugguacgcguauagauuugucaacaaggauagcaagggcgccaucuuccgguccaaucugcccaucgaaaacugcgacgcuacgugucagacaaccgaggggguuauucgcacaaauaaaaccuuucaaaacgugucuccgcuguggaucggagaaugcccuaaguacgugaaaagcaagucccucagacuggccaccggccuucggaaugucccccagauugagacaagagggcuguucggagcuaucgccggcuuuauugaaggcggguggacgggaaugaucgauggcugguauggguaccaccaugagaacagccagggaucuggcuaugccgcugacaaagaguccacccagaaggcgaucgaugggauuacaaauaaagugaacagcaucauugacaagaugaauacccaauucgaagccguuggccacgaguucucuaaccucgaacgccggaucgacaaucugaacaagagaauggaggauggauuucuugacguguggacauacaaugcugaacugcucguccugcuggagaacgagcgcacccucgaucugcacgacgccaacgugaaaaaucuucaugaaaagguucggagccagcugagagauaacgccaaugaccucggcaacggguguuucgaguuuuggcacaaaugcaauaacgaauguauggaguccgugaagaauggaacguaugauuacccuaaauaccagaaggagucucgccugaaccggcagaagauugaaagcgucaaacuugagaauuucgacguguaucaaauccuggcuauuuacuccacagucucuagcucccucgugcugguuggccugauccucgccauggggcuguggaugugcagcaacggaucuaugcagugcagaaucuguauuuga

SEQ ID NO: 203193 - RNA, 1701 nt, Artificial Sequence
  derived and/or modified CDS sequence (opt5) from hemagglutinin__InfluenzaA__AHJ57989
augaucgccuucauugugaucgcuauucuggucaccacaggcaagagcgacaaaaucugcauuggguaccacgccaacaauuccacgaccaagguugauacaauccucgagaaaaacgugaccgugacacauucugucgaacugcuugagaaucagaaggaagagagauuuuguaaaaucagcaacaaggcgccccuggaccuccgggauugcacccuggaaggauggauucuuggcaauccucgcugugggauccugcucgcugaccaauccuggucuuauauuguggagagaccgaacgcccggaauggaaucugcuaccccggcacacugaacgagguugaagaacugaaggcccucauugggagcggagaacgcguggagagauucgagauguuuccuaaauccaccugggcucgggucgauacggaccgcggcgugucuagcgccuguccccugggcaaugggccuuccuucuauagaaaccuucuguggaucguuaagcacaccacaagcgaauaccccgugauuaaaggaaccuauacaaauaccggcgauaagucuguccucuacuuuuggggagugcaucacccuccggacacgacagagcagaacgugcuguauggguccggcaaucgguacguccgcauggggaccgaaagcaugaacuucgcuagaucucccgagaucgccgcgcggccugccguuaauggacagcgcggcagaaucgauuacuuuugguccauucuuaaacccggcgaaacacugaacguggagagcaacgggaaucucaucgcuccuugguaugccuaccgguucgugaacaaggacucuaagggagcuauuuuucgcuccaaucugcccaucgagaacugcgaugccaccugucagaccacagaaggcgucauuagaacgaauaaaaccuuccaaaacgugagcccgauguggaucggggagugcccuaaguauguuaaauccaagucucugcggcucgcgacaggacugagaaaugugccccagaucgaaacccgcggccuuuuuggggccauugcuggauucaucgagggcggcuggacagggaugauugacggaugguacggcuaucaucacgaaaacagccagggguccggauacgccgcugaucgggagagcacccagaaagccaucgacggcauuacgaauaaggucaacucuaucaucgacaaaaugaauacacaauuugaggccguggggcacgaguucuccaaccuggagagacgcauugauaaucucaacaagcggauggaagacggcuuccuggauguuuggaccuauaaugcugagcuucuggugcuccuggaaaacgagagaacccuggaccuccaugauagcaacgucaagaaucugcacgagcgcgugaaaucucagcuucgggacaacgcgaaugaucugggaaacggcuguuuugaguucuggcauaagugcgacaaugaauguauggaaagcgucaaaaacgggacauacaauuacccuaaguaucaggccgaguccagacucaaccgccagaaaaucgagucugugaagcuggaagaguuuggaguuuaccaaauucuugcuaucuauagcaccguguccagcucucugguccucgugggccugauuauggccauggggcuguggaugugcuccaauggaagcaugcagugccggaucuguauuuga

SEQ ID NO: 203194 - RNA, 1701 nt, Artificial Sequence
  derived and/or modified CDS sequence (opt5) from hemagglutinin__InfluenzaA__AHJ58001
augaucgccuucauugugaucgcuauucuggccgcgaccggcaagagcgacaagaucugcauuggguaccacgcuaacaauuccacaacgaaggucgauaccauccucgagaaaaacguuacagugacccauucuguggaacugcuugagaaucagaaggaagagagauuuuguaaaaucagcaacaaggcuccccuggaccuccgggauugcacacuggaaggauggauucuuggcaauccucgcugugggauccugcucgccgaccaauccuggucuuauauugucgagagaccgaacgcccggaauggaaucugcuaccccggcauucugaacgaggccgaggaacugaaggcucucaucgggagcggagaacgcguggagagauucgagauguuuccuaaauccaccugggccggcguugauacagacucuggcgugagcuccgcguguccccuggggaauggaccuagcuucuaucggaaccuucuguggauuaucaagcucaaaucuuccgaauaccccgucauccgcggcaccuuuaauaacacgggggauaagagcauucuguauuucuggggagugcaccauccuccgguuaccacagagcaggaagcccuuuacggcucugggaauagauaugugcggaugggaaccgaguccaugaacuuugcucgcagccccgaaaucgccgcuagaccugccgucaauggccagcggggccgcauugacuacuucuggucuauccugaaacccggggagacacucaacguggaguccaacggaaaucugauugcgccuugguacgccuauagauuugugaacaaggauagcaagggcgcuaucuuccgguccaaucugcccaucgaaaacugcgacgccaccugucagacgacagagggggucauucgcaccaauaaaacauuucaaaacguuucuccgauguggaucggagaaugcccuaaguacgugaaaagcaagucccucagacuggcuaccggccuucggaaugugccccagauugagaccagagggcuguucggagccaucgccggcuuuauugaaggcggguggacaggaaugaucgauggcugguauggguaccaccaugagaacagccagggaucuggcuaugcugcggaccgcgaguccacgcagaaagccaucgaugggauuaccaauaaggucaacagcaucauugacaaaaugaauacacaauucgaagcugugggccacgaguucucuaaccucgaacggagaaucgacaaucugaacaagcgcauggaggauggauuucuugacguuuggaccuacaaugccgaacugcucgugcugcuggagaacgagcggacacucgaucugcacgacgccaacgucaagaaucuucaugaaaaagugagaagccagcugcgcgauaacgcuaaugaccucggcaacggguguuucgaguuuuggcacaagugcgauaaugaauguauggaguccguuaaaaacggaaccuaugacuacccuaaguaccagacggagucucggcugaauagacagaaaauugaaagcgugaaacuugagaacuucgaugucuaucaaauccuggccauuuacuccacagugucuagcucccucguccuggugggccugaucauggcgauggggcucuggaugugcagcaauggaucuaugcagugccgcaucuguauuuga

SEQ ID NO: 203195 - RNA, 1701 nt, Artificial Sequence
  derived and/or modified CDS sequence (opt5) from hemagglutinin__InfluenzaA__AHJ58013
augaucgccuucauugugaucgcuauucuggucaccacaggcaagagcgacaagaucugcauuggguaccacgccaacaauuccacgaccaagguugauacaauccucgagaaaaacgugaccgugacacauucugucgaacugcuugagaaucagaaggaagagagauuuuguaaaaucagcuccaaggcgccccuggaccuccgggauugcucucuggaaggauggauucuuggcaacccucgcugugggauccugcucgcugaccaaagcugguccuauauuguggagagaccgaaugcccggaacggaaucugcuaccccggcacccugaaugagguugaagaacugaaggcccucauugggucuggagaacgcguggagagauucgagauguuuccuaaaagcacaugggcuggcgucgauaccaacuccggcgugagcucugccuguccccugggggaaggaccuuccuucuaucggaaucuucuguggaucauuaagcgcacgaccagcgaguaccccguuaucaaaggcacauauagaaacaccggggacaagucugugcucuacuuuuggggaguccaccauccuccggauacaaccgaacagaaugugcuguauggcuccgggaaccgguacgugcgcaugggaacggagagcaugaauuucgcuagaucucccgaaaucgccgcgcggccugccgucaacggccagcgcggcagaauugacuacuuuugguccauccuuaaacccggggagacacuggauguugagagcaauggaaaccucauugcuccuugguaugccuaccgguucgugaacaaggaauccaagggcgcuaucuuucgcucuaaucugcccauugagaacugcgacgccaccugucagacaaccgaaggggugaucagaaccaauaaaacauuccaaaacgucagcccgcuguggaucggagagugcccuaaguaugugaaauccaagagccuccggcuggcgacgggccuuagaaauguuccccagauugaaacccgcgggcuguuuggagccaucgcuggcuucauugagggcggguggacaggaaugaucgauggcugguacggguaucaccaugagaacucucagggauccggcuacgccgcugacaaagaaagcacccagaaggccauugaugggaucacaaauaaagugaacucuaucauugacaagaugaauacccaauuugaggccgucggccacgaguucagcacgcucgagcggagaaucgacaaccugaauaagcgcauggaagauggauuccuugacguguggacauauaacgcugagcugcucguucugcuggagaaugaacggacccucgaucugcacgacgcgaacgugaaaaaucuucaugagagaguccgcucccagcugcgggauaacgccaacgaccucggcaauggguguuuugaguucuggcacaagugcgauaacgaauguauggagucugugaaaaauggaaccuacaacuacccuaaguaucaggcugaaagcagacugaauaaacagaagauugaguccgucaaacuugaagaguuuggcguguaccaaauccuggccauuuauagcacaguuucuuccagccucgugcuggucgggcugaucauggccaugggacucuggaugugcucuaacggcuccaugcagugccgcauuuguaucuga

SEQ ID NO: 203196 - RNA, 1701 nt, Artificial Sequence
  derived and/or modified CDS sequence (opt5) from hemagglutinin__InfluenzaA__AHJ58025
augaucgccuucauugugaucgcuauucuggucaccacaggcgagagcgacaagaucugcauuggguaccacgccaacaauuccacgaccaaaguugauacaauccucgaaaagaacgugaccgugacacauucugucgagcugcuugaaaaucagaaagaggaaagauuuuguaagaucagcaacaaagcgccccuggaccuccgggauugcaccauugagggauggauccugggcaauccucgcugugggauucuucuggcugaccaauccuggucuuauaucguggagagaccgaacgcccggaauggaauuugcuaccccggcacacucaacgaagccgaggaacugaaggcucugaucgggagcggagagggcguugagcgcuucgaaauguuuccuaaguccaccugggccggcguggauacgaauagcggggucagcuccgcuuguccccucggaaacggcccuagcuucuauagaaaucugcuuuggauuaucaaacugaagucuuccgaguaccccgugauccgggggaccuuuaacaauacaggagacaaaagcguucucuauuucuggggcgugcaccauccuccggucaccacagaacagaacgaucuguacgggucuggaaaucgcuaugugagaaugggcaccgaguccaugaacuuugcccggaaccccgaaauugcgcuucgcccugccgugaauggccagagagggcggaucgacuacuucuggagcauucugaagcccggagagacgcucaacgucgagucuaauggcaaccugaucgcuccuugguacgccuaucgcuuuguuaauaaagauuccaagggggcuauuuucagaagcucccugcccaucgaaaacugcgacgccacaugucagaccgcggagggagugauccggacaaauaagaccuuucaaaacgugucuccgcucuggauuggcgaaugcccuaaauacgucaagagcaaaucccugcgccuugccaccgggcugagaaaugugccccagaucgagacacggggacucuucggcgcuauugccggcuuuaucgaagggggauggacgggcaugguugaugggugguauggauaccaccaugagaacagccagggcucuggguaugcugccgacagagaguccacccagaaggccauugauggcaucacaaauaaagugaacagcaucauugacaagaugaauacccaauucgaagcugucgaccacgaguucucuaaccuggaacgccggaucgauaaucuuaacaaaagaauggaggacggauuucuggauguguggacauacaacgcggaacuccugguucugcucgagaaugagcgcacccuggaccuucacgaugccaacgugaagaaucugcaugaaaaggucaaaagccagcuccgggacaacgcuaaugaucugggcaacggguguuucgaguuuuggcacaagugcgacaaugaauguauggaguccgugaaaaacggaacguauaauuacccuaaguaccagaaagagucuagacuuaaccgccagaagauugaaagcgucaagcuggagaauuucgauguguaucaaauccucgccauuuacuccacaguuucuucuucccuggugcuggucggccucaucauggccauggggcuguggaugugcagcaacggaucuaugcagugccggauuuguaucuga

SEQ ID NO: 203197 - RNA, 1701 nt, Artificial Sequence
  derived and/or modified CDS sequence (opt5) from hemagglutinin__InfluenzaA__AHJ58037
augaucgccuucauuaucauuaccauccuggugacaacgggcgagagcgacaagauuugcaucggguaccacgcuaacaauuccaccacaaaggucgauaccauccucgaaaagaacguuacagugacccauucuguggagcugcuugaaaaucagaaagaggaaagauuuuguaagauuagcaacaaagcgccccuggaccucaaggagugcacacuggagggauggauccuuggcaauccucaaugugaucugcuccugggggaccaguccuggucuuauauugucgaacggccgaacgcccgcaauggaaucugcuaccccggcacccugaacgagguggaagaacucaaggcucugauugggagcggagagagaguugaacgguucgagauguuuccuaaauccacgugggccggcguggauaccaauucuggcgucacacgcagcugucccuucggguccggaagcucuuuuuauagaaaccuucuguggaucauuaagcacaccacauccagcuacccugugaucaaaggcaccuuccggaauacgggggacaagucuguucucuauuuuuggggagugcaucaccccaucgauacaaccgaacagaacguccuguacggcuccgggaaucgcuaugugagaaugggaacagagagcaugaacuucgcccggucuccugaaauugcugcccgcccgguggucaauggccagagaggccggaucgacuacuuuugguccauucuuaaacccggggagacccugaacaucgagagcaacggaaaucucauugcuccuugguacgccuaucgcuucguuaacaaggauuccaagggcgcgaucuuuagaucuaaucugcccaucgaaaacugcgacgccaccugucaaacaauugagggggugauccggacgaauaaaaccuuccagaacgugagcccucuguggauuggagaaugccccaaguacgucaaauccgagagccuccgccuggcuacaggccuuagaaaugugccgcagaucgaaacccgggggcuguuuggagccauugcuggcuucaucgagggcggguggacaggaaugaucgauggcugguauggguaccaucacgagaacucucagggauccggcuaugccgcggacagagaaagcacccaacgcgccauugaugggaucacgacaaagguuaauucuauuaucgacaaaaugaacacccaguucgaggcugugggccacgaauuuagcaaucucgagcggagaauugacaaccugaauaagcgcauggaagauggauuccuugacgucuggaccuacaacgccgagcugcucgugcugcuggagaaugaacggacacucgaucugcaugacgcuaacguuaaaaaccuucacgagagagugaagucccagcugcgcgauaaugccaacgaccucggcaauggguguuuugaguucuggcauaagugcgauaacgaguguauggagucugucaaaaauggaaccuaugacuacccuaaguaccaggccgaaagccggcugaacaaacaaagaaucgaguccgugaaacuugaaaauuuugaugucuaucagauucuggcuaucuacagcacagugucuuccagccucguucuggugggccugaucauggcgauugggcucuggaugugcucuaacggauccaugcagugccgcaucuguauuuga

SEQ ID NO: 203198 - RNA, 1701 nt, Artificial Sequence
  derived and/or modified CDS sequence (opt5) from hemagglutinin__InfluenzaA__AHJ58049
augaucgccuucauugugaucgcuauucuggccgcgaccggcaagagcgacaaaaucugcauuggguaccacgcuaacaauuccacaacgaaggucgauaccauccucgagaaaaacguuacagugacccauucuguggaacugcuugagaaucagaaggaagagagauuuuguaaaaucagcaacaaggcuccccuggaccuccgggauugcacacuggaaggauggauucuuggcaauccucgcugugggauccugcucgccgaccaauccuggucuuauauugucgagagaccgaacgcccggaauggaaucugcuaccccggcauucugaacgaggccgaggaacugaaggcucucaucgggagcggagaacgcguggagagauucgagauguuuccuaaauccaccugggccggcguugauacagacucuggcgugagcuccgcguguccccuggggaauggaccuagcuucuaucggaaccuucuguggauuaucaagcucaaaucuuccgaauaccccgucauccgcggcaccuuuaauaacacgggggauaagagcauucuguauuucuggggagugcaccauccuccgguuaccacagagcaggaagcccuuuacggcucugggaauagauaugugcggaugggaaccgaguccaugaacuuugcucgcacacccgaaaucgccgcuagaccugccgucaauggccagcggggccgcauugacuacuucuggagcauccugaaacccggggagacccucaacguggagucuaacggaaaucugauugcgccuugguacgccuauagauuugugaacaaggauuccaagggcgcuaucuuccggagcaaucugcccaucgaaaacugcgacgccacgugucagacaaccgagggggucauucgcacaaauaaaaccuuucaaaacguuuccccgcucuggaucggagaaugcccuaaguacgugaaaucuaagagccugagacuugcuaccggccugcggaaugugccccagauugagacaagaggacucuucggggccaucgccggcuuuauugaaggcggguggacgggaaugaucgauggcugguauggguaccaccaugagaacucccagggaagcggcuaugcugcggaccgcgagucuacccagaaagccaucgaugggauuacaaauaaggucaacuccaucauugacaaaaugaauacccaauucgaagcugugggccacgaguucagcaaccuggaacggagaaucgacaaucuuaacaagcgcauggaggauggauuucuggacguuuggacauacaaugccgaacuccuggugcugcucgagaacgagcggacccuggaucuucacgacgccaacgucaagaaucugcaugaaaaagugagaucucagcuccgcgauaacgcuaaugaccugggcaacggguguuucgaguuuuggcacaagugcgauaaugaauguauggagagcguuaaaaacggaacguaugacuacccuaaguaccaggccgagucccggcuuaauagacagaaaauugaaucugugaagcuggagaacuucgaugucuaucaaauccucgcgauuuacagcacaguguccagcucucugguccuggugggccucaucauggcuauggggcuguggaugugcuccaauggaagcaugcagugccgcaucuguauuuga

SEQ ID NO: 203199 - RNA, 1701 nt, Artificial Sequence
  derived and/or modified CDS sequence (opt5) from hemagglutinin__InfluenzaA__AHJ58061
augaucgccuucauugugaucgcuacccuggucgccacaggcaagagcgacaaaauuugcaucggguaccacgcgaacaauuccacgaccaagguugauacaauucucgagaaaaacgugaccgugacacauucugucgaacugcuugagaaucagaaggaagagagauuuuguaaaaucagcaacaaggcuccccuggaccuccgggauugcacccuggaaggauggauccuuggcaauccucgcugugggauucugcucgccgaccaauccuggucuuauaucguggagagaccgaacgcccggaauggaauuugcuaccccggcacacugaacgaggcugaggaacugaaggcccucaucgggagcggagaacgcguugagagauucgagauguuuccuaaauccaccuggacgggcguggauaccgaaucuggcgucagcuccgcuuguccccuggggaauggaccuagcuucuaucggaaccuucuguggauuaucaagcucaaaucuuccgaguaccccgugauucgcggcacauuuaauaacaccggggacaagagcauccuguauuucuggggaguucaccauccuccggugacaaccgaacagaaugcccuuuacggcucuggggauagauauguccggaugggaacggaguccaugaacuuugcgcgcagccccgaaaucgccgcuagaccugccgugaauggccagcggggccgcauugacuacuucuggucuauccugaaacccggggagacacucaacguggaguccaacggaaaucugauugcuccuugguacgccuauagauuugucaacaaggauagcaagggcgcgaucuuccgguccaaucugcccauugaaaacugcgacgccaccugucagacaaccgaggggguuauccgcaccaauaaaacauuucaaaacgugucuccgcucuggaucggagaaugcccuaaguacgugaaaagcaagucccugagacuugcuacgggccugcggaaugucccccagauugagaccagaggacucuucggggccaucgcuggcuuuauugaaggcggguggacaggaaugaucgauggcugguauggguaccaccaugagaacagccagggaucuggcuaugccgccgacaaagaguccacccagaaggcuauugaugggaucacaaauaaagugaacagcaucauugacaagaugaauacccaauucgaagcgguuggccacgaguucucuaaccuggaacgccggaucgacaaucuuaacaagagaauggaggauggauuucuggacguguggacguacaaugccgaacuccugguccugcucgagaacgagcgcacacuggaucuucacgacgcuaacgugaaaaaucugcaugaaaagguucggagccagcucagagauaacgccaaugaccugggcaacggguguuucgaguuuuggcacaaaugcaauaacgaauguauggaguccgugaagaauggaaccuaugauuacccuaaauaccagaaggagucucgccuuaaccggcagaagauugaaagcgucaaacuggagaauuucgacguguaucaaauccucgccauuuacuccaccgucucuagcucccuggugcugguuggccucauccuggcuauggggcuuuggaugugcagcaacggaucuaugcagugcagaauuuguaucuga

SEQ ID NO: 203200 - RNA, 1701 nt, Artificial Sequence
  derived and/or modified CDS sequence (opt5) from hemagglutinin__InfluenzaA__AHJ58084
augaucgccuucauugugaucgcuacccuggucgccacaggcaagagcgacaaaauuugcaucggguaccacgcgaacaauuccacgaccaagguugauacaauucucgagaaaaacgugaccgugacacauucugucgaacugcuugagaaucagaaggaagagagauuuuguaaaaucagcaacaaggcuccccuggaccuccgggauugcacccuggaaggauggauccuuggcaauccucgcugugggauucugcucgccgaccaauccuggucuuauaucguggagagaccgaacgcccggaauggaauuugcuaccccggcacacugaacgaggcugaggaacugaaggcccucaucgggagcggagaacgcguugagagauucgagauguuuccuaaauccaccuggacgggcgugaauaccgaaucuggcgucagcuccgcuuguccccuggggaacggaccuagcuucuaucggaaucuucuguggauuaucaagcucaaaucuuccgaguaccccgugauucgcggcacauuuaacaauaccggggauaagagcauccuguauuucuggggaguucaccauccuccggugacaaccgaacagaacgcccuuuacggcucuggggacagauauguccggaugggaacggaguccaugaauuuugcgcgcagccccgaaaucgccgcuagaccugccgugaacggccagcggggccgcauugauuacuucuggucuauccugaaacccggggagacacucaacguggaguccaauggaaaccugauugcuccuugguacgccuauagauuugucaauaaggacagcaagggcgcgaucuuccgguccaaccugcccauugaaaauugcgaugccaccugucagacaaccgaggggguuauccgcaccaacaaaacauuucaaaaugugucuccgcucuggaucggagaaugcccuaaguacgugaaaagcaagucccugagacuugcuacgggccugcggaacgucccccagauugagaccagaggacucuucggggccaucgcuggcuuuauugaaggcggguggacaggaaugaucgacggcugguauggguaccaccaugagaauagccagggaucuggcuaugccgccgauaaagaguccacccagaaggcuauugacgggaucacaaacaaagugaauagcaucauugauaagaugaacacccaauucgaagcgguuggccacgaguucucuaaucuggaacgccggaucgacaaccuuaauaagagaauggaggacggauuucuggauguguggacguacaacgccgaacuccugguccugcucgagaacgagcgcacacuggaccuucacgaugcuaaugugaaaaaccugcaugaaaagguucggagccagcucagagacaaugccaacgaucugggcaauggguguuucgaguuuuggcacaaaugcaacaaugaauguauggaguccgugaagaacggaaccuaugacuacccuaaauaccagaaggagucucgccuuaaucggcagaagauugaaagcgucaaacuggagaacuucgauguguaucaaauccucgccauuuacuccaccgucucuagcucccuggugcugguuggccucauccuggcuauggggcuuuggaugugcagcaauggaucuaugcagugcagaauuuguaucuga

SEQ ID NO: 203201 - RNA, 1701 nt, Artificial Sequence; identical to SEQ ID NO: 198927
  derived and/or modified CDS sequence (opt5) from hemagglutinin__InfluenzaA__AHL80708

SEQ ID NO: 203202 - RNA, 1701 nt, Artificial Sequence
  derived and/or modified CDS sequence (opt5) from hemagglutinin__InfluenzaA__AHL80718
augaaggccauccuggugguccuccuguacaccuucgcuacagccaacgcggacacgcuuugcauuggcuaucacgcuaauaacagcaccgauacaguugacaccgugcuggagaaaaaugugacagucacccauuccgugaaccuccuggaagauaagcacaaugggaaacuuuguaagcugagaggaguugcuccccuccaucugggcaaaugcaacaucgccggguggauucugggaaauccugagugugaaucucucagcacagccuccucuuggagcuacaucguggagaccuccucuagcgacaacggcacgugcuauccgggggauuuuauuaauuacgaagaacugcgggagcagcuuuccagcgucucuuccuucgaacgcuuugagaucuuccccaagaucagcucuuggccuaaccacgacuccaauaagggagugaccgccgcuuguccccaugccggcgcgaaaucuuuuuauaagaaccugauuuggcucguuaaaaagggcaauagcuacccuaaacuguccaagagcuauaucaacgauaaggggaaagaagugcuuguccuguggggcauucaccaccccuccacaaccgccgaccaacagucucucuaccagaaugcugaugccuacguguucgugggaacaagcagauauuccaagaaauuuaagccugagaucgcuauucggccgaaaguccgcgaccaggaggggagaaugaacuacuauuggacccugguugaacccggagauaagaucacguucgaggccacaggcaaccugguggugccucgguacgcguuugccauggaacgcaaugcugggagcggaauuaucaucucugacaccuccguccaugauugcaacacaaccugucaaacccccaaaggcgccauuaauacaagccucccuuuccagaacauccaccccauuacgaucggcaagugcccgaaguaugugaaaucuaccaagcugagacuugcuacagggcugcggaauguuccuagcauucagucccgcggacucuuuggcgccaucgccggguucaucgagggaggcuggaccgggaugguggacggaugguacggcuaucaucaccagaacgaacaaggcucuggguacgcugcggaccugaaaagcacacagaaugccauugauaagaucaccaacaaagucaauuccgugauugagaagaugaacacgcaguuuacagcuguuggaaaggaguucaaucaccuugagaaaagaaucgagaaccugaauaagaaaguggacgauggcuuccucgacauuuggaccuacaacgccgaacugcugguccuccuggagaaugaacggacccuugauuaucaugacagcaacgugaagaaccuguacgagaaaguccgcucucagcucaagaauaacgccaaggagaucgggaauggauguuuugaguucuaucacaaaugcgauaacacauguauggaauccgugaagaauggcaccuacgacuaucccaaauacagcgaagaggcuaagcugaacagagaagagaucgaugggguuaaacuugagucuacacggauuuaucaaauccuggccauuuacuccacgguggcgagcucccucguccuggugguuucucugggcgcuaucagcuuuuggaugugcuccaauggaucucuccagugccgcauuuguaucuga

SEQ ID NO: 203203 - RNA, 1710 nt, Artificial Sequence
  derived and/or modified CDS sequence (opt5) from hemagglutinin__InfluenzaA__AHL80729
augaaggccauccuggugguccuccuguacaccuucgcuacagccaacgcggacacgcuuugcauuggcuaucacgcuaauaacagcaccgauacaguugacaccgugcuggagaaaaaugugacagucacccauuccgugaaccuccuggaagauaagcacaaugggaaacuuuguaagcugagaggaguugcgccccuccaucugggcgagugcaacaucgccggguggauucugggaaauccugaaugugagucucucagcacagcuuccucuuggagcuacaucguggaaaccuccucuagcgacaacggcacgugcuauccgggggauuuuauugacuacgaggagcugcgggaacagcuuuccagcgucucuuccuucgagcgcuuugaaaucuuccccaaaaccagcucuuggccuaaucacgauuccaacaagggagugacagccgcuuguccccaugccggcgccaagagcuuuuauaaaaaucugaucuggcucguuaagaaaggcaacucuuacccuaagcuguccaaaagcuauauuaaugacaaggggaaggaggugcuuguccuguggggaauccaccaccccuccaccucugccgaucaacagagccucuaccagaacgcugacgccuacguguucgugggcacauccagauauagcaaaaaguuuaaaccugagauugcuauccggccgaagguccgcgaucaggaagggagaaugaauuacuauuggacccugguugagcccggagacaaaauuacguucgaagccacaggcaaccugguggugccucgguacgcguuugccauggagcgcaacgcugggucuggaaucauuaucuccgauacccccguccaugacugcaauacaaccugucaaaccccuaagggcgccaucaacacaagccucacgucucugcccuuccagaaugugcacccgauuaccaucggcaaaugcccuaaguauguuaagagcacaaaacuuagacuggcuaccgggcuccggaacgugcccuccauucagucucgcggacuguuuggcgccaucgccggguucauugaaggaggcuggacagggauggucgacggaugguacggcuaucaucaccagaaugagcaaggcagcggguacgcugcggaucuuaaguccacccagaacgccaucgacgagaucacgaauaaagugaacagcguuauugaaaagaugaauacacaguuuaccgcugugggaaaagaguucaaccaccuggaaaagagaaucgagaaucucaacaagaaagucgaugacggcuuccuggauauuuggaccuacaaugccgaacugcucgugcugcuugagaacgagcggacacuggacuaucaugauucuaaugucaagaaccucuacgaaaaagugcgcucccagcugaagaacaaugccaaagagaucgggaacggauguuuugaguucuaucacaagugcgacaauaccuguauggaaagcguuaagaacggcacauacgauuauccuaaauacucugaagaggcuaaacuuaauagagaggaaauugacggggugaagcuggaguccacgcggaucuaucaaauccucgccauuuacagcaccgucgcguccucucuggugcugguugugagccucggcgcuaucuccuuuuggaugugcucuaacggaagccugcagugccgcauuuguaucuga

SEQ ID NO: 203204 - RNA, 1701 nt, Artificial Sequence
  derived and/or modified CDS sequence (opt5) from hemagglutinin__InfluenzaA__AHL80740
augaaggccauccuggugguccuccuguacaccuucgcuacagccaacgcggacacgcuuugcauuggcuaucacgcuaauaacagcaccgauacaguugacaccgugcuggagaaaaaugugacagucacccauuccgugaaccuccuggaagauaagcacaaugggaaacuuuguaagcugagaggaguugcuccccuccaucugggcaaaugcaacaucgccggguggauucugggaaauccugagugugaacuccugucuacagccagcuccuggucuuacaucguggagaccagcuccucugacaacggcacgugcuauccgggggauuuuauuaauuacgaagaacuucgggagcagcugagcuccgucagcucuuucgaacgcuuugagaucuuccccaagaccuccagcuggccuaaccacgacucuaauaagggagugacagccgcuuguccccaugccggcgcgaaauccuuuuauaagaaccucaucuggcugguuaaaaagggcaauagcuacccuaaacuuucuaaguccuauauuaacgauaaggggaaagaagugcugguccucuggggagugcaccaccccagcaccuccgccgaccaacagucucuguaccagaaugcugaugccuacguguucgucggcacaagcagauauuccaagaaauuuaagccugagaucgcuauucggccgaaaguucgcgaccaggaggggagaaugaacuacuauuggacccugguggaacccggagauaagaucacguucgaggccacaggcaaccucguggucccucgguacgcguuugccauggaacgcaaugcugggagcggaauuaucauuucugacacccccgugcaugauugcaacacaaccugucaaaccccuaaaggcgccaucaauacaucccugcccuuccagaacauccacccgauuacgaucggcaagugcccuaaguauguuaaaagcaccaaacuuagacuggcuacagggcuccggaaugugcccucuauucagagccgcggacuguuuggcgccaucgccggguucauugagggaggcuggaccgggauggucgacggaugguacggcuaucaucaccagaacgaacaaggcuccggguacgcugcggaccuuaaaucuacacagaaugccaucgauaagaucaccaacaaagugaauagcguuauugagaagaugaacacgcaguuuacagcugugggaaaggaguucaaucaccuggaaaagagaaucgagaaccucaauaagaaagucgacgauggcuuccuggacauuuggaccuacaacgccgaacugcucgugcugcuugagaaugaacggacccuggauuaucaugacuccaacgucaagaaccucuacgagaaagugcgcagccagcugaagaauaacgccaaggagaucgggaauggauguuuugaguucuaucacaaaugcgauaacacauguauggagucuguuaagaauggcaccuacgacuauccuaaauacuccgaagaggcuaaacuuaacagagaaaagauugauggggugaagcuggagagcacacggaucuaucaaauccucgccauuuacucuacggucgcguccagccuggugcugguugugucccucggcgcuaucucuuuuuggaugugcagcaauggaucccugcagugccgcauuuguaucuga

SEQ ID NO: 203205 - RNA, 1701 nt, Artificial Sequence
  derived and/or modified CDS sequence (opt5) from hemagglutinin__InfluenzaA__AHL80751
augaaggccauccuggugguccuccuguacaccuucgcuacagccaacgcggacacgcuuugcauuggcuaucacgcuaauaacagcaccgauacaguugacaccauccuggagaaaaaugugacagugacccauuccgucaaccuccuggaagauaagcacaaugggaaacuuuguaagcugagaggaguggcuccccuccaucugggcaaaugcaacauugccggguggauccugggaaauccugagugugaaucucucagcacagccuccucuuggagcuacauuguugagaccuccucuagcgacaacggcacgugcuauccgggggauuuuaucgacuacgaagaacugcgggagcagcuuuccagcgugucuuccuucgaacgcuuugagaucuuccccaagaccagcucuuggccuaaucacgauuccaacaagggagucacagccgcuuguccccaugccggcgcgaaaucuuuuuauaagaaucugauuuggcucgugaaaaagggcaacagcuacccuaaacuguccaagagcuauaucaaugacaaggggaaagaaauucuuguucuguggggaauccaccaccccuccaccucugccgaucaacagagccucuaccagaacgcugacgccuacguguucgucggcacauccagauauagcaagaaauuuaagccugagauugcuauccggccgaaagugcgcgaucaggaggggagaaugaauuacuauuggacccugguggaacccggagacaagauuacguucgaggccacaggcaaccuggucguuccucgguacgcguuugccauggaaaagaacgcugggucuggaaucaucauuuccgauacccccgugcaugacugcaauacaaccugucaaaccccuaagggcgccaucaacacaagccuccccuuccagaauauucacccgaucacgauuggcaagugcccuaaauaugugaagucuaccaaacugcgccuugcuacagggcugagaaacguccccagcauccagucccggggacucuuuggcgccaucgccggguucauugagggaggcuggaccgggaugguggacggaugguacggcuaucaucaccagaaugaacaaggcucuggguacgcugcggaucugaaaagcacacagaacgccaucgacgagauuaccaauaaaguuaacuccgugaucgagaagaugaauacgcaguuuacagcugucggaaaggaguucaaccaccuugagaaacgcauugaaaaucugaacaagaaaguggaugacggcuuccucgauaucuggaccuacaaugccgagcugcugguucuccuggaaaacgagagaacccuugacuaucaugauagcaaugugaagaaccuguacgagaaaguccggucucagcucaagaacaaugccaaggaaguggggaacggauguuuugaguucuaucacaaaugcgacaauacauguauggaauccgucaagaacggcaccuacgauuauccuaaauacagcgaggaagcuaagcugaaucgcgaggagaucgacggggugaaacuugaaucuacaagaauuuaucaaauccuggccauuuacuccacgguugcgagcucccucgugcuggucgugucucugggcgcuaucagcuuuuggaugugcuccaacggaucucuccagugccggauuuguaucuga

SEQ ID NO: 203206 - RNA, 1701 nt, Artificial Sequence
  derived and/or modified CDS sequence (opt5) from hemagglutinin__InfluenzaA__AHL80762
augaaggccauccuggugguccuccuguacaccuucgcuacagccaacgcggacacgcuuugcauuggcuaucacgcuaauaacagcaccgauacaguugacaccgugcuggagaaaaaugugacagucacccauuccgugaaccuccuggaagauaagcacaaugggaaacuuuguaagcugagaggaguugcuccccuccaucugggcaaaugcaacaucgccggguggauucugggaaauccugagugugaaucucucagcacagccuccucuuggagcuacaucguggagaccuccucuagcgacaacggcacgugcuauccgggggauuuuauuaauuacgaagaacugcgggagcagcuuuccagcgucucuuccuucgaacgcuuugagaucuuccccaagaccagcucuuggccuaaccacgacuccaauaagggagugacagccgcuuguccccaugccggcgcgaaaucuuuuuauaagaaccugaucuggcucguuaaaaagggcaauagcuacccuaaacuguccaagagcuauauuaacgauaaggggaaagaagugcuuguccuguggggaauccaccaccccuccaccucugccgaccaacagagccucuaccagaaugcugaugccuacguguucgugggcacauccagauauagcaagaaauuuaagccugagauugcuauccggccgaaaguccgcgaccaggaggggagaaugaacuacuauuggauucugguugaacccggagauaagaucaccuucgaggccacgggcaaccugguggugccucgguacgcguuugccauggaacgcaaugcugggucuggaauuaucaucuccgacacacccguccaugauugcaacaccacaugucaaaccccuaaaggcgccauuaauaccagccuccccuuccagaacauccacccgauuacaaucggcaagugcccuaaguaugugaaaucuacgaagcugagacuugcuaccgggcugcggaauguucccagcauucagucccgcggacucuuuggcgccaucgccggguucaucgagggaggcuggacagggaugguggacggaugguacggcuaucaucaccagaacgaacaaggcucuggguacgcugcggaccugaaaagcacccagaaugccauugauaagaucacaaacaaagucaauuccgugauugagaagaugaacacccaguuuacggcuguuggaaaggaguucaaucaccuugagaaaagaaucgagaaccugaauaagaaaguggacgauggcuuccucgacauuuggacauacaacgccgaacugcugguccuccuggagaaugaacggacccuugauuaucaugacagcaacgugaagaaccuguacgagaaaguccgcucucagcucaaggauaaugccaaggagaucgggaacggauguuuugaguucuaucacaaaugcgacaauaccuguauggaauccgugaagaacggcacauacgauuauccuaaauacagcgaagaggcuaagcugaauagagaagagaucgacgggguuaaacuugagucuacccggauuuaucaaauccuggccauuuacuccacaguggcgagcucccucguccuggugguuucucugggcgcuaucagcuuuuggaugugcuccaacggaucucuccagugccgcauuuguaucuga

SEQ ID NO: 203207 - RNA, 1701 nt, Artificial Sequence
  derived and/or modified CDS sequence (opt5) from hemagglutinin__InfluenzaA__AHL80784
augaaggccauccuggugguccuccuguacaccuucgcuacagccaacgcggacacgcuuugcauuggcuaucacgcuaauaacagcaccgauacaguugacaccgugcuggagaaaaaugugacagucacccauuccgugaaccuccuggaagauaagcacaaugggaaacuuuguaagcugagaggaguugcuccccuccaucugggcaaaugcaacaucgccggguggauucugggaaauccugagugugaaucucucagcacagccuccucuuggagcuacaucguggagaccuccucuagcgacaacggcacgugcuauccgggggauuuuauugacuacgaagaacugcgggagcagcuuuccagcgucucuuccuucgaacgcuuugagaucuuccccaagaccagcucuuggccuaaucacgauuccaacaagggaaucacagccgcuuguccccaugccggcgcgaaaucuuuuuauaagaaucugauuuggcucgugaaaaagggcaacagcuacccuaaacuguccaagagcuauaucaaugacaaggggaaagaaguucuugugcuguggggcauucaccaccccuccaccucugccgaucaacagagccucuaccagaacgcugacgccuacgucuucgugggaacauccagauauagcaagaaauuuaagccugagaucgcuauucggccgaaagugcgcgaucaggaggggagaaugaauuacuauuggacccuggucgaacccggagacaagaucacguucgaggccacaggcaaccugguugugccucgguacgcguuugccauggaacgcaacgcugggucuggaauuaucaucuccgauacccccgugcaugacugcaauacaaccugucaaaccccuaaaggcgccauuaacacaagccuccccuuccagaauauccacccgauuacgaucggcaagugcccuaaguaugucaaaucuaccaagcugagacuugcuacagggcugcggaacgugcccagcauucagucccgcggacucuuuggcgccaucgccggguucaucgagggaggcuggaccgggaugguugacggaugguacggcuaucaucaccagaaugaacaaggcucuggguacgcugcggaucugaaaagcacacagaacgccauugacaagaucaccaauaaagugaacuccgucauugagaagaugaauacgcaguuuacagcugugggaaaggaguucaaccaccuugagaaaagaaucgagaaucugaacaagaaaguugaugacggcuuccucgauauuuggaccuacaaugccgaacugcuggugcuccuggagaacgaacggacccuugacuaucaugauagcaaugucaagaaccuguacgagaaagugcgcucucagcucaagaacaaugccaaggagaucgggaacggauguuuugaguucuaucacaaaugcgacaauacauguauggaauccgucaagaacggcaccuacgauuauccuaaauacagcgaagaggcuaagcugaauagagaagagaucgacggggugaaacuugagucuacacggauuuaucaaauccuggccauuuacuccacgguugcgagcucccucgugcuggucgugucucugggcgcuaucagcuuuuggaugugcuccaacggaucucuccagugccgcauuuguaucuga

SEQ ID NO: 203208 - RNA, 1701 nt, Artificial Sequence; identical to SEQ ID NO: 195905
  derived and/or modified CDS sequence (opt5) from hemagglutinin__InfluenzaA__AHL80795

SEQ ID NO: 203209 - RNA, 1701 nt, Artificial Sequence
  derived and/or modified CDS sequence (opt5) from hemagglutinin__InfluenzaA__AHL80817
augaaggccauccuggugguccuccuguacaccuucgcuacagccaacgcggacacgcuuugcauuggcuaucacgcuaauaacagcaccgauacaguugacaccgugcuggagaaaaaugugacagucacccauuccgugaaccuccuggaagauaagcacaaugggaaacuuuguaagcugagaggaguugcuccccuccaucugggcaacugcaauaucgccggguggauucugggaaacccugagugugaaucucucagcacagccuccucuuggagcuacaucguggaggccuccucuagcgacaaugggaccugcuauccgggcgauuuuauugacuacgaagaacugcgggagcagcuuuccagcgucucuuccuucgaacgcuuugagaucuuccccaaaacgagcucuuggccuaaccacgauuccaauaagggagugaccgcugccuguccccaugcgggcgccaagagcuuuuauaaaaaccugaucuggcucguuaagaaaggcaauucuuacccuaagcuguccaaaagcuauauuaacgacaaggggaaggaagugcuuguccuguggggaauccaccaccccuccacaucugcugaucaacagagccucuaccagaaugccgacgcuuacguguucgugggcaccuccagauauagcaaaaaguuuaaaccugagauugccauccggccgaagguccgcgaucaggaggggagaaugaacuacuauuggacacugguugaacccggagacaaaauuaccuucgaggcgacgggcaaccugguggugccucgguacgccuuugcuauggaacgcaaugccgggucuggaaucauuaucuccgauacacccguccaugacugcaacaccacaugucaaaccccuaagggcgcuaucaauaccagccuccccuuccagaacauucacccgaucacaauuggcaaaugcccuaaguaugugaagucuacgaaacugagacuugccaccgggcugcggaauguucccagcauccagucccgcggacucuuuggcgccauugcuggguucaucgagggaggcuggacagggaugguggacggaugguacggcuaucaucaccagaacgaacaaggcucuggguacgcggccgaucuuaagagcacccagaaugcuaucgacaaaauuacaaacaaggucaauuccgugaucgagaaaaugaacacccaguuuacggccguuggaaaggaguucaaucaccuugaaaagagaauugagaaccugaauaaaaagguggaugacggcuuccucgauaucuggacauacaacgccgaacugcugguccuccuggagaaugaacggacccuugacuaucaugauagcaacgugaaaaaccuguacgagaagguccgcucucagcucaaaaauaacgcuaaggagauugggaauggauguuuugaguucuaucacaagugcgacaacaccuguauggaguccgugaaaaauggcacauacgauuauccuaaguacagcgaagaggccaaacugaacagagaagagaucgacgggguuaagcuggagucuacccggaucuaucaaauucuggcgaucuacuccacaguggcuagcucccucguccuggugguuucucugggcgccauuagcuuuuggaugugcuccaauggaucucuccagugccgcaucuguauuuga

SEQ ID NO: 203210 - RNA, 1701 nt, Artificial Sequence; identical to SEQ ID NO: 203209
  derived and/or modified CDS sequence (opt5) from hemagglutinin__InfluenzaA__AHL80828

SEQ ID NO: 203211 - RNA, 1701 nt, Artificial Sequence
  derived and/or modified CDS sequence (opt5) from hemagglutinin__InfluenzaA__AHL80839
augaaggccauccuggugguccuccuguacaccuucgcuacagccaacgcggacacgcuuugcauuggcuaucacgcuaauaacagcaccgauacaguugacaccgugcuggagaaaaaugugacagucacccauuccgugaaccuccuggaagauaagcacaaugggaaacuuuguaagcugagaggaguugcuccccuccaucugggcaaaugcaacaucgccggguggauucugggaaauccugagugugaaucucucagcacagccuccucuuggagcuacaucguggagaccuccucuagcgacaacggcacgugcuauccgggggauuuuauugacuacgaagaacugcgggagcagcuuuccagcgucucuuccuucgaacgcuuugagaucuuccccaagaccagcucuuggccuaaucacgauuccaacaagggaaucacagccgcuuguccccaugccggcgcgaaaucuuuuuauaagaaucugauuuggcucgugaaaaagggcaacagcuacccuaaacuguccagaagcuauaucaaugacaaggggaaggaaguucuugugcuguggggcauucaccaccccuccaccucugccgaucaacagagccucuaccagaacgcugacgccuacgucuucgugggaacaucccgguauagcaaaaaguuuaaaccugagaucgcuauucgcccgaaggugagagaucaggaggggcggaugaauuacuauuggacccuggucgaacccggagacaaaaucacguucgaggccacaggcaaccugguugugccucgcuacgcguuugccauggaaagaaacgcugggucuggaauuaucaucuccgauacccccgugcaugacugcaauacaaccugucaaaccccuaagggcgccauuaacacaagccuccccuuccagaauauccacccgauuacgaucggcaaaugcccuaaguaugucaagucuaccaaacugcggcuugcuacagggcugcgcaacgugcccagcauucaguccagaggacucuuuggcgccaucgccggguucaucgagggaggcuggaccgggaugguugacggaugguacggcuaucaucaccagaaugaacaaggcucuggguacgcugcggaucuuaagagcacacagaacgccauugacaaaaucaccaauaaggugaacuccgucauugagaaaaugaauacgcaguuuacagcugugggaaaggaguucaaccaccuugaaaagcggaucgagaaucugaacaaaaagguugaugacggcuuccucgauauuuggaccuacaaugccgaacugcuggugcuccuggagaacgaacgcacccuugacuaucaugauagcaaugucaaaaaccuguacgagaaggugagaucucagcucaaaaacaaugccaaggagaucgggaacggauguuuugaguucuaucacaagugcgacaauacauguauggaguccgucaaaaacggcaccuacgauuauccuaaguacagcgaagaggcuaaacugaaucgggaagagaucgacggggugaagcuggagucuacacgcauuuaucaaauccuggccauuuacuccacgguugcgagcucccucgugcuggucgugucucugggcgcuaucagcuuuuggaugugcuccaacggaucucuccagugcagaauuuguaucuga

SEQ ID NO: 203212 - RNA, 1701 nt, Artificial Sequence
  derived and/or modified CDS sequence (opt5) from hemagglutinin__InfluenzaA__AHL80861
augaaggccauccuggugguccuccuguacaccuucgcuacagccaacgcggacacgcuuugcauuggcuaucacgcuaauaacagcaccgauacaguugacaccgugcuggagaaaaaugugacagucacccauuccgugaaccuccuggaagauaagcacaaugggaaacuuuguaagcugagaggaguugcuccccuccaucugggcaaaugcaacaucgccggguggauucugggaaauccugagugugaaucucucagcacagccuccucuuggagcuacaucguggagaccuccucuagcgacaacggcacgugcuauccgggggauuuuauugacuacgaagaacugcgggagcagcuuuccagcgucucuuccuucgaacgcuuugagaucuuccccaagaccagcucuuggccuaaucacgauuccaacaagggagugacagccgcuuguccccaugccggcgcgaaaucuuuuuauaagaaucugaucuggcucguuaaaaagggcaacagcuacccuaaacuguccaagagcuauauuaaugacaaggggaaagaagugcuuguccuguggggaauccaccaccccuccaccucugccgaucaacagagccucuaccagaacgcugacgccuacguguucgugggcacauccagauauagcaagaaauuuaagccugagauugcuauccggccgaaaguccgcgaucaggaggggagaaugaauuacuauuggacccugguugaacccggagacaagauuacguucgaggccacaggcaaccugguggugccucgguacgcguuugccauggaacgcaacgcugggucuggaaucauuaucuccgauacccccguccaugacugcaauacaaccugucaaaccccuaaaggcgccaucaacacaagccuccccuuccagaauauucacccgaucacgauuggcaagugcccuaaguaugugaaaucuaccaagcugagacuugcuacagggcugcggaacguucccagcauccagucccgcggacucuuuggcgccauugccggguucaucgagggaggcuggaccgggaugguggacggaugguacggcuaucaucaccagaaugaacaaggcucuggguacgcugcggaucugaaaagcacacagaacgccaucgacaagauuaccaauaaagucaacuccgugaucgagaagaugaauacgcaguuuacagcuguuggaaaggaguucaaccaccuugagaaaagaauuggcaaucugaacaagaaaguggaugacggguuccucgauaucuggaccuacaaugccgagcugcugguccuccuggaaaacgagcggacccuugacuaucaugauagcaaugugaagaaccuguacgaaaaaguccgcucucagcucaagaacaaugccaaggagauuggaaacggcuguuuugaguucuaucacaaaugcgacaauacauguauggaauccgugaagaacgggaccuacgauuauccuaaauacagcgaggaagcuaagcugaauagagaggaaaucgacggcguuaaacuugagucuacacggaucuaucaaauucuggccaucuacuccacgguggcgagcucccucguccuggugguuucucugggagcuauuagcuuuuggaugugcuccaacggcucucuccagugccgcaucuguauuuga

SEQ ID NO: 203213 - RNA, 1701 nt, Artificial Sequence
  derived and/or modified CDS sequence (opt5) from hemagglutinin__InfluenzaA__AHL80872
augaaggccauccuggugguccuccuguacaccuucgcuacagccaacgcggacacgcuuugcauuggcuaucacgcuaauaacagcaccgauacaguugacaccgugcuggagaaaaaugugacagucacccauuccgugaaccuccuggaagauaagcacaaugggaaacuuuguaagcugagaggaguugcuccccuccaucugggcaaaugcaacaucgccggguggauucugggaaauccugagugugaaucucucagcacagccuccucuuggagcuacaucguggagaccuccucuagcgacaacggcacgugcuauccgggggauuuuauugacuacgaagaacugcgggagcagcuuuccagcgucucuuccuucgaacgcuuugagaucuuccccaagaccagcucuuggccuaaucacgauuccaacaagggagugacagccgcuuguccccaugccggcgcgaaaucuuuuuauaagaaucugaucuggcucguuaaaaagggcaacagcuacccuaaacuguccaagagcuauauuaaugacaaggggaaagaagugcuuguccuguggggaauccaccaccccuccaccaacgccgaucaacagucucucuaccagaaugcugacgccuacguguucgugggcacaagcagauauuccaagaaauuuaagccugagauugcuauccggccgaaaguccgcgaucaggaggggagaaugaacuacuauuggacccugguugaacccggagacaagauuacguucgaggccacaggcaaccugguggugccucgguacgcguuugccauggaacgcaaugcugggagcggaaucauuaucucugauacccccguccaugacugcaacacaaccugucaaaccccuaaaggcgccaucaauacaucccuccccuuccagaacauucacccgaucacgauuggcaagugcccuaaguaugugaaaagcaccaagcugagacuugcuacagggcugcggaauguucccucuauccagagccgcggacucuuuggcgccauugccggguucaucgagggaggcuggaccgggaugguggacggaugguacggcuaucaucaccagaacgaacaaggcuccggguacgcugcggaucugaaaucuacacagaaugccaucgacaagauuaccaacaaagucaauagcgugaucgagaagaugaacacgcaguuuacagcuguuggaaaggaguucaaucaccuugagaaaagaauugagaaccugaauaagaaaguggaugacggcuuccucgauaucuggaccuacaacgccgaacugcugguccuccuggagaaugaacggacccuugacuaucaugauuccaacgugaagaaccuguacgagaaaguccgcagccagcucaagaauaacgccaaggagauugggaauggauguuuugaguucuaucacaaaugcgacaacacauguauggaaucugugaagaauggcaccuacgauuauccuaaauacuccgaagaggcuaagcugaacagagaagagaucgacgggguuaaacuugagagcacacggaucuaucaaauucuggccaucuacucuacgguggcguccagccucguccuggugguuucccugggcgcuauuucuuuuuggaugugcagcaauggaucccuccagugccgcaucuguauuuga

SEQ ID NO: 203214 - RNA, 1701 nt, Artificial Sequence; identical to SEQ ID NO: 195905
  derived and/or modified CDS sequence (opt5) from hemagglutinin__InfluenzaA__AHL80883

SEQ ID NO: 203215 - RNA, 1701 nt, Artificial Sequence; identical to SEQ ID NO: 195905
  derived and/or modified CDS sequence (opt5) from hemagglutinin__InfluenzaA__AHL80894

SEQ ID NO: 203216 - RNA, 1701 nt, Artificial Sequence; identical to SEQ ID NO: 195905
  derived and/or modified CDS sequence (opt5) from hemagglutinin__InfluenzaA__AHL80905

SEQ ID NO: 203217 - RNA, 1701 nt, Artificial Sequence; identical to SEQ ID NO: 198526
  derived and/or modified CDS sequence (opt5) from hemagglutinin__InfluenzaA__AHL80916

SEQ ID NO: 203218 - RNA, 1701 nt, Artificial Sequence; identical to SEQ ID NO: 198927
  derived and/or modified CDS sequence (opt5) from hemagglutinin__InfluenzaA__AHL80927

SEQ ID NO: 203219 - RNA, 1701 nt, Artificial Sequence; identical to SEQ ID NO: 198927
  derived and/or modified CDS sequence (opt5) from hemagglutinin__InfluenzaA__AHL80946

SEQ ID NO: 203220 - RNA, 1701 nt, Artificial Sequence
  derived and/or modified CDS sequence (opt5) from hemagglutinin__InfluenzaA__AHL80958
augaaggccauccuggugguccuccuguacaccuucgcuacagccaacgcggacacgcuuugcauuggcuaucacgcuaauaacagcaccgauacaguugacaccgugcuggagaaaaaugugacagucacccauuccgugaaccuccuggaagauaagcacaaugggaaacuuuguaagcugagaggaguugcuccccuccaucugggcaaaugcaacaucgccggguggauucugggaaauccugagugugaaucucucagcacagccuccucuuggagcuacaucguggagaccuccucuagcgacaacggcacgugcuauccgggggauuuuauuaauuacgaagaacugcgggagcagcuuuccagcgucucuuccuucgaacgcuuugagaucuuccccaagaucagcucuuggccuaaccacgacuccaauaagggagugaccgccgcuuguccccaugccggcgcgaaaucuuuuuauaagaaccugauuuggcucguuaaaaagggcaauagcuacccuaaacuguccaagagcuauaucaacgauaaggggaaagaagugcuuguccuguggggcauucaccaccccuccacaaccgccgaccaacagucucucuaccagaaugcugaugccuacguguucgugggaacaagcagauauuccaagaaauuuaagccugagaucgcuauucggccgaaaguccgcgaccaggaggggagaaugaacuacuauuggacccugguugaacccggagauaagaucacguucgaggccacaggcaaccugguggugccucgguacgcguuugccauggaacgcaaugcugggagcggaauuaucaucucugacaccuccguccaugauugcaacacaaccugucaaacccccaaaggcgccauuaauacaagccucccuuuccagaacauccaccccauuacgaucggcaagugcccgaaguaugugaaaucuaccaagcugagacuugcuacagggcugcggaauguuccuagcauucagucccgcggacucuuuggcgccaucgccggguucaucgagggaggcuggaccgggaugguggacggaugguacggcuaucaucaccagaacgaacaaggcucuggguacgcugcggaccugaaaagcacacagaaugccauugauaagaucaccaacaaagucaauuccgugauugagaagaugaacacgcaguuuacagcuguuggaaaggaguucaaucaccuugagaaaagaaucgagaaccugaauaagaaaguggacgauggcuuccucgacauuuggaccuacaacgccgaacugcugguccuccuggagaaugaacggacccuugauuaucaugacagcaacgugaagaaccuguacgagaaaguccgcaaucagcucaagaacaaugccaaggagaucgggaacggauguuuugaguucuaucacaaaugcgauaauacauguauggaaucugugaagaacggcaccuacgacuaucccaaauacuccgaagaggcuaagcugaauagagaagagaucgaugggguuaaacuugagagcacacggauuuaucaaauccuggccauuuacucuacgguggcguccagccucguccuggugguuucccugggcgcuaucucuuuuuggaugugcagcaacggaucccuccagugccgcauuuguaucuga

SEQ ID NO: 203221 - RNA, 1701 nt, Artificial Sequence
  derived and/or modified CDS sequence (opt5) from hemagglutinin__InfluenzaA__AHL81001
augaagaccaucauugcccugagcuacauccucugccugauuuucgcucagaaacuucccggcaacgacaauuccacagccacgcugugucucgggcaccaugcggugccuaacggaaccaucgucaagacaauuaccaaugaucaaaucgagguuacaaacgcuaccgaacuggugcagucuagcuccacaggcgagaucugcaauucuccgcaccagauucuugacggggaaaacuguacccugaucgaugcccuccugggagacccccagugcgauggcuuucaaaauaaaaagugggaccuguucguggagagaagcaaagcccauuccaacuguuauccuuacgauguccccgacuaugcuucucuccggagccugguggccuccagcgggacgcuugaauuuaauaacgagucuuucaauuggaccggaguuacacagaacggcaccuccagcgcuugcauucgcagaucuaauaacuccuuuuucagccggcugaauuggcucacacaccugaacuuuaaguacccugcccuuaacgugaccaugcccaauaacgagcaguucgauaagcuguauaucuggggcguccaucacccugggacggacaaagaucagauuuuucucuacgcgcaagccgcuggacgcaucacagugucuaccaagagaucccagcaggccguuauuccgaauaucggcagccggccccgcgugagaaacaucccuucccgggucucuauuuauuggacaaucgugaaacccggggacauucugcugaucaauagcaccggaaaccucauugcuccucgcggcuacuucaagaucagauccgggaaaagcucuaucaugcgguccgaugcccccauuggaaaguguaauagcgcgugcaucaccccgaacggcucuauuccuaaugacaagcccuuucagaacgugaaucgcaucacauacggcgccuguccuagauaugucaaacaaaacacgcugaaacuugcuaccgggaugcggaauguucccgaaaaacagacacgcggaauuuucggcgccaucgcuggguuuaucgagaacggaugggaaggcaugguggacgggugguacggauucagacaccagaauagcgagggccggggccaagccgccgaucugaaguccacccaggcugcgauugaccagaucaacgggaaacucaacagacugauuggaaagacaaaugagaaauuccaucagaucgaaaaggaguuuucugaaguggagggccgcauucaagaucuugaaaaguaugucgaggacaccaaaaucgaucuguggagcuacaacgccgagcuccugguggcucuggaaaaucagcacacgauugaccucacagauuccgagaugaacaagcuguucgaaaagaccaagaaacagcuucgggagaaugccgaagacauggggaacggaugcuuuaagaucuaucauaagugugauaaugccugcaucggcagcauuagaaacgggaccuacgaccacgauguuuaucgcgacgaggcucugaauaaccgguuccagaucaaaggcguggagcucaagucuggauacaaagacuggauucuguggaucuccuuugccauuagcugcuuccuucugugugucgcgcuccugggcuuuaucaugugggcuugccaaaaggggaauaucagauguaacauuugcaucuga

SEQ ID NO: 203222 - RNA, 1701 nt, Artificial Sequence; identical to SEQ ID NO: 198927
  derived and/or modified CDS sequence (opt5) from hemagglutinin__InfluenzaA__AHL81013

SEQ ID NO: 203223 - RNA, 1701 nt, Artificial Sequence; identical to SEQ ID NO: 198927
  derived and/or modified CDS sequence (opt5) from hemagglutinin__InfluenzaA__AHL81025

SEQ ID NO: 203224 - RNA, 1701 nt, Artificial Sequence; identical to SEQ ID NO: 198927
  derived and/or modified CDS sequence (opt5) from hemagglutinin__InfluenzaA__AHL81037

SEQ ID NO: 203225 - RNA, 1701 nt, Artificial Sequence; identical to SEQ ID NO: 198927
  derived and/or modified CDS sequence (opt5) from hemagglutinin__InfluenzaA__AHL81049

SEQ ID NO: 203226 - RNA, 1701 nt, Artificial Sequence; identical to SEQ ID NO: 203220
  derived and/or modified CDS sequence (opt5) from hemagglutinin__InfluenzaA__AHL81061

SEQ ID NO: 203227 - RNA, 1701 nt, Artificial Sequence; identical to SEQ ID NO: 203220
  derived and/or modified CDS sequence (opt5) from hemagglutinin__InfluenzaA__AHL81072

SEQ ID NO: 203228 - RNA, 1701 nt, Artificial Sequence; identical to SEQ ID NO: 200433
  derived and/or modified CDS sequence (opt5) from hemagglutinin__InfluenzaA__AHL81083

SEQ ID NO: 203229 - RNA, 1701 nt, Artificial Sequence; identical to SEQ ID NO: 198927
  derived and/or modified CDS sequence (opt5) from hemagglutinin__InfluenzaA__AHL81095

SEQ ID NO: 203230 - RNA, 1701 nt, Artificial Sequence
  derived and/or modified CDS sequence (opt5) from hemagglutinin__InfluenzaA__AHL81118
augaaggccauccuggugguccuccuguacaccuucgcuacagccaacgcggacacgcuuugcauuggcuaucacgcuaauaacagcaccgauacaguugacaccgugcuggagaaaaaugugacagucacccauuccgugaaccuccuggaagauaagcacaaugggaaacuuuguaagcugagaggaguugcuccccuccaucugggcaaaugcaacaucgccggguggauucugggaaauccugagugugaaucucucagcacagccuccucuuggagcuacaucguggagaccuccucuagcgacaacggcacgugcuauccgggggauuuuauuaauuacgaagaacugcgggagcagcuuuccagcgucucuuccuucgaacgcuuugagaucuuccccaagaccaacagcuggccuaaucacgacucuaacaagggagugacagccgcuuguccccaugccggcgcgaaauccuuuuauaagaaucugaucuggcucguuaaaaagggcaacagcuacccuaaacugucuaaguccuauauuaaugauaaggggaaagaagugcuuguccuguggggaauccaccaccccagcaccacagccgaccaacagucccucuaccagaacgcugaugccuacguguucgugggcaccucuagauauagcaagaaauuuaagccugagauugcuauccggccgaaaguccgcgaccaggaggggagaaugaacuacuauuggacgcugguugaacccggagauaagauuacauucgaggccaccggcaaucugguggugccucgguacgcguuugccauggaacgcaacgcuggguccggaaucauuaucagcgacacacccguccaugauugcaauaccaccugucaaacaccuaaaggcgccaucaacacgucucuccccuuccagaauauucacccgaucaccauuggcaagugcccuaaguaugugaaauccacaaagcugagacuugcuaccgggcugcggaacguucccagcauccagucucgcggacucuuuggcgccauugccggguucaucgagggaggcuggacagggaugguggacggaugguacggcuaucaucaccagaaugaacaaggcagcggguacgcugcggaccugaaauccacccagaacgccaucgauaagauuacgaauaaagucaacucugugaucgagaagaugaauacacaguuuaccgcuguuggaaaggaguucaaccaccuugagaaaagaauugagaaucugaacaagaaaguggacgauggcuuccucgacaucuggaccuacaaugccgaacugcugguccuccuggagaacgaacggacacuugauuaucaugacagcaacgugaagaaucuguacgagaaaguccgcaaccagcucaagaauaacgccaaggagauugggaauggauguuuugaguucuaucacaaaugcgauaacaccuguauggaauccgugaagaauggcacauacgacuauccuaaauacagcgaagaggcuaagcugaacagagaagagaucgaugggguuaaacuugagucuacgcggaucuaucaaauucuggccaucuacuccaccguggcgagcucucucguccuggugguuucccugggcgcuauuagcuuuuggaugugcuccaauggaucucuccagugccgcaucuguauuuga

SEQ ID NO: 203231 - RNA, 1701 nt, Artificial Sequence; identical to SEQ ID NO: 198927
  derived and/or modified CDS sequence (opt5) from hemagglutinin__InfluenzaA__AHL81129

SEQ ID NO: 203232 - RNA, 1701 nt, Artificial Sequence; identical to SEQ ID NO: 198927
  derived and/or modified CDS sequence (opt5) from hemagglutinin__InfluenzaA__AHL81141

SEQ ID NO: 203233 - RNA, 1701 nt, Artificial Sequence; identical to SEQ ID NO: 198927
  derived and/or modified CDS sequence (opt5) from hemagglutinin__InfluenzaA__AHL81153

SEQ ID NO: 203234 - RNA, 1701 nt, Artificial Sequence
  derived and/or modified CDS sequence (opt5) from hemagglutinin__InfluenzaA__AHL81165
augaagaccaucauugcccugagcuacauccucugccugguguucgcucagaaacuucccggcaacgacaauuccacagccacgcugugucucgggcaccaugcggucccuaacggaaccauuguuaagacaaucaccaaugaucaaauugaggugacaaacgcuaccgaacuggugcagucuagcuccgccggcgagaucugcgacucuccgcaccagauccuugauggggaaaauuguacacugauugacgcccuccugggagauccccagugcgacggcuuucaaaacaaaaagugggaucuguucgucgagagaagccgggcuuauuccaauuguuacccuuaugacgugcccgauuacgccucucuccgcagccugguugcuuccagcgggacccuugaauuuaacaaugagucuuucaacuggacgggagugacccagaauggcacauccagcgccugcaucagacggucuaacaauuccuuuuucagccgccugaacuggcucacccaucugaauuuuaaauauccugcgcuuaacgucacaaugcccaacaaugagcaguucgacaagcuguacauuuggggcgugcaccauccugggaccgauaaggaccagaucuuucucuaugcccaggcuucuggaagaauuacgguuuccacaaaacggagccagcaggccgugaucccgaacauuggcucccgccccagaguccggaauaucccuucucgcaucagcauuuacuggaccaucgugaagcccggggauauucugcugaucaacuccacaggaaaucucauugcuccuagaggcuacuucaaaauccggagcgggaagucuuccaucaugcgcagcgacgcccccauuggaaaauguaacucugaaugcaucaccccgaauggcagcauuccuaacgacaagcccuuucagaaugugaacagaaucaccuauggcgcguguccucgguacgucaagcaauccacacugaaacuugccacggggaugcgcaauguucccgagaagcagaccagaggaauuuucggcgcuaucgccggguuuaucgaaaacggaugggagggcaugauggaugggugguauggauuccggcaccaaaauucugagggcagaggccaagcugccgaccugaaaagcacacaggccgcuauugaucagaucaacgggaagcucaaucgccugauuggaaaaaccaacgaaaaguuccaccagaucgagaaagaauuuuccgagguggaaggccggauucaagaccuugagaaguacguggaggauacaaagaucgaccuguggagcuauaacgcggaacuccuggucgcccuggagaaucagcauaccauugaucucacggacucugaaaugaacaaacuguucgagaagaccaaaaagcagcuuagagaaaaugcugaggauauggggaacggaugcuuuaaaaucuaccacaagugugacaaugccugcaucggcuccauucgcaacgggacauaugaucaugacguguaccgggacgaggcccugaauaacagauuccagaucaagggcguugaacucaaaagcggauacaaggauuggauucuguggaucucuuuugcuauuuccugcuuccuucuguguguggcccuccugggcuuuaucaugugggcgugccaaaaagggaauauccgcuguaacauuugcaucuga

SEQ ID NO: 203235 - RNA, 1701 nt, Artificial Sequence; identical to SEQ ID NO: 203234
  derived and/or modified CDS sequence (opt5) from hemagglutinin__InfluenzaA__AHL81177

SEQ ID NO: 203236 - RNA, 1701 nt, Artificial Sequence; identical to SEQ ID NO: 203221
  derived and/or modified CDS sequence (opt5) from hemagglutinin__InfluenzaA__AHL81189

SEQ ID NO: 203237 - RNA, 1701 nt, Artificial Sequence
  derived and/or modified CDS sequence (opt5) from hemagglutinin__InfluenzaA__AHL81212
augaagaccaucauugcccugagcuacauccucugccugguguucgcucagaaacuucccggcaacgacaauuccacagccacgcugugucucgggcaccaugcggucccuaacggaaccauuguuaagacaaucaccaaugaucaaauugaggugacaaacgcuaccgaacuggugcagucuagcuccacaggcgagaucugcaauucuccgcaccagauccuugacggggaaaacuguacccugauugaugcccuccugggagacccccagugcgauggcuuucaaaauaaaaagugggaccuguucgucgagagaagcaaagcccauuccaacuguuauccuuacgaugugcccgacuaugcuucucuccggagccugguugccuccagcgggacgcuugaauuuaagaaugagucuuucaacuggaccggagugacacagaauggcaccuccagcgcuugcauccgcagaucuaacaauuccuuuuucagccggcugaacuggcucacacaccugaauuuuaaguacccugcccuuaacgucaccaugcccaacaaugagcaguucgauaaacuguauauuuggggcgugcaucacccugggacggacaaggaucagaucuuucucuacgcgcaagccgcuggacgcauuacaguuucuaccaaaagaucccagcaggccgugaucccgaacauuggcagccggccccgcgucagaaauaucccuucccgggugucuaucuauuggacaauugugaagcccggggacauccugcugauuaacagcaccggaaaucucaucgcuccucgcggcuacuucaaaauuagauccggaaagagcucuaucaugcgguccgaugcccccaucgggaaguguaacagcgcgugcauuaccccgaauggcucuaucccuaacgacaaacccuuucagaaugucaaccgcauuacauacggcgccuguccuagauauguuaagcaaaauacgcugaaacuugcuaccgggaugcggaacgugcccgaaaagcagacacgcggaaucuucggcgccauugcuggguuuaucgagaauggaugggaaggcaugguggacgggugguacggauucagacaccagaacagcgagggccggggccaagccgccgaucugaaauccacccaggcugcgaucgaccagauuaaugggaagcucaacagacugaucggaaaaacaaacgagaaguuccaucagauugaaaaggaguuuucugaagucgagggccgcauccaagaucuugaaaaauauguggaggacaccaagauugaucuguggagcuacaaugccgagcuccugguugcucuggaaaaccagcacacgaucgaccucacagauuccgagaugaauaaacuguucgaaaagaccaaaaagcagcuucgggagaacgccgaagacauggggaauggaugcuuuaagauuuaucauaaaugugauaacgccugcaucggcagcaucagaaaugggaccuacgaccacgauguguaucgcgacgaggcucugaacaaucgguuccagauuaagggcgucgagcucaaaucuggauacaaggacuggauccuguggauuuccuuugccaucagcugcuuccuucuguguguggcgcuccugggcuuuauuaugugggcuugccaaaaagggaacaucagauguaauaucugcauuuga

SEQ ID NO: 203238 - RNA, 1701 nt, Artificial Sequence
  derived and/or modified CDS sequence (opt5) from hemagglutinin__InfluenzaA__AHL81224
augaaggccauccuggugguccuccuguacaccuucgcuacagccaacgcggacacgcuuugcauuggcuaucacgcuaauaacagcaccgauacaguugacaccgugcuggagaaaaaugugacagucacccauuccgugaaccuccuggaagauaagcacaaugggaaacuuuguaagcugagaggaguugcuccccuccaucugggcaaaugcaacaucgccggguggauucugggaaauccugagugugaaucucucagcacagccuccucuuggagcuacaucguggagaccuccucuagcgacaacggcacgugcuauccgggggauuuuauugacuacgaagaacugcgggagcagcuuuccagcgucucuuccuucgaacgcuuugagaucuuccccaagaccagcucuuggccuaaucacgauuccaacaagggagugacagccgcuuguccccaugccggcgcgaaaggcuuuuauaagaaucugaucuggcucguuaaaaaggggaacagcuacccuaaacugucuaaguccuauauuaaugacaagggaaaagaagugcuuguccuguggggcauccaccaccccagcaccacagccgaucaacagucccucuaccagaacgcugacaccuacguguucguggggacgucuagauauagcaagaaauuuaagccugagauugccauccggccgaaaguccgcgaucaggagggaagaaugaauuacuauuggacacugguugaacccggcgacaagauuaccuucgaggcuacagggaaccugguggugccucgguacgccuuugcgauggaacgcaccgccggauccggcaucauuaucagcgauacccccguccaugacugcaacacaacgugucaaaccccuaaaggcgcuaucaauacaucucuccccuuccagaacauucacccgaucaccauugggaagugcccuaaguaugugaaauccacaaagcugagacuugccaccggacugcggaauguucccagcauccagucucgcggccucuuuggggcuauugccggauucaucgagggcggguggacgggaaugguggacggcugguacggcuaucaucaccagaacgaacaagggagcggauacgccgcugaucugaaauccacacagaaugcgaucgacaagauuaccaacaaagucaauucugugaucgagaagaugaacacccaguuuacagccguuggcaaggaguucaaucaccuugagaaaagaauugagaaccugaauaagaaaguggaugacggguuccucgauaucuggaccuacaacgcugaacugcugguccuccuggagaaugaacggacacuugacuaucaugauagcaacgugaagaaucuguacgagaaaguccgcaaccagcucaagaacaaugccaaggagauuggaaacggcuguuuugaguucuaucacaaaugcgacaauacguguauggaauccgugaagaacgggaccuacgauuauccuaaauacagcgaagaggccaagcugaauagagaagagaucgacggcguuaaacuugagucuacacggaucuaucaaauucuggcuaucuacuccaccguggccagcucucucguccuggugguuucccugggagcgauuagcuuuuggaugugcuccaacggcucucuccagugccgcaucuguauuuga

SEQ ID NO: 203239 - RNA, 1701 nt, Artificial Sequence; identical to SEQ ID NO: 198927
  derived and/or modified CDS sequence (opt5) from hemagglutinin__InfluenzaA__AHL81235

SEQ ID NO: 203240 - RNA, 1701 nt, Artificial Sequence; identical to SEQ ID NO: 198927
  derived and/or modified CDS sequence (opt5) from hemagglutinin__InfluenzaA__AHL81247

SEQ ID NO: 203241 - RNA, 1701 nt, Artificial Sequence; identical to SEQ ID NO: 198927
  derived and/or modified CDS sequence (opt5) from hemagglutinin__InfluenzaA__AHL81259

SEQ ID NO: 203242 - RNA, 1701 nt, Artificial Sequence; identical to SEQ ID NO: 198927
  derived and/or modified CDS sequence (opt5) from hemagglutinin__InfluenzaA__AHL81271

SEQ ID NO: 203243 - RNA, 1701 nt, Artificial Sequence; identical to SEQ ID NO: 198927
  derived and/or modified CDS sequence (opt5) from hemagglutinin__InfluenzaA__AHL81283

SEQ ID NO: 203244 - RNA, 1701 nt, Artificial Sequence; identical to SEQ ID NO: 198927
  derived and/or modified CDS sequence (opt5) from hemagglutinin__InfluenzaA__AHL81295

SEQ ID NO: 203245 - RNA, 1701 nt, Artificial Sequence; identical to SEQ ID NO: 203220
  derived and/or modified CDS sequence (opt5) from hemagglutinin__InfluenzaA__AHL81307

SEQ ID NO: 203246 - RNA, 1701 nt, Artificial Sequence; identical to SEQ ID NO: 198939
  derived and/or modified CDS sequence (opt5) from hemagglutinin__InfluenzaA__AHL81329

SEQ ID NO: 203247 - RNA, 1701 nt, Artificial Sequence
  derived and/or modified CDS sequence (opt5) from hemagglutinin__InfluenzaA__AHL81340
augaagaccaucauugcccugagcuacauccucugccugguguucgcucagaaacuucccggcaacgacaauuccacagccacgcugugucucgggcaccaugcggucccuaacggaaccauuguuaagacaaucaccaaugaucaaauugaggugacaaacgcuaccgaacuggugcagucuagcuccacaggcgagaucugcgacucuccgcaccagauccuugaugggaaaaauuguacccugauugacgcccuccugggagauccccagugcgacggcuuucaaaacaagaaaugggaucuguucgucgaaagaagcaaggccuauuccaauuguuacccuuaugacgugcccgauuacgcuucucuccggagccugguugccuccagcgggacgcuugaguuuaacaaugaaucuuucaacuggaccggagugacacaggacggcaccuccagcgcuugcauccgcggcucuaaaaauuccuuuuucagcagacugaacuggcucacacaucugaauuuuaaauauccugcccuuaacgucaccaugcccaauaacgagcaguucgauaagcuguacauuuggggagugcaccauccugggacggacaaagaucagaucuuucucuaugcgcaagccucuggccggauuacaguuuccaccaagcgcagccagcaggcugccaucccgaacauuggguccagaccccgggugcgcaauaucccuucuagaaucagcauuuacuggacaaucgucaaacccggagacauucugcugaucaacuccaccggcaaucucauugcuccucggggguacuucaagauccgcagcggaaagucuuccaucaugagaagcgacgcccccauuggcaaauguaacucugagugcaucaccccgaauggcagcauuccuaacgauaagcccuuucagaaugugaaccggaucacauauggggcguguccucgcuacgugaaacaaaauacgcugaaacuugccaccggaaugagaaacguccccgaaaagcagacacggggcauuuucggggcuaucgccggauuuaucgagaauggcugggaagggaugguugacggaugguauggcuuccgccaccagaacuccgagggcagagggcaagcugccgaucugaagucuacccaggccgcuauugaccagaucaauggaaaacucaaccggcugauuggcaagacaaaugagaaguuccaccagaucgaaaaagaguuuagcgaaguggaggggcgcauucaagaucuugaaaaguacguggaggacaccaaaaucgaucugugguccuauaacgcggagcuccuggucgcccuggaaaaccagcauacgauugaccucacagauagcgagaugaauaagcuguucgaaaagaccaagaagcagcuuagagagaacgcugaagacaugggaaauggcugcuuuaaaaucuaccacaagugugauaacgccugcaucgggucuauucggaauggcaccuauaaccaugacguguacagagacgaggcccugaauaaacgcuuccagaucaagggaauugagcucaaauccggcuacaaggauuggauccuguggauuagcuuugcuaucucuugcuuccuucuguguguugcccuccugggguuuaucaugugggcgugccaaaagggaaacauucgguguaauaucugcauuuga

SEQ ID NO: 203248 - RNA, 1701 nt, Artificial Sequence; identical to SEQ ID NO: 198927
  derived and/or modified CDS sequence (opt5) from hemagglutinin__InfluenzaA__AHL81352

SEQ ID NO: 203249 - RNA, 1701 nt, Artificial Sequence
  derived and/or modified CDS sequence (opt5) from hemagglutinin__InfluenzaA__AHL81364
augaaggccauccuggugguccuccuguacaccuucgcuacagccaacgcggacacgcuuugcauuggcuaucacgcuaauaacagcaccgauacaguugacaccgugcuggagaaaaaugugacagucacccauuccgugaaccuccuggaagauaagcacaaugggaaacuuuguaagcugagaggaguugcuccccuccaucugggcaaaugcaacaucgccggguggauucugggaaauccugagugugaaucucucagcacagccuccucuuggagcuacaucguggagaccuccucuagcgacaacggcgccugcuauccgggggauuuuauuaauuacgaagaacugcgggagcagcuuuccagcgucucuuccuucgaacgcuuugagaucuuccccaagacgaacagcuggccuaaucacgacucuaacaagggagugaccgcugccuguccccaugcgggcgccaaauccuuuuauaagaaucugaucuggcucguuaaaaagggcaacagcuacccuaaacugucuaaguccuauauuaaugauaaggggaaagaagugcuuguccuguggggaauccaccaccccagcacaaccgcugaccaacagucccucuaccagaacgccgaugcuuacguguucgugggcacaucuagauauagcaagaaauuuaagccugagauugccauccggccgaaaguccgcgaccaggaggggagaaugaacuacuauuggacccugguugaacccggagauaagauuacguucgaggcgacaggcaaucugguggugccucgguacgccuuugcuauggaacgcaacgccggguccggaaucauuaucagcgacacccccguccaugauugcaauacaaccugucaaaccccuaaaggcgcuaucaacacaucucuccccuuccagaauauucacccgaucacgauuggcaagugcccuaaguaugugaaauccaccaagcugagacuugccacagggcugcggaacguucccagcauccagucucgcggacucuuuggcgccauugcuggguucaucgagggaggcuggaccgggaugguggacggaugguacggcuaucaucaccagaaugaacaaggcagcggguacgcggccgaccugaaauccacacagaacgcuaucgauaagauuaccaauaaagucaacucugugaucgagaagaugaauacgcaguuuacagccguuggaaaggaguucaaccaccuugagaaaagaauugagaaucugaacaagaaaguggacgauggcuuccucgacaucuggaccuacaaugccgaacugcugguccuccuggagaacgaacggacccuugauuaucaugacagcaacgugaagaaucuguacgagaaaguccgcaaccagcucaagaauaacgcuaaggagauugggaauggauguuuugaguucuaucacaaaugcgauaacacauguauggaauccgugaagaauggcaccuacgacuauccuaaauacagcgaagaggccaagcugaacagagaagagaucgaugggguuaaacuugagucuacacggaucuaucaaauucuggcgaucuacuccacgguggcuagcucucucguccuggugguuucccugggcgccauuagcuuuuggaugugcuccaauggaucucuccagugccgcaucuguauuuga

SEQ ID NO: 203250 - RNA, 1701 nt, Artificial Sequence
  derived and/or modified CDS sequence (opt5) from hemagglutinin__InfluenzaA__AHL81386
augaaggccauccuggugguccuccuguacaccuucgcuacagccaacgcggacacgcuuugcauuggcuaucacgcuaauaacagcaccgauacaguugacaccgugcuggagaaaaaugugacagucacccauuccgugaaccuccuggaagauaagcacaaugggaaacuuuguaagcugagaggaguugcuccccuccaucugggcaaaugcaacaucgccggguggauucugggaaauccugagugugaaucucucagcacagccuccucuuggagcuacaucguggagaccuccucuagcgacaacggcacgugcuauccgggggauuuuauuaauuacgaagaacugcgggagcagcuuuccagcgucucuuccuucgaacgcuuugagaucuuccccaagaccaacagcuggccuaaucacgacucuaacaagggagugacagccgcuuguccccaugccggcguuaaauccuuuuauaagaaucugaucuggcucgugaaaaagggcaacagcuacccuaaacugucuaaguccuauauuaaugauaaggggaaagaaguccuugugcuguggggaauccaccaccccagcaccacagcggaccaacagucccucuaccagaacgccgaugcuuacguguucgucggcaccucuagauauagcaagaaauuuaagccugagauugccauccggccgaaaguucgcgaccaggaggggagaaugaacuacuauuggacgcugguggaacccggagauaagauuacauucgaggcuaccggcaaucugguggucccucgguacgccuuugcgauggaacgcaacgccggguccggaaucauuaucagcgacacacccgugcaugauugcaauaccaccugucaaacaccuaaaggcgcuaucaacacgucucuccccuuccagaauauucacccgaucaccauuggcaagugcccuaaguauguuaaauccacaaagcugagacuugccaccgggcugcggaacgugcccagcauccagucucgcggacucuuuggcgcuauugccggguucaucgagggaggcuggacagggauggucgacggaugguacggcuaucaucaccagaaugaacaaggcagcggguacgccgcugaccugaaauccacccagaacgcgaucgauaagauuacgaauaaagugaacucuguuaucgagaagaugaauacacaguuuaccgccgugggaaaggaguucaaccaccuugagaaaagaauugagaaucugaacaagaaagucgacgauggcuuccucgacaucuggaccuacaaugcugaacugcuggugcuccuggagaacgaacggacacuugauuaucaugacagcaacgucaagaaucuguacgagaaagugcgcaaccagcucaagaauaacgccaaggagauugggaauggauguuuugaguucuaucacaaaugcgauaacaccuguauggaauccguuaagaauggcacauacgacuauccuaaauacagcgaagaggccaagcugaacagagaagagaucgauggggugaaacuugagucuacgcggaucuaucaaauucuggcuaucuacuccaccgucgccagcucucucgugcugguugugucccugggcgcgauuagcuuuuggaugugcuccaauggaucucuccagugccgcaucuguauuuga

SEQ ID NO: 203251 - RNA, 1701 nt, Artificial Sequence; identical to SEQ ID NO: 198927
  derived and/or modified CDS sequence (opt5) from hemagglutinin__InfluenzaA__AHL81397

SEQ ID NO: 203252 - RNA, 1701 nt, Artificial Sequence; identical to SEQ ID NO: 203237
  derived and/or modified CDS sequence (opt5) from hemagglutinin__InfluenzaA__AHL81409

SEQ ID NO: 203253 - RNA, 1701 nt, Artificial Sequence; identical to SEQ ID NO: 203207
  derived and/or modified CDS sequence (opt5) from hemagglutinin__InfluenzaA__AHL81419

SEQ ID NO: 203254 - RNA, 1701 nt, Artificial Sequence; identical to SEQ ID NO: 195905
  derived and/or modified CDS sequence (opt5) from hemagglutinin__InfluenzaA__AHL81430

SEQ ID NO: 203255 - RNA, 1701 nt, Artificial Sequence; identical to SEQ ID NO: 192702
  derived and/or modified CDS sequence (opt5) from hemagglutinin__InfluenzaA__AHL88951

SEQ ID NO: 203256 - RNA, 1701 nt, Artificial Sequence; identical to SEQ ID NO: 192702
  derived and/or modified CDS sequence (opt5) from hemagglutinin__InfluenzaA__AHL89030

SEQ ID NO: 203257 - RNA, 1701 nt, Artificial Sequence
  derived and/or modified CDS sequence (opt5) from hemagglutinin__InfluenzaA__AHL89042
augaagaccaucauugcccugagcuacauccucugccugguguucgcucagaaacuucccggcaacgacaauuccacagccacgcugugucucgggcaccaugcggucccuaacggaaccauuguuaagacaaucaccaaugaucaaauugaggugacaaacgcuaccgaacuggugcagucuagcuccacaggcgagaucugcgacucuccgcaccagauccuugauggggaaaauuguacccugauugacgcccuccugggagauccccagugcgacggcuuucaaaacaaaaagugggaucuguucgucgagagaagcaaagccuauuccaauuguuacccuuaugacgugcccgauuacgcuucucuccggagccugguugccuccagcgggacgcuugaauuuaacaaugagaacuucaauuggaccggagugacacagaacggcaccucuuccgcuugcaagcgcagaagcaauaacagcuuuuucucccggcugaauuggcucacacaucugaaguuuaaauauccugcccuuaacgucaccaugcccaacaaugagaaguucgacaaacuguacaucuggggcgugcaccauccugggacggauaacgaccagauuuuucucuaugcgcaggccagcggacgcaucacaguuucuaccaagagaucccaacagacagugauuccgaauaucggcagccggccccgcgucagaaacauuccuucccggaucucuaucuacuggaccauugugaaacccggggauauccugcugauuaauagcaccggaaaccucaucgcuccucgcggcuacuucaagauuagauccgggaagucuucuaucaugcgguccgacgcccccaucggaaaauguaauagcgaaugcauuacaccgaacggcucuaucccuaaugacaagcccuuucagaacgugaaucgcauuacguauggcgcuuguccuagauacgucaaacagaacacccugaaacuugccacagggaugcggaauguucccgagaagcaaacccgcggaaucuucggcgcgauugccggguuuaucgaaaacggaugggagggcaugguggaugggugguauggauucagacaccagaauagcgagggcaucggccaggcugccgaccugaaguccacacaagcugccauuaaccagaucaacgggaaacucaaucggcugauuggaaagaccaacgaaaaguuccaccagaucgagaaagaauuuucugagguggaaggccgcauucaggaucuugagaaguacgucgaggacacgaaaaucgaucuguggagcuauaaugccgaacuccugguggcucuggagaaccaacauacaauugaccucaccgauuccgaaaugaauaagcuguucgagagaaccaaaaagcagcuucgggaaaacgcggaggacauggggaauggaugcuuuaagaucuaccacaaaugugauaacgccugcaucggcagcauuagaaaugggacauaugaccaugauguuuaccgcgacgaggcucugaacaaucgguuccagaucaagggcguggaacucaaaucuggauacaaggacuggauucuguggaucuccuuugccauuagcugcuuccuucugugugucgcccucgugggcuuuaucaugugggcuugccagaaagggaacaucagauguaauauuugcaucuga

SEQ ID NO: 203258 - RNA, 1701 nt, Artificial Sequence
  derived and/or modified CDS sequence (opt5) from hemagglutinin__InfluenzaA__AHL89054
augaagaccaucauugcccugagcuacauccucugccugguguucgcucagaaacuucccggcaacgacaauuccacagccacgcugugucucgggcaccaugcggucccuaacggaaccauuguuaagacaaucaccaaugaucaaauugaggugacaaacgcuaccgaacuggugcagucuagcuccacaggcgggaucugcgacucuccgcaccagauccuugauggagagaauuguacccugauugacgcccuccugggcgauccccagugcgacggguuucaaaacaaaaagugggaucuguucgucgaaagaagcaaagccuauuccaauuguuacccuuaugacgugcccgauuacgcuucucuccggagccugguugccuccagcggaacgcuugaguuuaacaaugaaucuuucaacuggaccggcgugacacagaauggcaccuccagcgcuugcaagcgcagaucuaacaauuccuuuuucagccggcugaacuggcucacacaucugaaguuuaaauauccugcccuuaaugucaccaugcccaacaacgagaaguucgacaaacuguacaucuggggagugcaccauccugggacggauaaugaccagauuuuucucuaugcgcaggccucuggccgcaucacaguuuccaccaagagaagccaacagacagugauuccgaacaucgggucccggccccgcgucagaaauauuccuucucggaucagcaucuacuggaccauugugaaacccggagauauccugcugauuaacuccaccggcaaucucaucgcuccucgcggguacuucaagauuagaagcggaaagucuuccaucaugcggagcgacgcccccaucggcaaauguaacucugagugcauuacaccgaauggcagcaucccuaacgacaagcccuuucagaaugugaaccgcauuacguauggggcuuguccuagauacgucaaacagaauacccugaaacuugccacaggaaugcggaacguucccgaaaagcaaacccgcggcaucuucggggcgauugccggauuuaucgagaauggcugggaagggaugguggauggaugguauggcuucagacaccagaacuccgagggcaucgggcaggcugccgaccugaagucuacacaagcugccauuaaucagaucaacggaaaacucaaccggcugauuggcaagaccaaugagaaguuccaccagaucgaaaaagaguuuagcgaaguggaggggcgcauucaggaucuugaaaaguacgucgaggacacgaaaaucgaucugugguccuauaacgccgagcuccugguggcucuggaaaaucaacauacaauugaccucaccgauagcgagaugaacaagcuguucgaaagaaccaaaaagcagcuucgggagaaugcggaagacaugggaaacggcugcuuuaagaucuaccacaaaugugauaaugccugcaucgggucuauuagaaacggcacauaugaccaugauguuuaccgcgacgaggcucugaauaaccgguuccagaucaagggaguggagcucaaauccggcuacaaggacuggauucuguggaucagcuuugccaugucuugcuuccuucugugugucgcccuccugggguuuauuaugugggcuugccagaaaggaaauaucagauguaacaucugcauuuga

SEQ ID NO: 203259 - RNA, 1701 nt, Artificial Sequence; identical to SEQ ID NO: 193653
  derived and/or modified CDS sequence (opt5) from hemagglutinin__InfluenzaA__AHL89066

SEQ ID NO: 203260 - RNA, 1701 nt, Artificial Sequence
  derived and/or modified CDS sequence (opt5) from hemagglutinin__InfluenzaA__AHL89078
augaagaccaucauugcccugagcuacauccucugccugguguucgcucagaaacuucccggcgacgauaacuccacagccacgcugugucucgggcaccaugcggucccuaauggaaccguugugaagacaauuaccaacgaccaaaucgaggugacaaaugcuaccgaacugguccagucuagcuccacaggcgggauuugcgauucuccgcaccagauccuugacggagagaacuguacccugaucgaugcccuccugggcgacccccagugcgauggguuucaaaauaaaaagugggaccuguucguggaaagaagcaaagccuauuccaacuguuacccuuaugauguucccgacuacgcuucucuccggagccugguggccuccagcggaacgcuugaguuuaauaacgaaucuuucaauuggaccggcgucacacagaacggcaccuccagcgcuugcaagcgcagaucuaauaacuccuuuuucagccggcugaauuggcucacacaucugaaguuuaaauauccugcccuuaacgugaccaugcccaauaacgagaaguucgauaaacuguacauuuggggaguucaccauccugggacggacaacgaucagaucuuucucuaugcgcaggccucuggccgcauuacaguguccaccaagagaagccaacagacagucaucccgaauauugggucccggccccgcgugagaaacaucccuucucggauuagcaucuacuggaccaucgugaaacccggagacauucugcugaucaauuccaccggcaaccucauugcuccucgcggguacuucaagaucagaagcggaaagucuuccauuaugcggagcgacgcccccaucggcaaauguaauucugagugcaucacaccgaacggcagcauuccuaaugauaagcccuuucagaacgucaaucgcaucacguauggggcuuguccuagauacguuaaacagaacacccugaaacuugccacaggaaugcggaaugugcccgaaaagcaaacccgcggcauuuucggggcgaucgccggauuuauugagaacggcugggaagggaugguggacggaugguauggcuucagacaccaaaauuccgagggcaucgggcaggcugccgaucugaagucuacacaggcugccaucaaccagauuaauggaaaacucaaccggcugaucggcaagaccaacgagaaguuccaccagauugaaaaagaguuuagcgaagucgaggggagaauccaggaccuugaaaaguacguggaggauacgaaaauugaccugugguccuauaaugccgagcuccugguugcucuggaaaaccaacauacaaucgaucucaccgacagcgagaugaauaagcuguucgaacgcaccaaaaagcagcuucgggagaacgcggaagauaugggaaauggcugcuuuaagauuuaccacaaaugugacaacgccugcaucgggucuaucagaaauggcacauaugaucaugacguguaccgcgacgaggcucugaacaaucgguuccagauuaagggagucgagcucaaauccggcuacaaggauuggauccuguggauuagcuuugccaucucuugcuuccuucuguguguggcccuccugggguuuauuaugugggcuugccagaaaggaaacaucagauguaauaucugcauuuga

SEQ ID NO: 203261 - RNA, 1701 nt, Artificial Sequence
  derived and/or modified CDS sequence (opt5) from hemagglutinin__InfluenzaA__AHL89090
augaagaccaucauugcccugagcuacauccucugccugguguucgcucagaaacuucccggcaacgacaauuccacagccacgcugugucucgggcaccaugcggucccuaacggaaccauuguuaagacaaucaccaaugaucaaauugaggugacaaacgcuaccgaacuggugcagucuagcuccacaggcgggaucugcgacucuccguaucagauccuugauggagagaauuguacccugauugacgcccuccugggcgauccccagugcgacggguuucaaaacaaaaagugggaucuguucgucgaaagaagcaaagccuacuccaauuguuauccuuacgacgugcccgauuaugcuucucuccggagccugguugccuccagcggaacgcuugaguuuaacaaugaaucuuucaacuggaccggcgugacacagaauggcaccuccagcgcuugcaagcgcagaucuaacaauuccuuuuucagccggcugaacuggcucacacaccugaaguuuaaauacccugcccuuaaugucaccaugcccaacaacgagaaguucgacaaacuguauaucuggggagugcaucacccugggacggauaaugaccagauuuuucucuacgcgcaggccucuggccgcaucacaguuuccaccaagagaagccaacagacagugauuccgaacaucgggucccggccccgcgucagaaauauuccuucucggaucagcaucuacuggaccauugugaaacccggagauauccugcugauuaacuccaccggcaaucucaucgcuccucgcggguauuucaagauuagaagcggaaagucuuccaucaugcggagcgacgcccccaucggcaaauguaacucugagugcauuacaccgaauggcagcaucccuaacgacaagcccuuucagaaugugaaccgcauuacguacggggcuuguccuagauaugucaaacagaauacccugaaacuugccacaggaaugcggaacguucccgaaaagcaaacccgcggcaucuucggggcgauugccggauuuaucgagaauggcugggaagggaugguggauggaugguacggcuucagacaucagaacuccgagggcaucgggcaggcugccgaccugaagucuacacaagcugccauuaaucagaucaacggaaaacucaaccggcugauuggcaagaccaaugagaaguuccaccagaucgaaaaagaguuuagcgaaguggaggggcgcauucaggaucuugaaaaguaugucgaggacacgaaaaucgaucugugguccuacaacgccgagcuccugguggcucuggaaaaucaacacacaauugaccucaccgauagcgagaugaacaagcuguucgaaagaaccaaaaagcagcuucgggagaaugcggaagacaugggaaacggcugcuuuaagaucuaucauaaaugugauaaugccugcaucgggucuauuagaaacggcacauacgaccacgauguuuaccgcgacgaggcucugaauaaccgguuccagaucaagggaguggagcucaaauccggcuauaaggacuggauucuguggaucagcuuugccauuucuugcuuccuucugugugucgcccuccugggguuuaucaugugggcuugccagaaaggaaauaucagauguaacauuugcaucuga

SEQ ID NO: 203262 - RNA, 1701 nt, Artificial Sequence; identical to SEQ ID NO: 192702
  derived and/or modified CDS sequence (opt5) from hemagglutinin__InfluenzaA__AHL89102

SEQ ID NO: 203263 - RNA, 1701 nt, Artificial Sequence; identical to SEQ ID NO: 192702
  derived and/or modified CDS sequence (opt5) from hemagglutinin__InfluenzaA__AHL89114

SEQ ID NO: 203264 - RNA, 1701 nt, Artificial Sequence
  derived and/or modified CDS sequence (opt5) from hemagglutinin__InfluenzaA__AHL89126
augaagaccaucauugcccugagcuacauccucugccugguguucgcucagaaacuucccggcaacgacaauuccacagccacgcugugucucgggcaccaugcggucccuaacggaaccauuguuaagacaaucaccaaugaucaaauugaggugacaaacgcuaccgaacuggugcagucuagcuccacaggcgggaucugcgacucuccgcaccagauccuugauggagagaauuguacccugauugacgcccuccugggcgauccccagugcgacggguuucaaaacaaaaagugggaucuguucgucgaaagaagcaaagccuauuccaauuguuacccuuaugacgugcccgauuacgcuucucuccggagccugguugccuccagcggaacgcuugaguuuaacaaugaaaacuucaauuggaccggcgugacacagaacggcaccucuuccgcuugcaagcgcagaagcaauaacuccuuuuucucucggcugaauuggcucacacaucugaaguuuaaauauccugcccuuaacgucaccaugcccaacaaugagaaguucgacaaacuguacaucuggggagugcaccauccugggacggauaacgaccagauuuuucucuaugcgcaggccagcggccgcaucacaguuucuaccaagagaucccaacagacagugauuccgaauaucgggagccggccccgcgucagaaacauuccuucccggaucucuaucuacuggaccauugugaaacccggagauauccugcugauuaauagcaccggcaaccucaucgcuccucgcggguacuucaagauuagauccggaaagagcucuaucaugcgguccgacgcccccaucggcaaauguaauagcgagugcauuacaccgaacggcucuaucccuaaugacaagcccuuucagaacgugaaucgcauuacguauggggcuuguccuagauacgucaaacagaacacccugaaacuugccacaggaaugcggaauguucccgaaaagcaaacccgcggcaucuucggggcgauugccggauuuaucgagaacggcugggaagggaugguggauggaugguauggcuucagacaccagaauagcgagggcaucgggcaggcugccgaccugaaguccacacaagcugccauuaaccagaucaacggaaaacucaaucggcugauuggcaagaccaacgagaaguuccaccagaucgaaaaagaguuuucugaaguggaggggcgcauucaggaucuugaaaaguacgucgaggacacgaaaaucgaucuguggagcuauaaugccgagcuccugguggcucuggaaaaccaacauacaauugaccucaccgauuccgagaugaauaagcuguucgaaagaaccaaaaagcagcuucgggagaacgcggaagacaugggaaauggcugcuuuaagaucuaccacaaaugugauaacgccugcaucgggagcauuagaaauggcacauaugaccaugauguuuaccgcgacgaggcucugaacaaucgguuccagaucaagggaguggagcucaaaucuggcuacaaggacuggauucuguggaucuccuuugccauuagcugcuuccuucugugugucgcccuccugggguuuaucaugugggcuugccagaaaggaaacaucagauguaauauuugcaucuga

SEQ ID NO: 203265 - RNA, 1701 nt, Artificial Sequence
  derived and/or modified CDS sequence (opt5) from hemagglutinin__InfluenzaA__AHL89138
augaagaccaucauugcccugagcuacauccucugccugguguucgcucagaaacuucccggcaacgacaauuccacagccacgcugugucucgggcaccaugcggucccuaacggaaccauuguuaagacaaucaccaaugaucaaauugaggugacaaacgcuaccgaacuggugcagucuagcuccacaggcgagaucugcgacucuccgcaccagauccuugauggggaaaauuguacccugauugacgcccuccugggagauccccagugcgacggcuuucaaaacaaaaagugggaucuguucgucgagagaagcaaagccuauuccaauuguuacccuuaugacgugcccgauuacgcuucucuccggagccugguugccuccagcgggacgcuugaauuuaacaaugagucuuucaacuggaccggagugacacagaauggcaccuccagcgcuugcaagcgcagaucuaacaauuccuuuuucagccggcugaacuggcucacacaucugaaguuuaaauauccugcccuuaaugucaccaugcccaacaacgagaaguucgacaaacuguacaucuggggcgugcaccauccugggacggauaaugaccagauuuuucucuaugcgcagucuuccggacgcaucacaguuagcaccaagagaucccaacagacagugauuccgaacaucggcucucggccccgcgucagaaauauuccuagccggaucuccaucuacuggaccauugugaaacccggggauauccugcugauuaacagcaccggaaaucucaucgccccucgcggcuacuucaagauuagaucugggaaguccagcaucaugcggucugacgcucccaucggaaaauguaacagcgaaugcauuacaccgaauggcuccaucccuaacgacaagcccuuucagaaugugaaccgcauuacguauggcgccuguccuagauacgucaaacagaauacccugaagcuggcuacagggaugcggaacguucccgagaaacaaacccgcggaaucuucggcgccauugcgggguuuaucgaaaauggaugggagggcaugguggaugggugguauggauucagacaccagaacucugagggcaucggccaggccgcugaccuuaagagcacacaagccgcuauuaaucagaucaacgggaaacucaaccggcugauuggaaagaccaaugaaaaguuccaccagaucgagaaagaauuuuccgagguggaaggccgcauucaggaucuugagaaguacgucgaggacacgaaaaucgaucuguggagcuauaacgccgaacuccugguggcccuggagaaucaacauacaauugaccucaccgauucugaaaugaacaagcuguucgagagaaccaaaaagcagcuucgggaaaaugcugaggacauggggaacggaugcuuuaagaucuaccacaaaugugauaaugcgugcaucggcuccauuagaaacgggacauaugaccaugauguuuaccgcgacgaggcccugaauaaccgguuccagaucaagggcguggaacucaaaagcggauacaaggacuggauucuguggaucucuuuugcuauuuccugcuuccuucugugugucgcccuccugggcuuuaucaugugggccugccagaaagggaauaucagauguaacauuugcaucuga

SEQ ID NO: 203266 - RNA, 1701 nt, Artificial Sequence
  derived and/or modified CDS sequence (opt5) from hemagglutinin__InfluenzaA__AHL89150
augaagaccaucauugcccugagcuacauccucugccugguguucgcucagaaacuucccggcaacgacaauuccacagccacgcugugucucgggcaccaugcggucccuaacggaaccauuguuaagacaaucaccaaugaucaaauugaggugacaaacgcuaccgaacuggugcagucuagcuccacaggcgggaucugcgacucuccgcaccagauccuugauggagagaauuguacccugauugacgcccuccugggcgauccccagugcgacggguuucaaaacaaaaagugggaucuguucgucgaaagaagcaaagccuauuccaauuguuacccuuaugacgugcccgauuacgcuucucuccggagccugguugccuccagcggaacgcuugaguuuaacaaugaaucuuucaacuggaccggcgugacacagaauggcaccuccagcgcuugcaagcgcagaucuaacaauuccuuuuucagccggcugaacuggcucacacaucugaaguuuaaauauccugcccuuaaugucaccaugcccaacaacgagaaguucgacaaacuguacaucuggggagugcaccauccugggacggauaaugaccagauuuuucucuaugcgcaggccucuggccgcaucacaguuuccaccaagagaagccaacagacagugauuccgaacaucgggucccggccccgcgucagaaauauuccuucucggaucagcaucuacuggaccauugugaaacccggagauauccugcugauuaacuccaccggcaaucucaucgcuccucgcggguacuucaagauuagaagcggaaagucuuccaucaugcggagcgacgcccccaucggcaaauguaacucugagugcauuacaccgaauggcagcaucccuaacgacaagcccuuucagaaugugaaccgcauuacguauggggcuuguccuagauacgucaaacagaauacccugaaacuugccacaggaaugcggaacguucccgaaaagcaaacccgcggcaucuucggggcgauugccggauuuaucgagaauggcugggaagggaugguggauggaugguauggcuucagacaccagaacuccgagggcaucgggcaggcugccgaccugaagucuacacaagcugccauuaaucagaucaacggaaaacucaaccggcugauuggcaagaccaaugagaaguuccaccagaucgaaaaagaguuuagcgaaguggaggggcgcauucaggaucuugaaaaguacgucgaggacacgaaaaucgaucugugguccuauaacgccgagcuccugguggcucuggaaaaucaacauacaauugaccucaccgauagcgagaugaacaagcuguucgaaagaaccaaaaagcagcuucgggagaaugcggaagacaugggaaacggcugcuuuaagaucuaccacaaaugugauaaugccugcaucgggucuauuagaaacggcacauaugaccaugauguuuaccgcgacgaggcucugaauaaccgguuccagaucaagggaguggagcucaaauccggcuacaaggacuggauucuguggaucagcuuugccauuucuugcuuccuucugugugucgcccuccugguguuuaucaugugggcuugccagaaagggaauaucagauguaacauuugcaucuga

SEQ ID NO: 203267 - RNA, 1701 nt, Artificial Sequence
  derived and/or modified CDS sequence (opt5) from hemagglutinin__InfluenzaA__AHL89162
augaagaccaucauugcccugagcuacauccucugccugguguucgcucagaaacuucccggcaacgacaauuccacagccacgcugugucucgggcaccaugcggucccuaacggaaccauuguuaagacaaucaccaaugaucaaauugaggugacaaacgcuaccgaacuggugcagucuagcuccacaggcgggaucugcgacucuccgcaccagauccuugauggagagaauuguacccugauugacgcccuccugggcgauccccagugcgacggguuucaaaacaaaaagugggaucuguucgucgaaagaagcaaagccuauuccaauuguuacccuuaugacgugcccgauuacgcuucucuccggagccugguugccuccagcggaacgcuugaguuuaacaaugaaucuuucaacuggaccggcgugacacagaauggcaccuccagcgcuugcaagcgcagaucuaacaauuccuuuuucagccggcugaacuggcucacacaucugaaguuuaaauauccugcccuuaaugucaccaugcccaacaacgagaaguucgacaaacuguacaucuggggagugcaccauccugggacggauaaugaccagauuuuucucuaugcgcaggccucuggccgcaucacaguuuccaccaagagaagccaacagacagugauuccgaacaucgggucccggccccgcgucagaaauauuccuucucggaucagcaucuacuggaccauugugaaacccggagauauccugcugauuaacuccaccggcaaucucaucgcuccucgcggguacuucaagauuagaagcggaaagucuuccaucaugcggagcgacgcccccaucggcaaauguaacucugagugcauuacaccgaauggcagcaucccuaacgacaagcccuuucagaaugugaaccgcauuacguauggggcuuguccuagauacgucaaacagaauacccugaaacuugccacaggaaugcggaacguucccgaaaagcaaacccgcggcaucuucggggcgauugccggauuuaucgagaauggcugggaagggaugguggauggaugguauggcuucagacaccagaacuccgagggcacagggcaggcugccgaccugaagucuacccaagcugccacgaaucagaucaacggaaaacucaaccggcugauuggcaagacaaaugagaaguuccaccagaucgaaaaagaguuuagcgaaguggaggggcgcauucaggaucuugaaaaguacgucgaggacaccaaaaucgaucugugguccuauaacgccgagcuccugguggcucuggaaaaucaacauaccauugaccucacagauagcgagaugaacaagcuguucgaaagaaccaaaaagcagcuucgggagaaugcggaagacaugggaaacggcugcuuuaagaucuaccacaaaugugauaaugccugcauugggucuaucagaaacggcacauaugaccaugauguuuaccgcgacgaggcucugaauaaccgguuccagaucaagggaguggagcucaaauccggcuacaaggacuggauucuguggaucagcuuugccauuucuugcuuccuucugugugucgcccuccugggguuuaucaugugggcuugccagaaaggaaauauuagauguaacaucugcaucuga

SEQ ID NO: 203268 - RNA, 1701 nt, Artificial Sequence
  derived and/or modified CDS sequence (opt5) from hemagglutinin__InfluenzaA__AHL89174
augaagaccaucauugcccugagcuacacacucugccugguguucgcucagaaacuucccggcaacgacaauuccacggccacccugugucucgggcaccaugcggucccuaacggaacaaucguuaagaccauuacaaaugaucaaaucgaggugaccaacgcuacagaacuggugcagucuagcuccaccggcgggauuugcgacucuccgcaccagauccuugauggagagaauuguacgcugaucgacgcccuccugggcgauccccagugcgacggguuucaaaacaaaaagugggaucuguucgucgaaagaagcaaagccuauuccaauuguuacccuuaugacgugcccgauuacgcuucucuccggagccugguugccuccagcggaacccuugaguuuaacaaugaaucuuucaacuggacaggcgugacccagaauggcacauccagcgcuugcaagcgcagaucuaacaauuccuuuuucagccggcugaacuggcucacccaucugaaguuuaaauauccugcccuuaaugucacgaugcccaacaacgagaaguucgacaaacuguacauuuggggagugcaccauccugggacagauaaugaccagaucuuucucuaugcgcaggccucuggccgcauuaccguuuccacaaagagaagccaacagaccgugaucccgaacauugggucccggccccgcgucagaaauaucccuucucggauuagcaucuacuggaccaucgugaaacccggagauauucugcugaucaacuccacaggcaaucucauugcuccucgcggguacuucaagaucagaagcggaaagucuuccauuaugcggagcgacgcccccaucggcaaauguaacucugagugcaucacgccgaauggcagcauuccuaacgacaagcccuuucagaaugugaaccgcaucaccuauggggcuuguccuagauacgucaaacagaauacacugaaacuugccaccggaaugcggaacguucccgaaaaacaaacacgcggcauuuucggggcgaucgccggauuuauugagaauggcugggaagggaugguggauggaugguauggcuucagacaccagaacuccgagggcaucgggcaggcugccgaccugaagucuacccaagcugccaucaaucagauuaacggaaaacucaaccggcugaucggcaagacgaaugagaaguuccaccagauugaaaaagaguuuagcgaaguggaggggagaauccaggaucuugaaaaguacgucgaggacacaaaaauugaucugugguccuauaacgccgagcuccugguggcucuggaaaaucaacauaccaucgaccucaccgauagcgagaugaacaagcuguucgaacgcacaaagaagcagcuucgggagaaugcggaagacaugggaaacggcugcuuuaagauuuaccacaaaugugauaaugccugcaucgggucuaucagaaacggcaccuaugaccaugauguuuaccgcgacgaggcucugaauaaccgguuccagauuaagggaguggagcucaaauccggcuacaaggacuggauccuguggauuagcuuugccaucucuugcuuccuucugugugucgcccuccugggguuuauuaugugggcuugccagaaaggaaauaucagauguaacaucugcauuuga

SEQ ID NO: 203269 - RNA, 1701 nt, Artificial Sequence
  derived and/or modified CDS sequence (opt5) from hemagglutinin__InfluenzaA__AHL89210
augaagaccaucauugcccugagcuacauccucugccugguguucgcucagaaacuucccggcaacgacaauuccacagccacgcugugucucgggcaccaugcggucccuaacggaaccauuguuaagacaaucaccaaugaucaaauugaggugacaaacgcuaccgaacuggugcagucuagcuccacaggcgagaucugcgacucuccgcaccagauccuugauggggaaaauuguacccugauugacgcccuccugggagauccccagugcgacggcuuucaaaacaaaaagugggaucuguucgucgagagaagcaaagccuauuccaauuguuacccuuaugacgugcccgauuacgcuucucuccggagccugguugccuccagcgggacgcuugaauuuaacaaugagucuuucaacuggaccggagugacacagaauggcaccuccagcgcuugcaagcgcagaucuaacaauuccuuuuucagccggcugaacuggcucacacaucugaaguuuaaauauccugcccuuaaugucaccaugcccaacaacgagaaguucgacaaacuguacaucuggggcgugcaccauccugggacggauaaugaccagauuuuucucuaugcgcaggccucuggacgcaucacaguuuccaccaagagaagccaacagacagugauuccgaacaucggcucccggccccgcgucagaaauauuccuucucggaucagcaucuacuggaccauugugaaacccggggauauccugcugauuaacuccaccggaaaucucaucgcuccucgcggcuacuucaagauuagaagcgggaagucuuccaucaugcggagcgacgcccccaucggaaaauguaacucugaaugcauuacaccgaauggcagcaucccuaacgacaagcccuuucagaaugugaaccgcauuacguauggcgcuuguccuagauacgucaaacagaauacccugaaacuugccacagggaugcggaacguucccgagaagcaaacccgcggaaucuucggcgcgauugccggguuuaucgaaaauggaugggagggcaugguggaugggugguauggauucagacaccagaacuccgagggcaucggccaggcugccgaccugaagucuacacaagcugccauuaaucagaucaacgggaaacucaaccggcugauuggaaagaccaaugaaaaguuccaccagaucgagaaagaauuuagcgagguggaaggccgcauucaggaucuugagaaguacgucgaggacacgaaaaucgaucugugguccuauaacgccgaacuccugguggcucuggagaaucaacauacaauugaccucaccgauagcgaaaugaacaagcuguucgagagaaccaaaaagcagcuucgggaaaaugcggaggacauggggaacggaugcuuuaagaucuaccacaaaugugauaaugccugcaucggcucuauuagaaacgggacauaugaccaugauguuuaccgcgacgaggcucugaauaaccgguuccagaucaagggcguggaacucaaauccggauacaaggacuggauucuguggaucagcuuugccauuucuugcuuccuucugugugucgcccuccugggcuuuaucaugugggcuugccagaaagggaauaucagauguaacauuugcaucuga

SEQ ID NO: 203270 - RNA, 1701 nt, Artificial Sequence; identical to SEQ ID NO: 203269
  derived and/or modified CDS sequence (opt5) from hemagglutinin__InfluenzaA__AHL89222

SEQ ID NO: 203271 - RNA, 1701 nt, Artificial Sequence
  derived and/or modified CDS sequence (opt5) from hemagglutinin__InfluenzaA__AHL89234
augaagaccaucauugcccugagcuacauccucugccugguguucgcucagaaacuucccggcaacgacaauuccacagccacgcugugucucgggcaccaugcggucccuaacggaaccauuguuaagacaaucaccaaugaucaaauugaggugacaaacgcuaccgaacuggugcagucuagcuccacaggcgagaucugcgacucuccgcaccagauccuugauggggaaaauuguacccugauugacgcccuccugggagauccccagugcgacggcuuucaaaacaaaaagugggaucuguucgucgagagaagcaaagccuauuccaauuguuacccuuaugacgugcccgauuacgcuucucuccggagccugguugccuccagcgggacgcuugaauuuaacaaugagucuuucaacuggaccggagugacacagaauggcaccuccagcgcuugcaagcgcagaucuaacaauuccuuuuucagccggcugaacuggcucacacaucugaaguuuaaauauccugcccuuaaugucaccaugcccaacaacgagaaguucgacaaacuguacaucuggggcgugcaccauccugggacggauaaugaccagauuuuucucuaugcgcaggccucuggacgcaucacaguuuccaccaagagaagccaacagacagugauuccgaacaucggcucccggccccgcgucagaaauauuccuucucggaucagcaucuacuggaccauugugaaacccggggauauccugcugauuaacuccaccggaaaucucaucgcuccucgcggcuacuucaagauuagaagcgggaagucuuccaucaugcggagcgacgcccccaucggaaaauguaacucugaaugcauuacaccgaauggcagcaucccuaacgacaagcccuuucagaaugugaaccgcauuacguauggcgcuuguccuagauacgucaaacagaauacccugaaacuugccacagggaugcggaacguucccgagaagcaaacccgcggaaucuucggcgcgauugccggguuuaucgaaaauggaugggagggcaugguggaugggugguauggauucagacaccagaacuccgagggcaugggccaggcugccgaccugaagucuacacaagcugccaucaaucagauuaacgggaaacucaaccggcugaucggaaagaccaaugaaaaguuccaccagauugagaaagaauuuagcgagguggaaggcagaauccaggaucuugagaaguacgucgaggacacgaaaauugaucugugguccuauaacgccgaacuccugguggcucuggagaaucaacauacaaucgaccucaccgauagcgaaaugaacaagcuguucgagcgcaccaaaaagcagcuucgggaaaaugcggaggacauggggaacggaugcuuuaagauuuaccacaaaugugauaaugccugcaucggcucuaucagaaacgggacauaugaccaugauguuuaccgcgacgaggcucugaauaaccgguuccagauuaagggcguggaacucaaauccggauacaaggacuggauccuguggauuagcuuugccaucucuugcuuccuucugugugucgcccuccugggcuuuauuaugugggcuugccagaaagggaauaucagauguaacaucugcauuuga

SEQ ID NO: 203272 - RNA, 1701 nt, Artificial Sequence
  derived and/or modified CDS sequence (opt5) from hemagglutinin__InfluenzaA__AHL89246
augaagaccaucauugcccugagcuacauccucugccugguguucgcucagaaacuucccggcaacgacaauuccacagccacgcugugucucgggcaccaugcggucccuaacggaaccauuguuaagacaaucaccaaugaucaaauugaggugacaaacgcuaccgaacuggugcagucuagcuccacaggcgagaucugcgacucuccgcaccagauccuugauggggaaaauuguacccugauugacgcccuccugggagauccccagugcgacggcuuucaaaacaaaaagugggaucuguucgucgagagaagcaaagccuauuccaauuguuacccuuaugacgugcccgauuacgcuucucuccggagccugguugccuccagcgggacgcuugaauuuaacaaugagucuuucaacuggaccggagugacacagaauggcaccuccagcgcuugcaagcgcagaucuaacaauuccuuuuucagccggcugaacuggcucacacaucugaaguuuaaauauccugcccuuaaugucaccaugcccaacaacgagaaguucgacaaacuguacaucuggggcgugcaccauccugggacggauaaugaccagauuuuucucuaugcgcaggccucuggacgcaucacaguuuccaccaagagaagccaacagacagugauuccgaacaucggcucccggccccgcgucagaaauauuccuucucggaucagcaucuacuggaccauugugaaacccggggauauccugcugauuaacuccaccggaaaucucaucgcuccucgcggcuacuucaagauuagaagcgggaagucuuccaucaugcggagcgacgcccccaucggaaaauguaacucugaaugcauuacaccgaauggcagcaucccuaacgacaagcccuuucagaaugugaaccgcauuacguauggcgcuuguccuagauacgucaaacagaauacccugaaacuugccacagggaugcggaacguucccgagaagcaaacccgcggaaucuucggcgcgauugccggguuuaucgaaaauggaugggagggcaugguggaugggugguauggauucagacaccagaacuccgagggcaucggccaggcugccgaccugaagucuacacaagcugccauuaaucagaucaacgggaaacucaaccggcugauuggaaagaccaaugaaaaguuccaccagaucgagaaagaauuuagcgagguggaaggccgcauucaggaucuugagaaguacgucgaggacacgaaaaucgaucugugguccuauaacgccgaacuccugguggcucuggagaaucaacauacaauugaccucaccgauagcgaaaugaacaagcuguucgagagaaccaaaaagcagcuucgggaaaaugcggaggacauggggaacggaugcuuuaagaucuaccacaaauguggcaaugccugcaucgggucuauuagaaacggcacauaugaucaugacguuuaccgcgaugaggcucugaauaaccgguuccagaucaagggaguggaacucaaauccggcuacaaggacuggauucuguggaucagcuuugccauuucuugcuuccuucugugugucgcccuccugggguuuaucaugugggcuugccagaaaggaaauaucagauguaacauuugcaucuga

SEQ ID NO: 203273 - RNA, 1701 nt, Artificial Sequence
  derived and/or modified CDS sequence (opt5) from hemagglutinin__InfluenzaA__AHL89258
augaagaccaucauugcccugagcuacauccucugccugguguucgcucagaaacuucccggcaacgacaauuccacagccacgcugugucucgggcaccaugcggucccuaacggaaccauuguuaagacaaucaccaaugaucaaauugaggugacaaacgcuaccgaacuggugcagucuagcuccacaggcgagaucugcgacucuccgcaccagauccuugauggggaaaauuguacccugauugacgcccuccugggagauccccagugcgacggcuuucaaaacaaaaagugggaucuguucgucgagagaagcaaagccuauuccaauuguuacccuuaugacgugcccgauuacgcuucucuccggagccugguugccuccagcgggacgcuugaauuuaacaaugagucuuucaacuggaccggagugacacagaauggcaccuccagcgcuugcaagcgcagaucuaacaauuccuuuuucagccggcugaacuggcucacacaucugaaguuuaaauaucaggcccuuaaugucaccaugccuaacaacgagaaguucgacaaacuguacaucuggggcgugcaccaucccgggacggauaaugaccagauuuuucucuaugcgcaagccucuggacgcaucacaguuuccaccaagagaagccagcagacagugauuccuaacaucggcucccggccgcgcgucagaaauauucccucucggaucagcaucuacuggaccauugugaaaccuggggauauccugcugauuaacuccaccggaaaucucaucgcuccccgcggcuacuucaagauuagaagcgggaagucuuccaucaugcggagcgacgccccuaucggaaaauguaacucugaaugcauuacacccaauggcagcaucccgaacgacaagccuuuucagaaugugaaccgcauuacguauggcgcuugucccagauacgucaaacaaaauacccugaaacuugccacagggaugcggaacguuccugagaagcagacccgcggaaucuucggcgcgauugccggguuuaucgaaaauggaugggagggcaugguggaugggugguauggauucagacaccagaacuccgagggcaucggccaagcugccgaccugaagucuacacaggcugccauuaaucagaucaacgggaaacucaaccggcugauuggaaagaccaaugaaaaguuccaccagaucgagaaagaauuuagcgagguggaaggccgcauucaagaucuugagaaguacgucgaggacacgaaaaucgaucugugguccuauaacgccgaacuccugguggcucuggagaaucagcauacaauugaccucaccgauagcgaaaugaacaagcuguucgagagaaccaaaaagcagcuucgggaaaaugcggaggacauggggaacggaugcuuuaagaucuaccacaaaugugauaaugccugcaucggcucuauuagaaacgggacauaugaccaugauguuuaccgcgacgaggcucugaauaaccgguuccagaucaagggcguggaacucaaauccggauacaaggacuggauucuguggaucagcuuugccauuucuugcuuccuucugugugucgugcuccugggcuuuaucaugugggccugccaaaaagggaauaucagauguaacauuugcaucuga

SEQ ID NO: 203274 - RNA, 1701 nt, Artificial Sequence; identical to SEQ ID NO: 203269
  derived and/or modified CDS sequence (opt5) from hemagglutinin__InfluenzaA__AHL89270

SEQ ID NO: 203275 - RNA, 1701 nt, Artificial Sequence; identical to SEQ ID NO: 203269
  derived and/or modified CDS sequence (opt5) from hemagglutinin__InfluenzaA__AHL89282

SEQ ID NO: 203276 - RNA, 1701 nt, Artificial Sequence; identical to SEQ ID NO: 203269
  derived and/or modified CDS sequence (opt5) from hemagglutinin__InfluenzaA__AHL89294

SEQ ID NO: 203277 - RNA, 1701 nt, Artificial Sequence; identical to SEQ ID NO: 203269
  derived and/or modified CDS sequence (opt5) from hemagglutinin__InfluenzaA__AHL89306

SEQ ID NO: 203278 - RNA, 1701 nt, Artificial Sequence; identical to SEQ ID NO: 193653
  derived and/or modified CDS sequence (opt5) from hemagglutinin__InfluenzaA__AHL89318

SEQ ID NO: 203279 - RNA, 1701 nt, Artificial Sequence
  derived and/or modified CDS sequence (opt5) from hemagglutinin__InfluenzaA__AHL89330
augaagaccaucauugcccugagcuacauccucugccugguguucgcucagaaacuucccggcaacgacaauuccacagccacgcugugucucgggcaccaugcggucccuaacggaaccauuguuaagacaaucaccaaugaucaaauugaggugacaaacgcuaccgaacuggugcagucuagcuccacaggcgagaucugcgacucuccgcaccagauccuugaugggaaaaauuguacccugauugacgcccuccugggagauccccagugcgacggcuuucaaaacaagaaaugggaucuguucgucgaaagaagcaaggccuauuccaauuguuacccuuaugacgugcccgauuacgcuucucuccggagccugguugccuccagcgggacgcuugaguuuaacaaugaaucuuucaacuggaccggagugacacagaauggcaccuccagcgcuugcaagcgcagaucuaacaauuccuuuuucagccggcugaacuggcucacacaucugaaauuuaaguauccugcccuuaaugucaccaugcccaacaacgagaaauucgacaagcuguacaucuggggcgugcaccauccugggacggauaaugaccagauuuuucucuaugcgcaggccucuggacgcaucacaguuuccaccaaaagaagccaacagacagugauuccgaacaucggcucccggccccgcgucagaaauauuccuucucggaucagcaucuacuggaccauugugaagcccggggauauccugcugauuaacuccaccggaaaucucaucgcuccucgcggcuacuucaagauuagaagcgggaaaucuuccaucaugcggagcgacgcccccaucggaaaguguaacucugagugcauuacaccgaauggcagcaucccuaacgacaaacccuuucagaaugugaaccgcauuacguauggcgcuuguccuagauacgucaagcagaauacccugaaacuugccacagggaugcggaacguucccgaaaagcaaacccgcggaaucuucggcgcgauugccggguuuaucgagaauggaugggaaggcaugguggaugggugguauggauucagacaccagaacuccgagggcaucggccaggcugccgaccugaaaucuacacaagcugccauuaaucagaucaacgggaagcucaaccggcugauuggaaagaccaaugagaaauuccaccagaucgaaaaggaguuuagcgaaguggagggccgcauucaggaucuugaaaaauacgucgaggacacgaagaucgaucugugguccuauaacgccgagcuccugguggcucuggaaaaucaacauacaauugaccucaccgauagcgagaugaacaaacuguucgaaagaaccaagaagcagcuucgggagaaugcggaagacauggggaacggaugcuuuaaaaucuaccacaagugugauaaugccugcaucggcucuauuagaaacgggacauaugaccaugauguuuaccgcgacgaggcucugaauaaccgguuccagaucaaaggcguggagcucaaguccggauacaaagacuggauucuguggaucagcuuugccauuucuugcuuccuucugugugucgcccuccugggcuuuaucaugugggcuugccagaaggggaauaucagauguaacauuugcaucuga

SEQ ID NO: 203280 - RNA, 1701 nt, Artificial Sequence; identical to SEQ ID NO: 192702
  derived and/or modified CDS sequence (opt5) from hemagglutinin__InfluenzaA__AHL89342

SEQ ID NO: 203281 - RNA, 1701 nt, Artificial Sequence; identical to SEQ ID NO: 193633
  derived and/or modified CDS sequence (opt5) from hemagglutinin__InfluenzaA__AHL89354

SEQ ID NO: 203282 - RNA, 1701 nt, Artificial Sequence
  derived and/or modified CDS sequence (opt5) from hemagglutinin__InfluenzaA__AHL89366
augaagaccaucauugcccugagcuacauccucugccugguguucgcucagaaacuucccggcaacgacaauuccacagccacgcugugucucgggcaccaugcggucccuaacggaaccauuguuaagacaaucaccaaugaucaaauugaggugacaaacgcuaccgaacuggugcagucuagcuccacaggcgagaucugcgacucuccgcaccagauccuugauggggaaaauuguacccugauugacgcccuccugggagauccccagugcgacggcuuucaaaacaaaaagugggaucuguucgucgagagaagcaaagccuauuccaauuguuacccuuaugacgugcccgauuacgcuucucuccggagccugguugccuccagcgggacgcuugaauuuaacaaugagucuuucaacuggaccggagugacacagaauggcaccuccagcgcuugcaagcgcagaucuaacaauuccuuuuucagccggcugaacuggcucacacaucugaaguuuaaauauccugcccuuaaugucaccaugcccaacaacgagaaguucgacaaacuguacaucuggggcgugcaccauccugggacggauaaugaccagauuuuucucuaugcgcaggccucuggacgcaucacaguuuccaccaagagaagccaacagacagugauuccgaacaucggcucccggccccgcgucagaaauauuccuucucggaucagcaucuacuggaccauugugaaacccggggauauccugcugauuaacuccaccggaaaucucaucgcuccucgcggcuacuucaagauuagaagcgggaagucuuccaucaugaaaagcgacgcccccaucggaaaguguaacucugaaugcauuacaccgaauggcagcaucccuaacgacaaacccuuucagaaugugaaccggauuacguauggcgcuuguccucgcuacgucaagcagaauacccugaaacuugccacagggaugagaaacguucccgagaagcaaacccggggaaucuucggcgcgauugccggguuuaucgaaaauggaugggagggcaugguggaugggugguauggauuccgccaccagaacuccgagggcaucggccaggcugccgaccugaaaucuacacaagcugccauuaaucagaucaacgggaagcucaacagacugauuggaaagaccaaugaaaaauuccaccagaucgagaaggaauuuagcgagguggaaggccggauucaggaucuugagaaauacgucgaggacacgaagaucgaucugugguccuauaacgccgaacuccugguggcucuggagaaucaacauacaauugaccucaccgauagcgaaaugaacaaacuguucgagagaaccaagaagcagcuucgcgaaaaugcggaggacauggggaacggaugcuuuaaaaucuaccacaagugugauaaugccugcaucggcucuauucggaacgggacauaugaccaugauguuuacagagacgaggcucugaauaaccgcuuccagaucaaaggcauugaacucaaguccggauacaaagacuggauccuguggauuagcuuugccaucucuugcuuccuucugugugugguccuccugggcuuuaucaugugggccugccagaaggggaauauucgguguaacaucugcauuuga

SEQ ID NO: 203283 - RNA, 1701 nt, Artificial Sequence; identical to SEQ ID NO: 203269
  derived and/or modified CDS sequence (opt5) from hemagglutinin__InfluenzaA__AHL89378

SEQ ID NO: 203284 - RNA, 1701 nt, Artificial Sequence; identical to SEQ ID NO: 193900
  derived and/or modified CDS sequence (opt5) from hemagglutinin__InfluenzaA__AHL89390

SEQ ID NO: 203285 - RNA, 1701 nt, Artificial Sequence; identical to SEQ ID NO: 203269
  derived and/or modified CDS sequence (opt5) from hemagglutinin__InfluenzaA__AHL89402

SEQ ID NO: 203286 - RNA, 1701 nt, Artificial Sequence; identical to SEQ ID NO: 193653
  derived and/or modified CDS sequence (opt5) from hemagglutinin__InfluenzaA__AHL89414

SEQ ID NO: 203287 - RNA, 1701 nt, Artificial Sequence
  derived and/or modified CDS sequence (opt5) from hemagglutinin__InfluenzaA__AHL89426
augaagaccaucauugcccugagcuacauccucugccugguguucgcucagaaacuucccggcaacgacaauuccacagccacgcugugucucgggcaccaugcggucccuaacggaaccauuguuaagacaaucaccaaugaucaaauugaggugacaaacgcuaccgaacuggugcagucuagcuccacaggcgagaucugcgacucuccgcaccagauccuugauggggaaaauuguacccugauugacgcccuccugggagauccccagugcgacggcuuucaaaacaaaaagugggaucuguucgucgagagaagcaaagccuauuccaauuguuacccuuaugacgugcccgauuacgcuucucuccggagccugguugccuccagcgggacgcuugaauuuaacaaugagucuuucaacuggaccggagugacacagaauggcaccuccagcgcuugcaagcgcagaucuaacaauuccuuuuucagccggcugaacuggcucacacaucugaaguuuaaauauccugcccuuaaugucaccaugcccaacaacgagaaguucgacaaacuguacaucuggggcgugcaccauccugggacggauaaugaccagauuuuucucuaugcgcaggccucuggacgcaucacaguuuccaccaagagaagccaacagacagugauuccgaacaucggcucccggccccgcgucagaaauauuccuucucggaucagcaucuacuggaccauugugaaacccggggauauccuguucauuaacuccaccggaaaucugaucgcuccucgcggcuacuuuaagauuagaagcgggaagucuuccaucaugcggagcgacgcccccaucggaaaauguaacucugaaugcauuacaccgaauggcagcaucccuaacgacaagcccuuccagaaugugaaccgcauuacguauggcgcuuguccuagauacgucaaacagaauacccucaagcuggccacagggaugcggaacguucccgagaaacaaacccgcggaaucuuuggcgcgauugccggguucaucgaaaauggaugggagggcaugguggaugggugguauggauucagacaccagaacuccgagggcaucggccaggcugccgaccuuaagucuacacaagcugccauuaaucagaucaacgggaaacugaaccggcucauuggaaagaccaaugaaaaguuucaccagaucgagaaagaguucagcgaaguggaaggccgcauucaggaucuggagaaguacgucgaggacacgaaaaucgaucuuugguccuauaacgccgaacugcucguggcucuggagaaucaacauacaauugaccugaccgauagcgaaaugaacaagcucuuugagagaaccaaaaagcagcugcgggaaaaugcggaggacauggggaacggaugcuucaagaucuaccacaaaugugauaaugccugcaucggcucuauuagaaacgggacauaugaccaugauguuuaccgcgacgaggcucuuaauaaccgguuucagaucaagggcguggaacugaaauccggauacaaggacuggauucucuggaucagcuucgccauuucuugcuuucugcuuugugucgugcugcucggcuucaucaugugggccugccagaaagggaauaucagauguaacauuugcaucuga

SEQ ID NO: 203288 - RNA, 1701 nt, Artificial Sequence; identical to SEQ ID NO: 203269
  derived and/or modified CDS sequence (opt5) from hemagglutinin__InfluenzaA__AHL89438

SEQ ID NO: 203289 - RNA, 1701 nt, Artificial Sequence; identical to SEQ ID NO: 203269
  derived and/or modified CDS sequence (opt5) from hemagglutinin__InfluenzaA__AHL89450

SEQ ID NO: 203290 - RNA, 1701 nt, Artificial Sequence; identical to SEQ ID NO: 203269
  derived and/or modified CDS sequence (opt5) from hemagglutinin__InfluenzaA__AHL89462

SEQ ID NO: 203291 - RNA, 1701 nt, Artificial Sequence; identical to SEQ ID NO: 203269
  derived and/or modified CDS sequence (opt5) from hemagglutinin__InfluenzaA__AHL89474

SEQ ID NO: 203292 - RNA, 1701 nt, Artificial Sequence; identical to SEQ ID NO: 193900
  derived and/or modified CDS sequence (opt5) from hemagglutinin__InfluenzaA__AHL89486

SEQ ID NO: 203293 - RNA, 1701 nt, Artificial Sequence; identical to SEQ ID NO: 193653
  derived and/or modified CDS sequence (opt5) from hemagglutinin__InfluenzaA__AHL89498

SEQ ID NO: 203294 - RNA, 1701 nt, Artificial Sequence; identical to SEQ ID NO: 193653
  derived and/or modified CDS sequence (opt5) from hemagglutinin__InfluenzaA__AHL89510

SEQ ID NO: 203295 - RNA, 1701 nt, Artificial Sequence; identical to SEQ ID NO: 193653
  derived and/or modified CDS sequence (opt5) from hemagglutinin__InfluenzaA__AHL89522

SEQ ID NO: 203296 - RNA, 1701 nt, Artificial Sequence
  derived and/or modified CDS sequence (opt5) from hemagglutinin__InfluenzaA__AHL89534
augaagaccaucauugcccugagcuacauccucugccugguguucgcucagaaacuucccggcaacgacaauuccacagccacgcugugucucgggcaccaugcggucccuaacggaaccauuguuaagacaaucaccaaugaucaaauugaggugacaaacgcuaccgaacuggugcagucuagcuccacaggcgagaucugcgacucuccgcaccagauccuugauggggaaaauuguacccugauugacgcccuccugggagauccccagugcgacggcuuucaaaacaaaaagugggaucuguucgucgagagaagcaaagccuauuccaauuguuacccuuaugacgugcccgauuacgcuucucuccggagccugguugccuccagcgggacgcuugaauuuaacaaugagucuuucaacuggaccggagugacacagaauggcaccuccagcgcuugcaagcgcagaucuaacaauuccuuuuucagccggcugaacuggcucacacaucugaaguuuaaauauccugcccuuaaugucaccaugcccaacaacgagaaguucgacaaacuguacaucuggggcgugcaccauccugggacggauaaugaccagauuuuucucuaugcgcaggccucuggacgcaucacaguuuccaccaagagaagccaacagacagugauuccgaacaucggcucccggccccgcgucagaaauauuccuucucggaucagcaucuacuggaccauugugaaacccggggauauccugcugauuaacuccaccggaaaucucaucgcuccucgcggcuacuucaagauuagaagcgggaagucuuccaucaugcggagcgacgcccccaucggaaaauguaacucugaaugcauuacaccgaauggcagcaucccuaacgacaagcccuuucagaaugugaaccgcauuacguauggcgcuuguccuagauacgucaaacagaauacccugaaacuugccacagggaugcggaacguucccgagaagcaaacccgcggaaucuucggcgcgauugccggguuuaucgaaaauggaugggagggcaugguggaugggugguauggauucagacaccagaacuccgagggcaucggccaggcugccgaccugaagucuacacaagcugccauuaaucagaucaacgggaaacucaaccggcugauuggaaagaccaaugaaaaguuccaccagaucgagaaagaauuuagcgagguggaaggccgcauucaggaucuugagaaguacgucgaggacacgaaaaucgaucugugguccuauaacgccgaacuccugguggcucuggagaaucaacauacaauugaccucaccgauagcgaaaugaacaagcuguucgagagaaccaaaaagcagcuucgggaaaaugcggaggacauggggaacggaugcuuuaagaucuaccacaaaugugauaaugccugcaucggcucuauuagaaacgggacauaugaccaugauguuuaccgcgacgaggcucugaauaaccgguuccagaucaagggcauugaacucaaauccggauacaaggacuggauccuguggauuagcuuugccaucucuugcuuccuucugugugugguccuccugggcuuuaucaugugggccugccagaaagggaauauuagauguaacaucugcauuuga

SEQ ID NO: 203297 - RNA, 1698 nt, Artificial Sequence
  derived and/or modified CDS sequence (opt5) from hemagglutinin__InfluenzaA__AHL89546
augaaggugaaacugcucguccugcuuugcaccuucacagccacguacgcugacaccaucuguauuggcuaucacgccaacaauagcacagauaccguugacacagugcuggagaagaacgugaccgucacacauuccgugaaucuccuggaagauucucacaacgggaaacuuugccugcucaagggaaucgcgccccugcagcugggcaauuguagcguugcuggguggauucucggaaacccugagugcgaacugcuuaucuccaaagagucuuggagcuacauuguggaaaccccgaaucccgagaacggcacguguuauccuggguacuuugccgacuaugaggaacugagagagcaacucuccucugucagcuccuucgaacgguuugagaucuuccccaaggagagcucuuggccuaaucauaccgugacaggaguuuccgccagcugcucucacaacggcaaguccagcuuuuaccgcaaucugcuuuggcugaccggcaaaaacgggcucuaucccaaucugucuaaguccuacgcuaacaauaaagaaaaggaggugcugguccucuggggagugcaucacccuccgaacaucggcgaucagagagcccuguaccacacagaaagcgcuuauguguccgucguuucuagccauuacucccggcgcuucacccccgagauugccaaaagaccuaaggugcgggaccaggaagggcgcaucaacuauuacuggacgcuucuggagcccggagauacaauuaucuuugaggcgaauggcaaccucauugccccuagauucgcuuuugcccugagccggggguucggaucuggcaucauuaccuccaaugcucccauggacgaaugugaugccaagugccagacaccgcaaggcgcgaucaacagcucucuuccuuuucagaaugugcaccccgucaccaucggggaguguccuaaauaugugcgcagcgccaagcugagaaugguuaccggacuccggaacauucccuccauccagucucgcggccuguucggggcuauugccggauuuaucgaaggcggguggacaggaaugguggacggcugguacggcuaucaucaccagaaugagcaagggagcggauacgcugccgaucagaaauccacgcagaacgccauuaauggcaucaccaacaaggucaauagcgugaucgaaaagaugaacacacaguucaccgcuguugggaaagaguucaauaaacuggagagacggauggaaaaccucaauaagaagguggacgauggauuucuggacauuuggacauacaacgcggagcuucugguccuccuggaaaacgagcgcacccuugacuuccacgauucuaaugugaaaaaccuguaugaaaaggucaaaucccaacucaagaauaacgccaaagagaucggcaaugggugcuuugaguucuaccauaaguguaacgacgaaugcauggagagcgugaagaauggcacguaugauuaccccaaauauucugaagaguccaagcugaacagagagcggauugacggaguuaaacuggaaagcaugggcguguaccagauccucgcuauuuauuccacagucgccucuagccuggugcuucugguuucccucggggccaucucuuuuuggaugugcagcaauggaucccugcaguguagaaucugcauuuga

SEQ ID NO: 203298 - RNA, 1698 nt, Artificial Sequence; identical to SEQ ID NO: 193986
  derived and/or modified CDS sequence (opt5) from hemagglutinin__InfluenzaA__AHL89558

SEQ ID NO: 203299 - RNA, 1698 nt, Artificial Sequence; identical to SEQ ID NO: 193986
  derived and/or modified CDS sequence (opt5) from hemagglutinin__InfluenzaA__AHL89570

SEQ ID NO: 203300 - RNA, 1698 nt, Artificial Sequence; identical to SEQ ID NO: 194002
  derived and/or modified CDS sequence (opt5) from hemagglutinin__InfluenzaA__AHL89582

SEQ ID NO: 203301 - RNA, 1698 nt, Artificial Sequence; identical to SEQ ID NO: 194002
  derived and/or modified CDS sequence (opt5) from hemagglutinin__InfluenzaA__AHL89594

SEQ ID NO: 203302 - RNA, 1698 nt, Artificial Sequence; identical to SEQ ID NO: 194002
  derived and/or modified CDS sequence (opt5) from hemagglutinin__InfluenzaA__AHL89606

SEQ ID NO: 203303 - RNA, 1698 nt, Artificial Sequence; identical to SEQ ID NO: 193986
  derived and/or modified CDS sequence (opt5) from hemagglutinin__InfluenzaA__AHL89618

SEQ ID NO: 203304 - RNA, 1698 nt, Artificial Sequence; identical to SEQ ID NO: 194002
  derived and/or modified CDS sequence (opt5) from hemagglutinin__InfluenzaA__AHL89630

SEQ ID NO: 203305 - RNA, 1698 nt, Artificial Sequence
  derived and/or modified CDS sequence (opt5) from hemagglutinin__InfluenzaA__AHL89642
augaaggugaaacugcucguccugcuuugcaccuucacagccacguacgcugacaccaucuguauuggcuaucacgccaacaauagcacagauaccguugacacagugcuggagaagaacgugaccgucacacauuccgugaaucuccuggaagauaaccacaaugggaaacuuugccugcucaagggaaucgcgccccugcagcugggcaacuguucuguugcuggguggauucucggaaauccugagugcgaacugcuuaucagcaaagaguccuggucuuacauuguggaaaccccgaaccccgagaauggcacguguuauccuggguacuuugccgacuaugaggaacugagagagcaacucagcuccgucucuagcuucgaacgguuugagaucuuccccaaggaguccagcuggccuaaccauaccgugacaggaguuucugccuccugcagccacaauggcaagucuuccuuuuaccgcaaccugcuuuggcugaccggcaaaaaugggcucuaucccaaccugagcaagucuuacgcuaauaacaaagaaaaggaggugcugguccucuggggagugcaucacccuccgaacaucggcgaucagagagcccuguaccacacagaaaaugcuuauguguccgucguuagcucccauuacucucggcgcuucacccccgagauugccaaaagaccuaaggugcgggaccaggaagggcgcaucaacuauuacuggacgcuucuggagcccggagauacaauuaucuuugaggcgaauggcaaccucauugccccuagauucgcuuuugcccugagccggggguucggauccggcaucauuaccagcaaugcucccaugggcgaaugugacgccaagugccagacaccgcaaggggcgaucaacucuucccuuccuuuucagaaugugcaccccgucaccaucggagaguguccuaaauaugugcgcagcgccaagcugagaaugguuaccggccuccggaacauucccucuauccagagccgcgggcuguucggagcuauugccggcuuuaucgaagggggauggacaggcaugguggauggcugguacggguaucaucaccagaaugagcaaggauccggcuacgcugccgaccagaaaucuacgcagaacgccauuaaugggaucaccaacaaggucaauagcgugaucgaaaagaugaacacacaguucaccgcuguuggaaaagaguucaauaaacuggagagacggauggaaaaccucaacaagaagguggaugacggcuuucuggauauuuggacauacaaugcggagcuucugguccuccuggaaaacgagcgcacccuugacuuccacgacuccaaugugaaaaaccuguaugaaaaggucaaaagccaacucaagaauaacgccaaagagaucgggaauggcugcuuugaguucuaccauaaguguaacgaugaaugcauggagucugugaagaauggaacguaugacuaccccaaauauuccgaagagagcaagcugaacagagagaaaauugauggcguuaagcuggaaucuauggggguguaccagauccucgcuauuuauuccacagucgccagcucccuggugcuucugguuucucucggagccaucagcuuuuggaugugcuccaauggcucucugcagugucggaucugcauuuga

SEQ ID NO: 203306 - RNA, 1698 nt, Artificial Sequence; identical to SEQ ID NO: 194017
  derived and/or modified CDS sequence (opt5) from hemagglutinin__InfluenzaA__AHL89654

SEQ ID NO: 203307 - RNA, 1698 nt, Artificial Sequence
  derived and/or modified CDS sequence (opt5) from hemagglutinin__InfluenzaA__AHL89666
augaaggugaaacugcucguccugcuuugcaccuucacagccacguacgcugacaccaucuguauuggcuaucacgccaacaauagcacagauaccguugacacagugcuggagaagaacgugaccgucacacauuccgugaaucuccuggaagauaaccacaaugggaaacuuugccugcucaagggaaucgcgccccugcagcugggcaacuguucuguugcuggguggauucucggaaauccugagugcgaacugcuuaucagcaaagaguccuggucuuacauuguggaaaccccgaaccccgagaauggcacguguuauccuggguacuuugccgacuaugaggaacugagagagcaacucagcuccgucucuagcuucgaacgguuugagaucuuccccaaggaguccagcuggccuaaccauaccgugacaggaguuucugccuccugcagccacaauggcaagucuuccuuuuaccgcaaccugcuuuggcugaccggcaaaaaugggcucuaucccaaccugagcaagucuuacgcuaauaacaaagaaaaggaggugcugguccucuggggagugcaucacccuccgaacaucggcgaucagagagcccuguaccacacagaaaaugcuuauguguccgucguuagcucccauuacucucggcgcuucacccccgagauugccaaaagaccuaaggugcgggaccaggaagggcgcaucaacuauuacuggacgcuucuggagcccggagauacaauuaucuuugaggcgaauggcaaccucauugccccuagauucgcuuuugcccugagccggggguucggauccggcaucauuaccagcaaugcucccaugggcgaaugugacgccaagugccagacaccgcaaggggcgaucaacucuucccuuccuuuucagaaugugcaccccgucaccaucggagaguguccuaaauaugugcgcagcgccaagcugagaaugguuaccggccuccggaacauucccucuauccagagccgcgggcuguucggagcuauugccggcuuuaucgaagggggauggacaggcaugguggauggcugguacggguaucaucaccagaaugagcaaggauccggcuacgcugccgaccagaaaucuacgcagaacgccauuaaugggaucaccaacaaggucaauagcgugaucgaaaagaugaacacacaguucaccgcuguuggaaaagaguucaauaaacuggagagacggauggaaaaccucaacaagaagguggaugacggcuuucuggauauuuggacauacaaugcggagcuucugguccuccuggaaaacgagcgcacccuugacuuccacgacuccaaugugaaaaaccuguaugaaaaggucaaaagccaacucaagaauaacgccgaggagaucgggaauggcugcuuugaguucuaccauaaauguaacgaugaaugcauggaaucugugaagaauggaacguaugacuaccccaaguauuccgaggagagcaaacugaacagagaaaagauugauggcguuaaacuggagucuauggggguguaccagauccucgcuauuuauuccacagucgccagcucccuggugcuucugguuucucucggagccaucagcuuuuggaugugcuccaauggcucucugcagugucggaucugcauuuga

SEQ ID NO: 203308 - RNA, 1698 nt, Artificial Sequence
  derived and/or modified CDS sequence (opt5) from hemagglutinin__InfluenzaA__AHL89678
augaaggugaaacugcucguccugcuuugcaccuucacagccacguacgcugacaccaucuguauuggcuaucacgccaacaauagcacagauaccguugacacagugcuggagaagaacgugaccgucacacauuccgugaaucuccuggaagauucucacaacgggaaacuuugccugcucaagggaaucgcgccccugcagcugggcaauuguagcguugcuggguggauucucggaaacccugagugcgaacugcuuaucuccaaagagucuuggagcuacauuguggaaaccccgaaucccgagaacggcacguguuauccuggguacuuugccgacuaugaggaacugagagagcaacucuccucugucagcuccuucgaacgguuugagaucuuccccaaggagagcucuuggccuaaucauaccgugacaggaguuuccgccagcugcucucacaacggcaaguccagcuuuuaccgcaaucugcuuuggcugaccggcaaaaacgggcucuaucccaaucugucuaaguccuacgcuaacaauaaagaaaaggaggugcugguccucuggggagugcaucacccuccgaacaucggcgaucagagagcccuguaccacacagaaaacgcuuaugugagcgucguuuccucucauuacagccggcgcuucacccccgagauugccaaaagaccuaaggugcgggaccaggaagggcgcaucaauuauuacuggacgcuucuggagcccggagauacaauuaucuuugaggcgaacggcaaucucauugccccuagauucgcuuuugcccugucccggggguucggaagcggcaucauuaccucuaacgcucccaugggcgaaugugacgccaagugccagacaccgcaaggggcgaucaauuccagccuuccuuuucagaacgugcaccccgucaccaucggagaguguccuaaauaugugcgcucugccaagcugagaaugguuaccggccuccggaauauucccagcauccagucccgcgggcuguucggagcuauugccggcuuuaucgaagggggauggacaggcaugguggauggcugguacggguaucaucaccagaacgagcaaggaucuggcuacgcugccgaccagaaaagcacgcagaaugccauuaacgggaucaccaauaaggucaacuccgugaucgaaaagaugaauacacaguucaccgcuguuggaaaagaguucaacaaacuggagagacggauggaaaaucucaacaagaagguggaugacggcuuucuggauauuuggacauacaacgcggagcuucugguccuccuggaaaaugagcgcacccuugacuuccacgacagcaacgugaaaaaucuguaugaaaaggucaaaucucaacucaagaacaaugccaaagagaucgggaacggcugcuuugaguucuaccauaaguguaaugaugaaugcauggaguccgugaagaacggaacguaugacuaccccaaauauagcgaagagucuaagcugaaucggaaaaagauugauggcguuaaacuggaguccauggggguguaccagauccucgcuauuuauagcacagucgccuccucucuggugcuucugguuagccucggagccaucuccuuuuggaugugcucuaacggcagccugcaguguagaaucugcauuuga

SEQ ID NO: 203309 - RNA, 1698 nt, Artificial Sequence
  derived and/or modified CDS sequence (opt5) from hemagglutinin__InfluenzaA__AHL89690
augaaggugaaacugcucguccugcuuugcaccuucacagccacguacgcugacaccaucuguauuggcuaucacgccaacaauagcacagauaccguugacacagugcuggagaagaacgugaccgucacacauuccgugaaucuccuggaagauucucacaacgggaaacuuugccugcucaagggaaucgcgccccugcagcugggcaauuguagcguugcuggguggauucucggaaacccugagugcgaacugcuuaucuccaaagagucuuggagcuacauuguggaaaagccggaccccgagaauggcaccuguuauccugggcauuuugccgauuacgaggaacugagagagcaacucuccucugucagcuccuucgaacgguuugagaucuuccccaaggagagcucuuggccuaaccacacggugaccggaguuuccgccagcugcucucauaauggcaaauccagcuuuuauaagaaccugcuuuggcugacaggcaaaaaugggcucuaccccaaccugucuaaguccuaugcuaauaacaaagaaaaggaggugcugguccucuggggagugcaccacccuccgaauaucggcgaccagaaggcccuguaccauaccgaaaacgcuuacgugagcgucguuuccucucacuauagccgcaaauucacacccgagauugccaagagaccuaaagugcgggaucaggaagggcgcaucaacuacuauuggacccuucuggagcccggagacacgauuaucuuugaggcgaauggcaaccucauugccccuagauacgcuuucgcccugucccggggguuuggaagcggcaucauuaauucuaacgcucccauggauaagugugacgccaaaugccagacaccgcaaggcgcgaucaauuccagccuuccuuuccagaacgugcaucccgucaccaucggggaauguccuaaguaugugcgcucugccaaacugagaaugguuacaggacuccggaauauucccagcauccagucccgcggccuguuuggggcuauugccggauucaucgagggcggguggaccggaaugguggauggcugguacggcuaucaccaccagaacgaacaagggucuggauacgcugccgaccaaaagagcacccagaaugccauuaacggcaucacaaauaaggucaacuccgugaucgagaaaaugaauacgcaguuuaccgcuguugggaaggaguucaacaaacuggaaagacggauggagaaucucaacaagaaaguggaugacggauucauugacaucuggacauacaacgcggaacugcuuguccugcucgagaaugaacgcacccuggauuuucaugacagcaacgugaagaaucuuuaugagaaggucaaaucucagcugaagaacaaugccaaagaaauuggcaacgggugcuucgaguuuuaccacaaguguaaugaugagugcauggaauccgugaaaaacggcacauaugacuaccccaaguauagcgaggaaucuaagcucaauagagagaaaaucgauggaguuaagcuggaguccaugggcguguaccagauucuggcuaucuauagcaccgucgccuccucucucgugcugcuuguuagccugggggccaucuccuucuggaugugcucuaacggaagccuccagugucggauuugcaucuga

SEQ ID NO: 203310 - RNA, 1698 nt, Artificial Sequence; identical to SEQ ID NO: 194017
  derived and/or modified CDS sequence (opt5) from hemagglutinin__InfluenzaA__AHL89702

SEQ ID NO: 203311 - RNA, 1698 nt, Artificial Sequence; identical to SEQ ID NO: 193986
  derived and/or modified CDS sequence (opt5) from hemagglutinin__InfluenzaA__AHL89714

SEQ ID NO: 203312 - RNA, 1698 nt, Artificial Sequence
  derived and/or modified CDS sequence (opt5) from hemagglutinin__InfluenzaA__AHL89726
augaaggugaaacugcucguccugcuuugcaccuucacagccacguacgcugacaccaucuguauuggcuaucacgccaacaauagcacagauaccguugacacagugcuggagaagaacgugaccgucacacauuccgugaaucuccuggaagauucucacaacgggaaacuuugccugcucaagggaaucgcgccccugcagcugggcaauuguagcguugcuggguggauucucggaaacccugagugcgaacugcuuaucuccaaagagucuuggagcuacauuguggaaaccccgaaucccgagaacggcacguguuauccuggguacuuugccgacuaugaggaacugagagagcaacucuccucugucagcuccuucgaacgguuugagaucuuccccaaggagagcucuuggccuaaucauaccgugacaggaguuuccgccagcugcucucacaacggcaaguccagcuuuuaccgcaaucugcuuuggcugaccggcaaaaacgggcucuaucccaaucugucuaaguccuacgcuaacaauaaagaaaaggaggugcugguccucuggggagugcaucacccuccgaacaucggcgaucagaaagcccuguaccacacagaaaacgcuuaugugagcgucguuuccucucauuacagcagacgguucacccccgagauugccaagcgcccuaaggugagagaccaggaagggcggaucaauuauuacuggacgcuucuggagcccggagauacaauuaucuuugaggcgaacggcaaucucauugccccucgcuucgcuuuugcccuguccagaggguucggaagcggcaucauuaccucuaacgcucccauggacgaaugugaugccaaaugccagacaccgcaaggcgcgaucaauuccagccuuccuuuucagaacgugcaccccgucaccaucggggaguguccuaaguaugugcggucuaccaaacugcgcaugguuacaggacucagaaauauucccagcauccagucccggggccuguucggggccauugcuggauuuaucgaaggcggguggacgggaaugguggacggcugguacggcuaucaucaccagaacgagcaagggucuggauacgccgcugaucaaaagagcacccagaaugccauuaacggcaucacaaauaaagucaacuccgugaucgaaaagaugaauacccaguucacagccguugggaaagaguucaacaagcuggagcgcagaauggaaaaucucaacaagaaaguggacgauggauuucuggacauuuggaccuacaacgcugagcuucugguccuccuggaaaaugagcggacgcuugacuuccacgauagcaacgugaagaaucuguaugaaaaagucaagucucagcucaaaaacaaugcgaaggagaucggcaacgggugcuuugaguucuaccauaaguguaaugacgaaugcauggaguccgugaaaaacggcacauaugauuaccccaaguauagcgaagagucuaaacugaaucgcgagaagauugacggaguuaaacuggaauccaugggcguguaccagauccucgccauuuauagcaccgucgcuuccucucuggugcuucugguuagccucggggccaucuccuuuuggaugugcucuaacggaagccugcaguguagaaucugcauuuga

SEQ ID NO: 203313 - RNA, 1698 nt, Artificial Sequence
  derived and/or modified CDS sequence (opt5) from hemagglutinin__InfluenzaA__AHL89750
augaaggugaaacugcucguccugcuuugcaccuucacagccacguacgcugacaccaucuguauuggcuaucacgccaacaauagcacagauaccguugacacagugcuggagaagaacgugaccgucacacauuccgugaaucuccuggaagauucucacaacgggaaacuuugccugcucaagggaaucgcgccccugcagcugggcaauuguagcguugcuggguggauucucggaaacccugagugcgaacugcuuaucuccaaagagucuuggagcuacauuguggaaaccccgaaucccgagaacggcacguguuauccuggguacuuugccgacuaugaggaacugagagagcaacucuccucugucagcuccuucgaacgguuugagaucuuccccaaggagagcucuuggccuaaucauaccgugacaggaguuuccgccagcugcucucacaacggcaaguccagcuuuuaccgcaaucugcuuuggcugaccggcaaaaacgggcucuaucccaaucugucuaaguccuacgcuaacaauaaagaaaaggaggugcugguccucuggggagugcaucacccuccgaacaucggcgaucagagagcccuguaccacacagaaaacgcuuaugugagcgucguuuccucucauuacagccggcgcuucacccccgagauugccaaaagaccuaaggugcgggaccaggaagggcgcaucaauuauuacuggacgcuucuggagcccggagauacaauuaucuuugaggcgaacggcaaucucauugccccuagauucgcuuuugcccugucccggggguucggaagcggcaucauuaccucuaacgcucccauggacggcugugaugccaagugccagacaccgcaaggggcgaucaauuccagccuuccuuuucagaacgugcaccccgucaccaucggagaauguccuaaauaugugcgcucuaccaagcugagaaugguuacaggccuccggaauauucccagcauccagucccgcgggcuguucggagccauugcuggcuuuaucgaagggggauggacgggcaugguggacggcugguacggguaucaucaccagaacgaacaaggaucuggcuacgccgcugaucagaaaagcacccagaaugccauuaacgggaucacaaauaaggucaacuccgugaucgagaaaaugaauacccaguucacagccguuggaaaggaguucaacaaacuggagagacggauggagaaucucaacaagaagguggacgauggcuuucuggacauuuggaccuacaacgcugaacuucugguccuccuggagaaugaacgcacgcuugacuuccacgauagcaacgugaaaaaucuguaugagaaggucaaaucucaacucaagaacaaugcgaaagaaaucgggaacggcugcuuugaguucuaccauaaguguaaugacgagugcauggaauccgugaagaacggaacauaugauuaccccaaauauagcgaggaaucuaagcugaauagagagaaaauugacggcguuaagcuggaguccauggggguguaccagauccucgccauuuauagcaccgucgcuuccucucuggugcuucugguuagccucggagccaucuccuuuuggaugugcucuaacggcagccugcagugucggaucugcauuuga

SEQ ID NO: 203314 - RNA, 1698 nt, Artificial Sequence; identical to SEQ ID NO: 193982
  derived and/or modified CDS sequence (opt5) from hemagglutinin__InfluenzaA__AHL89762

SEQ ID NO: 203315 - RNA, 1698 nt, Artificial Sequence; identical to SEQ ID NO: 194028
  derived and/or modified CDS sequence (opt5) from hemagglutinin__InfluenzaA__AHL89774

SEQ ID NO: 203316 - RNA, 1698 nt, Artificial Sequence; identical to SEQ ID NO: 194017
  derived and/or modified CDS sequence (opt5) from hemagglutinin__InfluenzaA__AHL89786

SEQ ID NO: 203317 - RNA, 1698 nt, Artificial Sequence
  derived and/or modified CDS sequence (opt5) from hemagglutinin__InfluenzaA__AHL89798
augaaggugaaacugcucguccugcuuugcaccuucacagccacguacgcugacaccaucuguauuggcuaucacgccaacaauagcacagauaccguugacacagugcuggagaagaacgugaccgucacacauuccgugaaucuccuggaagauagacacaacgggaaacuuugccugcucaagggaaucgcgccccugcagcugggcaauuguucuguugcuggguggauucucggaaacccugagugcgaacugcuuaucagcaaagaguccuggucuuacauuguggaaaccccgaaucccgagaacggcacguguuauccuggguacuuugccgacuaugaggaacugcgggagcaacucagcuccgucucuagcuucgaacgcuuugagaucuuccccaaggaguccagcuggccuaaucauaccgugacaggaguuucugccuccugcagccacaacggcaagucuuccuuuuacagaaaucugcuuuggcugaccggcaaaaacgggcucuaucccaaucugagccggucuuacgcuaacaauaaggaaaaagaggugcugguccucuggggagugcaucacccuccguccaucggcgaucagcgcgcccuguaccacacagaaaacgcuuaugugagcgucguuuccucucauuacagcagacgguucacccccgagauugccaagcgcccuaaagugagagaccaggaagggcggaucaacuauuacuggacgcuucuggagcccggagauacaauuaucuuugaggcgaauggcaaccucauugccccucgcuucgcuuuugcccuguccagaggguucggaagcggcaucauuaccucuaaugcucccauggacgaaugugaugccaagugccagacaccgcaaggcgcgaucaacuccagccuuccuuuucagaaugugcaccccgucaccaucggggaguguccuaaguaugugcggucugccaaacugcgcaugguuaccggacucagaaacauucccagcauccagucccggggccuguucggggcuauugccggauuuaucgaaggcggguggacaggaaugguggacggcugguacggcuaucaucaccagaaugagcaagggucuggauacgcugccgaucaaaagagcacgcagaacgccauuaauggcaucaccaacaaagucaauuccgugaucgaaaagaugaacacacaguucaccgcuguugggaaagaguucaauaagcuggagcgcagaauggaaaaccucaauaaaaagguggacgauggauuucuggacauuuggacauacaacgcggagcuucugguccuccuggaaaacgagcggacccuugacuuccacgauagcaaugugaagaaccuguaugaaaaagucaagucucagcucaaaaauaacgccaaggagaucggcaaugggugcuuugaguucuaccauaaauguaacgacgaaugcauggaguccgugaagaauggcacguaugauuaccccaaguauagcgaagagucuaaacugaacagagagaagauugacggaguuaaacuggaauccaugggcguguaccagauccucgcuauuuauagcacagucgccuccucucuggugcuucugguuagccucggggccaucuccuuuuggaugugcucuaauggaagccugcagugucgcaucugcauuuga

SEQ ID NO: 203318 - RNA, 1698 nt, Artificial Sequence
  derived and/or modified CDS sequence (opt5) from hemagglutinin__InfluenzaA__AHL89810
augaaggugaaacugcucguccugcuuugcaccuucacagccacguacgcugacaccaucuguauuggcuaucacgccaacaauagcacagauaccguugacacagugcuggagaagaacgugaccgucacacauuccgugaaucuccuggaagauucucacaacgggaaacuuugccugcucaagggaaucgcgccccugcagcugggcaauuguagcguugcuggguggauucucggaaacccugagugcgaacugcuuaucuccaaagagucuuggagcuacauuguggaaaccccgaaucccgagaacggcacguguuauccuggguacuuugccgacuaugaggaacugagagagcaacucuccucugucagcuccuucgaacgguuugagaucuuccccaaggagagcucuuggccuaaucauaccgugacaggaguuuccgccagcugcucucacaacggcaaguccagcuuuuaccgcaaucugcuuuggcugaccggcaaaaacgggcucuaucccaaucugucuaaguccuacgcuaacaauaaagaaaaggaggugcugguccucuggggagugcaucacccuccgaacaucggcgaucagagagcccuguaccacacagaaaacgcuuaugugagcgucguuuccucucauuacagccggcgcuucacccccgagauugccaaaagaccuaaggugcgggaccaggaagggcgcaucaauuauuacuggacgcuucuggagcccggagauacaauuaucuuugaggcgaacggcaaucucauugccccuagauucgcuuuugcccugucccggggguucggaagcggcaucauuaccucuaacgcucccaugggcgaaugugacgccgagugccagacaccgcaaggggcgaucaauuccagccuuccuuuucagaacgugcaccccgucaccaucggagaauguccuaaguaugugcgcucugccaaacugagaaugguuaccggccuccggaauauucccagcauccagucccgcgggcuguucggagcuauugccggcuuuaucgaagggggauggacaggcaugguggauggcugguacggguaucaucaccagaacgaacaaggaucuggcuacgcugccgaccaaaagagcacgcagaaugccauuaacgggaucaccaauaaagucaacuccgugaucgagaagaugaauacacaguucaccgcuguuggaaaagaguucaacaagcuggaaagacggauggagaaucucaacaaaaagguggaugacggcuuucuggauauuuggacauacaacgcggaacuucugguccuccuggagaaugaacgcacccuugacuuccacgacagcaacgugaagaaucuguaugagaaagucaagucucagcucaaaaacaaugccaaggagaucgggaacggcugcuuugaguucuaccauaaauguaaugaugagugcauggaauccgugaagaacggaacguaugacuaccccaaguauagcgaggagucuaaacugaauagagaaaagauugauggcguuaaacuggaguccauggggguguaccagauccucgcuauuuauagcacagucgccuccucucuggugcuucugguuagccucggagccaucuccuuuuggaugugcucuaacggcagccugcagugucggaucugcauuuga

SEQ ID NO: 203319 - RNA, 1698 nt, Artificial Sequence
  derived and/or modified CDS sequence (opt5) from hemagglutinin__InfluenzaA__AHL89822
augaaggugaaacugcucguccugcuuugcaccuucacagccacguacgcugacaccaucuguauuggcuaucacgccaacaauagcacagauaccguugacacagugcuggagaagaacgugaccgucacacauuccgugaaucuccuggaagauagacacaacgggaaacuuugccugcucaagggaaucgcgccccugcagcugggcaauuguucuguugcuggguggauucucggaaacccugagugcgaacugcuuaucagcaaagaguccuggucuuacauuguggaaaccccgaaucccgagaacggcacguguuauccuggguacuuugccgacuaugaggaacugcgggagcaacucagcuccgucucuagcuucgaacgcuuugagaucuuccccaaggaguccagcuggccuaaucauaccgugacaggaguuucugccuccugcagccacaacggcaagucuuccuuuuacagaaaucugcuuuggcugaccggcaaaaacgggcucuaucccaaucugagcaagucuuacgcuaacaauaaagaaaaggaggugcugguccucuggggagugcaucacccuccgaacaucggcgaucagcgggcccuguaccacacagaaaacgcuuauguguccgucguuagcucccauuacucucgcagauucacccccgagauugccaaacggccuaaggugcgcgaccaggaagggagaaucaauuauuacuggacgcuucuggagcccggagauacaauuaucuuugaggcgaacggcaaucucauugccccucgguucgcuuuugcccugagccgcggguucggauccggcaucauuaccagcaacgcucccauggacgaaugugaugccaagugccagacaccgcaaggcgcgaucaauucuucccuuccuuuucagaacgugcaccccgucaccaucggggaguguccuaaauaugugagaagcgccaagcugcggaugguuaccggacuccgcaauauucccucuauccagagcagaggccuguucggggcuauugccggauuuaucgaaggcggguggacaggaaugguggacggcugguacggcuaucaucaccagaacgagcaaggguccggauacgcugccgaucagaaaucuacgcagaaugccauuaacggcaucaccaauaaggucaacagcgugaucgaaaagaugaauacacaguucaccgcuguugggaaagaguucaacaaacuggagcggcgcauggaaaaucucaacaagaagguggacgauggauuucuggacauuuggacauacaacgcggagcuucugguccuccuggaaaaugagagaacccuugacuuccacgauuccaacgugaaaaaucuguaugaaaaggucaaaagccaacucaagaacaaugccaaagagaucggcaacgggugcuuugaguucuaccauaaguguaaugacgaaugcauggagucugugaagaacggcacguaugauuaccccaaauauuccgaagagagcaagcugaaucgggagaaaauugacggaguuaagcuggaaucuaugggcguguaccagauccucgcuauuuauuccacagucgccagcucccuggugcuucugguuucucucggggccaucagcuuuuggaugugcuccaacggaucucugcaguguagaaucugcauuuga

SEQ ID NO: 203320 - RNA, 1698 nt, Artificial Sequence
  derived and/or modified CDS sequence (opt5) from hemagglutinin__InfluenzaA__AHL89834
augaaggugaaacugcucguccugcuuugcaccuucacagccacguacgcugacaccaucuguauuggcuaucacgccaacaauagcacagauaccguugacacagugcuggagaagaacgugaccgucacacauuccgugaaucuccuggaagauucucacaacgggaaacuuugccugcucaagggaaucgcgccccugcagcugggcaauuguagcguugcuggguggauucucggaaacccugagugcgaacugcuuaucuccaaagagucuuggagcuacauuguggaaaccccgaaucccgagaacggcacguguuauccugggaauuuugccgacuacgaggaacugagagagcaacucuccucugucagcuccuucgaacgguuugagaucuuccccaaggagagcucuuggccuaaccauaccgugacaggaguuuccgccagcugcucucacaauggcaaguccagcuuuuaucgcaaccugcuuuggcugaccggcaaaaaugggcucuaccccaaccugucuaaguccuaugcuaauaacaaagaaaaggaggugcugguccucuggggagugcaucacccuccgaacaucggcgaucagagagcccuguaccacacagaaaaugcuuacgugagcgucguuuccucucauuauagccggcgcuucacccccgagauugccaaaagaccuaaggugcgggaccaggaagggcgcaucaacuacuauuggacgcuucuggagcccggagauacaauuaucuuugaggcgaauggcaaccucauugccccuagauucgcuuuugcccugucccggggguucggaagcggcaucauuaccucuaaugcucccauggacgaaugugaugccaagugccagacaccgcaaggcgcgaucaacuccagccuuccuuuucagaaugugcaccccgucaccaucggggaguguccuaaauacgugcgcucugccaagcugagaaugguuaccggacuccggaacauucccagcauccagucccgcggccuguucggggcuauugccggauuuaucgaaggcggguggacaggaaugguggacggcugguauggcuaccaucaccagaaugagcaagggucuggauaugcugccgaucagaaaagcacgcagaacgccauuaauggcaucaccaacaaggucaauuccgugaucgaaaagaugaacacacaguucaccgcuguugggaaagaguucaauaaacuggagagacggauggaaaaccucaacaagaagguggacgauggauuucuggacauuuggacauacaaugcggagcuucugguccuccuggaaaacgagcgcacccuugacuuccacgauagcaaugugaaaaaccuguacgaaaaggucaaaucucaacucaagaauaacgccaaagagaucggcgacgggugcuuugaguucuaucauaaguguaaugaugaaugcauggaguccgugaagaacggcacguacgacuaucccaaauacagcgaagagucuaagcugaauagagagaaaauugauggaguuaagcuggaauccaugggcguguaucagauccucgcuauuuacagcacagucgccuccucucuggugcuucugguuagccucggggccaucuccuuuuggaugugcucuaacggaagccugcagugucggaucugcauuuga

SEQ ID NO: 203321 - RNA, 1698 nt, Artificial Sequence; identical to SEQ ID NO: 194028
  derived and/or modified CDS sequence (opt5) from hemagglutinin__InfluenzaA__AHL89846

SEQ ID NO: 203322 - RNA, 1701 nt, Artificial Sequence; identical to SEQ ID NO: 194000
  derived and/or modified CDS sequence (opt5) from hemagglutinin__InfluenzaA__AHL89858

SEQ ID NO: 203323 - RNA, 1701 nt, Artificial Sequence; identical to SEQ ID NO: 194000
  derived and/or modified CDS sequence (opt5) from hemagglutinin__InfluenzaA__AHL89870

SEQ ID NO: 203324 - RNA, 1701 nt, Artificial Sequence
  derived and/or modified CDS sequence (opt5) from hemagglutinin__InfluenzaA__AHL89882
augaagaccaucauugcccugagcuacauccucugccugguguucgcucagaaacuucccggcaacgacaauuccacagccacgcugugucucgggcaccaugcggucccuaacggaaccauuguuaagacaaucaccaaugaucaaauugaggugacaaacgcuaccgaacuggugcagucuagcuccacaggcgggaucugcgacucuccgcaccagauccuugauggagagaauuguacccugauugacgcccuccugggcgauccccagugcgacggguuucaaaacaaaaagugggaucuguucgucgaaagaagcaaagccuauuccaauuguuacccuuaugacgugcccgauuacgcuucucuccggagccugguugccuccagcggaacgcuugaguuuaacaaugaaucuuucaacuggaccggcgugacacagaauggcaccuccagcgcuugcaagcgcgggucugacaacuccuuuuucagcagacugaauuggcucacacaucugaaguuuaaauauccugcccuuaacgucaccaugcccaauaacgagaaguucgauaaacuguacaucuggggagugcaccauccuggcacggacaacgaucagauuuuucucuaugcgcaggccucugggcggaucacaguuuccaccaagcgcagccaacagacagugauuccgaauaucggauccagaccccggguccgcaacauuccuucuagaaucagcaucuacuggaccauugugaaacccggcgacauccugcugauuaauuccaccgggaaccucaucgcuccucggggauacuucaagauucgcagcggcaagucuuccaucaugagaagcgacgcccccaucggcaaauguaauucugagugcauuacaccgaacgggagcaucccuaaugauaagcccuuucagaacgugaaucggauuacguauggagcuuguccucgcuacgucaaacagaacacccugaaacuugccacaggcaugagaaauguucccgaaaagcaaacccgggggaucuucggagcgauugccggcuuuaucgagaacgggugggaaggaaugguggacggcugguauggcuuccgccaccaaaauuccgaggggaucggacaggcugccgaucugaagucuacacaggcugccauuaaccagaucaauggcaaacucaacagacugauugggaagaccaacgagaaguuccaccagaucgaaaaagaguuuagcgaaguggagggacggauucaggaccuugaaaaguacgucgaggauacgaaaaucgaccugugguccuauaaugccgagcuccugguggcucuggaaaaccaacauacaauugaucucaccgacagcgagaugaauaagcuguucgaaagaaccaaaaagcagcuucgcgagaacgcggaagauaugggcaaugggugcuuuaagaucuaccacaaaugugacaacgccugcaucggcucuauucggaauggaacauaugaucaugacguuuacagagacgaggcucugaacaaucgcuuccagaucaagggcguggagcucaaauccggguacaaggauuggauucuguggaucagcuuugccauuucuugcuuccuucugugugucgcccuccugggauuuaucaugugggcuugccagaaaggcaacauccgguguaauauuugcaucuga

SEQ ID NO: 203325 - RNA, 1701 nt, Artificial Sequence; identical to SEQ ID NO: 194000
  derived and/or modified CDS sequence (opt5) from hemagglutinin__InfluenzaA__AHL89894

SEQ ID NO: 203326 - RNA, 1701 nt, Artificial Sequence
  derived and/or modified CDS sequence (opt5) from hemagglutinin__InfluenzaA__AHL89906
augaagaccaucauugcccugagcuacauccucugccugguguaugcucagaaacuucccggcauugacaacuccacagccacgcugugucucgggcaccaugcggucccuaauggaaccaucguuaagacaauuaccaacgaucaaaucgaggugacaaaugcuaccgaacuggugcagucuagcuccacaggcgagaucugcgacucuccgcaccagauucuugauggggaaaacuguacccugaucgacgcccuccugggagauccccagugcgacggcuuccaaaauaaaaagugggaucuguuugucgagagaagcaaagccuacuccaacuguuauccuuacgacgugcccgauuaugcuucucuccggagccugguugccuccagcgggacgcuugaguucaauaacgaaucuuuuaauugggcuggagugacccagaacggcacauccagcgccugcaagcgcggcucuaauaacuccuucuuuagcagacugaauuggcucacccauucuaaguucaaauacccugcgcugaacgucacaaugcccaauaacgaggaauuugacaaacuuuauauuuggggagugcaccauccugggaccgauaacgaccagaucuuccuguacgcccaggcuuccggccggauuacgguuagcacaaaacgcucccaacagaccgugaucccgaauauugggucuagaccccggguccgcaacaucccuagcagaaucuccauuuacuggacaaucgugaagcccggagauauucuccugaucaauagcaccggcaaccugauugccccucggggguauuuuaaaauccgcucuggaaaguccagcaucaugagaucugacgcucccauuggcaaguguaauagcgagugcaucaccccgaacggcuccauuccuaaugacaaacccuuccagaacgugaaucggaucacauacggggccuguccucgcuaugucagacagaacacgcucaagcuggcgaccggaaugcggaauguucccgaaaaacaaacacgcggcauuuuuggggccaucgcuggauucaucgagaacggcugggaggggaugguggauggaugguacggcuuuagacaccagaauagcgaaggcauugggcaggccgcugaccuuaagagcacccaagccgccaucgaucagauuaacggaaaacugaaucggcucaucggcaagacaaacgagaaauuccaccagauugaaaaggaguucuccgaaguggaggggagaauccaggaccuggagaaguaugucgaagauaccaaaauugaccuuuggagcuacaacgcugagcugcucguggcgcuggaaaaucaacauacgaucgaucugacagacucugagaugaacaagcucuuugaaaagaccaagaaacagcugcgcgagaaugccgaggauaugggaaacggcugcuucaagaucuaucacaagugugacaaugcuugcauuggguccauccggaacggcaccuacgaucaugacguuuacagagacgaagcccuuaauaaccgcuuucagauuaaaggaguggagcugaagucuggcuauaaagauuggauccucuggauuucuuucgccaucuccugcuuucugcuuugugucgcucugcucggguucaucaugugggccugccagaagggaaauauucgguguaacaucugcauuuga

SEQ ID NO: 203327 - RNA, 1701 nt, Artificial Sequence
  derived and/or modified CDS sequence (opt5) from hemagglutinin__InfluenzaA__AHL89918
augaagaccaucauugcccugagcuacauccucugccugguguucgcucagaaacuucccggcaacgacaauuccacagccacgcugugucucgggcaccaugcggucccuaacggaaccauuguuaagacaaucaccaaugaucaaauugaggugacaaacgcuaccgaacuggugcagucuagcuccacaggcgagaucugcgacucuccgcaccagauccuugauggggaaaauuguacccugauugacgcccuccugggagauccccagugcgacggcuuucaaaacaaaaagugggaucuguucgucgagagaagcaaagccuauuccaauuguuacccuuaugacgugcccgauuacgcuucucuccggagccugguugccuccagcgggacgcuugaauuuaacaaugagucuuucaacuggaccggagugacacagaauggcaccuccagcgcuugcauccgcagaucuaacaauuccuuuuucagccggcugaacuggcucacacaucugaaguuuaaguauccugcccuuaaugucaccaugcccaacaacgagaaauucgacaagcuguacauuuggggcgugcaccauccugggacggauaaugaccagacauuucucuaugcgcaggccucuggacgcaucaccguuuccacaaaaagaagccaacagaccgugauuccgaacaucggcucccggccccgcgucagaaauauuccuucucggaucagcaucuacuggaccauugugaagcccggggauauccugcugauuaacuccacaggaaaucucaucgcuccucgcggcuacuucaaaauucagagcgggaagucuuccaucaugagaagcgacgcccccaucggaaaguguaacucugaaugcauuacgccgaauggcagcaucccuaacgacaaacccuuucagaaugugaaccggauuaccuauggcgcuuguccucgcuacgucaagcaaaauacacugaaacuugccaccgggaugagaaacguucccgagaagcagacacggggaaucuucggcgcgauugccggguuuaucgaaaauggaugggagggcaugguggaugggugguauggauuccgccaccagaacuccgagggcaucggccaagcugccgaccugaaaucuacccaggcugccauugaucagaucaaugggaagcucaacagacugauuggaaaaacgaacgaaaaguuccaccagaucgagaaggaauuuagcgagguggaaggccggauucaagaccuugagaaauacgucgaggauacaaagaucgaccugugguccuauaaugccgaacuccugguggcucuggagaaccagcauaccauugaucucaccgacagcgaaaugaauaaacuguucgagaagaccaaaaagcagcuuagagaaaacgcggaggauauggggaauggaugcuuuaagaucuaccacaaaugugacaacgccugcaucggcucuauucgcaaugggacauaugaucaugacguuuaccgggacgaggcucugaacaauagauuccagaucaagggcguggaacucaaauccggauacaaggauuggauucuguggaucagcuuugccauuucuugcuuccuucugugugucgcccuccugggcuuuaucaugugggcuugccaaaaagggaacauccgcuguaauauuugcaucuga

SEQ ID NO: 203328 - RNA, 1701 nt, Artificial Sequence
  derived and/or modified CDS sequence (opt5) from hemagglutinin__InfluenzaA__AHL89930
augaagaccaucauugcccugagcuacauccucugccugguguucgcucagaaacuucccggcauugacaacuccacagccacgcugugucucgggcaccaugcggucccuaauggaaccaucguuaagacaauuaccaacgaucaaaucgaggugacaaaugcuaccgaacuggugcagucuagcuccacaggcgggaucugcgacucuccgcaccagauucuugauggagagaacuguacccugaucgacgcccuccugggcgauccccagugcgacggguuucaaaauaaaaagugggaucuguucgucgaaagaagcaaagccuauuccaacuguuacccuuaugacgugcccgauuacgcuucucuccggagccugguugccuccagcggaacgcuugaguuuaauaacgaaucuuucaauugggcuggcgugacccagaacggcacauccagcgccugcaagcgcgggucuaauaacuccuuuuucagcagacugaauuggcucacccauucuaaguuuaaauauccugcgcugaacgucacaaugcccaauaacgaggaguucgacaaacuuuacauuuggggagugcaccauccuggcaccgauaacgaccagaucuuucuguaugcccaggcuuccgggcggauuacgguuagcacaaagcgcucccaacagaccgugaucccgaauauuggaucuagaccccggguccgcaacaucccuagcagaaucuccauuuacuggacaaucgugaagcccggcgauauucuccugaucaauagcaccgggaaccugauugccccucggggauacuucaaaauccgcucuggcaaguccagcaucaugagaucugacgcucccauuagcaaguguaauuccgaaugcaucaccccgaacggcucuauuccuaaugacaaacccuuucagaacgugaaucggaucacauauggggccuguccucgcuacgucaagcagaacacgcucaaacuggcgaccggaaugagaaauguucccgagaagcaaacacggggcauuuucggggccaucgcuggauuuaucgaaaacggcugggaggggaugguggauggaugguauggcuuccgccaccagaauagcgagggcauggggcaggccgcugaccuuaaauccacccaagccgccauugaucagaucaacggaaagcugaauagacucauuggcaaaacaaacgaaaaguuccaccagaucgagaaggaauuuagcgagguggaagggcggauucaggaccuggagaaauacgucgaggauaccaagaucgaccuuuggucuuauaacgcugaacugcucguggcgcuggagaaucaacauacgauugaucugacagacuccgaaaugaacaaacucuucgagaagaccaaaaagcagcugagagaaaaugccgaggauaugggaaacggcugcuuuaagaucuaccacaaaugugacaaugcuugcaucgggagcauucgcaacggcaccuaugaucaugacguuuaccgggacgaggcccuuaauaacagauuccagaucaagggaguggaacugaaaucuggcuacaaggauuggauucucuggaucuccuuugccauuagcugcuuccugcuuugugucgcucugcucggguuuaucaugugggccugccagaaaggaaauauccgcuguaacauuugcaucuga

SEQ ID NO: 203329 - RNA, 1701 nt, Artificial Sequence; identical to SEQ ID NO: 193987
  derived and/or modified CDS sequence (opt5) from hemagglutinin__InfluenzaA__AHL89942

SEQ ID NO: 203330 - RNA, 1701 nt, Artificial Sequence
  derived and/or modified CDS sequence (opt5) from hemagglutinin__InfluenzaA__AHL89954
augaagaccaucauugcccugagcuacauccucugccugguguucgcucagaaacuucccggcaacgacaauuccacagccacgcugugucucgggcaccaugcggucccuaacggaaccauuguuaagacaaucaccaaugaucaaauugaggugacaaacgcuaccgaacuggugcagucuagcuccacaggcgagaucugcgacucuccgcaccagauccuugauggggaaaauuguacccugauugacgcccuccugggagauccccagugcgacggcuuucaaaacaaaaagugggaucuguucgucgagagaagcaaagccuauuccaauuguuacccuuaugacgugcccgaucaugcuucucuccggagccugguugccuccagcgggacgcuugaauuuaacaaugagucuuucaacuggaccggagugacacagaauggcaccuccagcgcuugcauccgcagaucuaacaauuccuuuuucagccggcugaacuggcucacacaccugaaguuuaaguacccugcccuuaaugucaccaugcccaacaacgagaaauucgacaagcuguauauuuggggcgugcaucacccugggacggauaaugaccagaucuuucucuacgcgcaggccucuggacgcauuacaguuuccaccaaaagaagccaacagacagugaucccgaacauuggcucccggccccgcgucagaaauaucccuucucggaucagcauuuauuggaccaucgugaagcccggggauauucugcugaucaacuccaccggaaaucucauugcuccucgcggcuacuucaaaaucagaagcgggaagucuuccaucaugcggagcgacgcccccauuggaaaguguaacucugaaugcaucacaccgaauggcagcauuccuaacgacaaacccuuucagaaugugaaccgcaucacguacggcgcuuguccuagauaugucaagcagaauacccugaaacuugccacagggaugcggaacguucccgagaagcaaacccgcggaauuuucggcgcgaucgccggguuuaucgaaaauggaugggagggcaugguggaugggugguacggauucagacaccagaacuccgagggcauuggccaggcugccgaccugaaaucuacacaagcugccaucgaucagauuaaugggaagcucaaccggcugaucggaaaaaccaacgaaaaguuccaucagauugagaaggaauuuagcgagguggaaggcagaauccaggaccuugagaaauaugucgaggauacgaagauugaccugugguccuacaaugccgaacuccugguggcucuggagaaccaacacacaaucgaucucaccgacagcgaaaugaauaaacuguucgagaagaccaaaaagcagcuucgcgaaaacgcggaggauauggggaauggaugcuuuaagaucuaucauaaaugugacaacgccugcauuggcucuauccggaaugggacauacgaucacgacguuuauagagacgaggcucugaacaaucgcuuccagauuaagggcguggaacucaaauccggauacaaggauuggauccuguggauuagcuuugccaucucuugcuuccuucugugugucgcccuccugggcuuuaucaugugggcuugccagaaagggaacauucgguguaauaucugcauuuga

SEQ ID NO: 203331 - RNA, 1701 nt, Artificial Sequence; identical to SEQ ID NO: 194000
  derived and/or modified CDS sequence (opt5) from hemagglutinin__InfluenzaA__AHL89966

SEQ ID NO: 203332 - RNA, 1701 nt, Artificial Sequence; identical to SEQ ID NO: 194000
  derived and/or modified CDS sequence (opt5) from hemagglutinin__InfluenzaA__AHL89978

SEQ ID NO: 203333 - RNA, 1701 nt, Artificial Sequence; identical to SEQ ID NO: 194059
  derived and/or modified CDS sequence (opt5) from hemagglutinin__InfluenzaA__AHL89990

SEQ ID NO: 203334 - RNA, 1701 nt, Artificial Sequence
  derived and/or modified CDS sequence (opt5) from hemagglutinin__InfluenzaA__AHL90002
augaagaccaucauugcccugagcuacauccucugccugguguucgcucagaaacuucccggcauugacaacuccacagccacgcugugucucgggcaccaugcggucccuaauggaaccaucguuaagacaauuaccaacgaucaaaucgaggugacaaaugcuaccgaacuggugcagucuagcuccacaggcgggaucugcgacucuccgcaccagauucuugauggagagaacuguacccugaucgacgcccuccugggcgauccccagugcgacggguuucaaaauaaaaagugggaucuguucgucgaaagaagcaaagccuauuccaacuguuacccuuaugacgugcccgauuacgcuucucuccggagccugguugccuccagcggaacgcuugaguuuaauaacgaaucuuucaauugggcuggcgugacccagaacggcacauccagcgccugcaagcgcgggucuaauaacuccuuuuucagcagacugaauuggcucacccauucuaaguuuaaauauccugcgcugaacgucacaaugcccaauaacgaggaguucgacaaacuuuacauuuggggagugcaccauccuggcaccgauaacgaccagaucuuucuguaugcccaggcuuccgggcggauuacgguuagcacaaagcgcucccaacagaccgugaucccgaauauuggaucuagaccccggguccgcaacaucccuagcagaaucuccauuuacuggacaaucgugaagcccggcgauauucuccugaucaauagcaccgggaaccugauugccccucggggauacuucaaaauccgcucuggcaaguccagcaucaugagaucugacgcucccauuggcaaguguaauagcgaaugcaucaccccgaacggguccauuccuaaugacaaacccuuucagaacgugaaucggaucacauauggagccuguccucgcuacgucaagcagaacacgcucaaacuggcgaccggcaugagaaauguucccgagaagcaaacacgggggauuuucggagccaucgcuggcuuuaucgaaaacgggugggagggaaugguggauggcugguauggcuuccgccaccaaaauucugaggggaugggacaggccgcugaccuuaaaagcacccaggccgccauugaucagaucaacggcaagcugaauagacucauugggaaaacaaacgaaaaguuccaccagaucgagaaggaauuuuccgagguggaaggacggauucaggaccuggagaaauacgucgaggauaccaagaucgaccuuuggagcuauaacgcugaacugcucguggcgcuggagaaucaacauacgauugaucugacagacucugaaaugaacaaacucuucgagaagaccaaaaagcagcugagagaaaaugccgaggauaugggcaacgggugcuuuaagaucuaccacaaaugugacaaugcuugcaucggcuccauucgcaacggaaccuaugaucaugacguuuaccgggacgaggcccuuaauaacagauuccagaucaagggcguggaacugaaaagcggguacaaggauuggauucucuggaucucuuuugccauuuccugcuuccugcuuugugucgcucugcucggauuuaucaugugggccugccagaaaggcaauauccgcuguaacauuugcaucuga

SEQ ID NO: 203335 - RNA, 1701 nt, Artificial Sequence
  derived and/or modified CDS sequence (opt5) from hemagglutinin__InfluenzaA__AHL90014
augaagaccaucauugcccugagcuacauccucugccugguguucgcucagaaacuucccggcaacgacaauuccacagccacgcugugucucgggcaccaugcggucccuaacggaaccauuguuaagacaaucaccaaugaucaaguggaggugacaaacgcuaccgaacugguccagucuagcuccacaggcgagauuugcgacucuccgcaccagauccuugauggggaaaauuguacccugaucgacgcccuccugggagauccccagugcgacggcuuucaaaacaaaaagugggaucuguucguggagagaagcaaagccuauuccaauuguuacccuuaugacguucccgauuacgcuucucuccggagccugguggccuccagcgggacgcuugaauuuaacaaugagucuuucaacuggaccggagucacacagaauggcaccuccagcgcuugcauucgcagaucuaacaauuccuuuuucagccggcugaacuggcucacacaucugaaguuuaaguauccugcccuuaaugugaccaugcccaacaacgagaaauucgacaagcuguacaucuggggcguucaccauccugggacggauaaugaccagauuuuucucuaugcgcaggccucuggacgcaucacaguguccaccaaaagaagccaacagacagucauuccgaacaucggcucccggccccgcgugagaaauauuccuucucggaucagcaucuacuggaccauugugaagcccggggauauccugcugauuaacuccaccggaaaucucaucgcuccucgcggcuacuucaaaauuagaagcgggaagucuuccaucaugcggagcgacgcccccaucggaaaguguaacucugaaugcauuacaccgaauggcagcaucccuaacgacaaacccuuucagaaugucaaccgcauuacguauggcgcuuguccuagauacguuaagcagaauacccugaaacuugccacagggaugcggaacgugcccgagaagcaaacccgcggaaucuucggcgcgauugccggguuuaucgaaaauggaugggagggcaugguggaugggugguauggauucagacaccagaacuccgagggcaucggccaggcugccgaccugaaaucuacacaagcugccauugaucagaucaaugggaagcucaaccggcugauuggaaaaaccaacgaaaaguuccaccagaucgagaaggaauuuagcgaggucgaaggccgcauucaggaccuugagaaauacguggaggauacgaagaucgaccugugguccuauaaugccgaacuccugguugcucuggagaaccaacauacaauugaucucaccgacagcgaaaugaauaaacuguucgagaagaccaaaaagcagcuuagagaaaacgcggaggauauggggaauggaugcuuuaagaucuaccacaaaugugacaacgccugcaucggcucuauucggaaugggacauaugaucaugacguguacagagacgaggcucugaacaaucgcuuccagaucaagggcgucgaacucaaauccggauacaaggauuggauucuguggaucagcuuugccauuucuugcuuccuucuguguguggcccuccugggcuuuaucaugugggcuugccagaaagggaacauccgguguaauauuugcaucuga

SEQ ID NO: 203336 - RNA, 1701 nt, Artificial Sequence; identical to SEQ ID NO: 203335
  derived and/or modified CDS sequence (opt5) from hemagglutinin__InfluenzaA__AHL90026

SEQ ID NO: 203337 - RNA, 1701 nt, Artificial Sequence
  derived and/or modified CDS sequence (opt5) from hemagglutinin__InfluenzaA__AHL90050
augaagaccaucauugcccugagcuacauccucugccugguguucgcucagaaacuucccggcaacgacaauuccacagccacgcugugucucgggcaccaugcggucccuaacggaaccauuguuaagacaaucaccaaugaucaaauugaggugacaaacgcuaccgaacuggugcagucuagcuccacaggcgagaucugcgacucuccgcaccagauccuugauggggaaaauuguacccugauugacgcccuccugggagauccccagugcgacggcuuucaaaacaaaaagugggaucuguucgucgagagaagcaaagccuauuccaauuguuacccuuaugacgugcccgauuacgcuucucuccggagccugguugccuccagcgggacgcuugaauuuaacaaugagucuuucaacuggaccggagugacacagaauggcaccuccagcgcuugcauccgcagaucuaacaauuccuuuuucagccggcugaacuggcucacacaucugaaguuuaaguauccugcccuuaaugucaccaugcccaacaacgagaaauucgacaagcuguacauuuggggcgugcaccauccugggacggauaaugaccagaucuuucucuaugcgcaggccucuggacgcauuacaguuuccaccaaaagaagccaacagacagugaucccgaacauuggcucccggccccgcgucagaaauaucccuucucggaucagcauuuacuggaccaucgugaagcccggggauauucugcugaucaacuccaccggaaaucucauugcuccucgcggcuacuucaaaaucagaagcgggaagucuuccaucaugcggagcgacgcccccauuggaaaguguaacucugaaugcaucacaccgaauggcagcauuccuaacgacaaacccuuucagaaugugaaccgcaucacguauggcgcuuguccuagauacgucaagcagaauacccugaaacuugccacagggaugcggaacguucccgagaagcaaacccgcggaauuuucggcgcgaucgccggguuuaucgaaaauggaugggagggcaugguggaugggugguauggauucagacaccagaacuccgagggcauuggccaggcugccgaccugaaaucuacacaagcugccaucgaucagauuaaugggaagcucaaccggcugaucggaaaaaccaacgaaaaguuccaccagauugagaaggaauuuagcgagguggaaggcagaauccaggaccuugagaaauacgucgaggauacgaagauugaccugugguccuauaaugccgaacuccugguggcucuggagaaccaacauacaaucgaucucaccgacgcggaaaugaauaaacuguucgagaagaccaaaaagcagcuucgcgaaaacgccgaggauauggggaauggaugcuuuaagaucuaccacaaaugugacaacgcuugcauuggcagcauccggaaugggacauaugaucaugacguuuacagagacgaggcccugaacaaucgcuuccagauuaagggcguggaacucaaaucuggauacaaggauuggauccuguggauuuccuuugccaucagcugcuuccuucugugugucgcucuccugggcuuuaucaugugggccugccagaaagggaacauucgguguaauaucugcauuuga

SEQ ID NO: 203338 - RNA, 1701 nt, Artificial Sequence
  derived and/or modified CDS sequence (opt5) from hemagglutinin__InfluenzaA__AHL90062
augaagaccaucauugcccugagcuacauccucugccugguguucgcucagaaacuucccgagaacgacaauuccacagccacgcugugucucggccaccaugcggucccuaacgggaccauuguuaagacaaucaccaaugaucaaauugaagugacaaacgcuaccgagcuggugcagucuagcuccacaggagaaaucugcgacucuccgcaccagauccuugauggcgagaauuguacccugauugacgcccuccugggggauccccagugcgacggauuucaaaacaaaaagugggaucuguucgucgaaagaagcaaagccuauuccaauuguuacccuuaugacgugcccgauuacgcuucucuccggagccugguugccuccagcggcacgcuugaguuuaacaaugagucuuucaacuggaccggggugacacagaauggaaccuccagcgcuugcauccgcagaucuaacaauuccuuuuucagccggcugaacuggcucacacaucugaaguuuaaguauccugcccuuaaugucaccaugcccaacaacgaaaaauucgacaagcuguacauuuggggcgugcaccauccuggcacggauaaugaccagaucuuucucuaugcgcaggccucugggcgcauuacaguuuccaccaaaagaagccaacagacagugaucccgaacauuggaucccggccccgcgucagaaauaucccuucucggaucagcauuuacuggaccaucgugaagcccggcgauauucugcugaucaacuccaccgggaaucucauugcuccucgcggauacuucaaaaucagaagcggcaagucuuccaucaugcggagcgacgcccccauugggaaguguaacucugagugcaucacaccgaauggaagcauuccuaacuauaaacccuuucagaaugugaaccgcaucacguacggcgcuuguccuagauaugucaagcagaauacccugaaacuugccacaggcaugcggaacguucccgaaaagcaaacccgcgggauuuucggagcgaucgccggcuuuaucgagaaugggugggagggaaugguggacggcugguacggguucagacaccagaacuccgaaggaauuggccaggcugccgaucugaaaucuacacaagcugccaucgaccagauuaauggcaagcucaaccggcugaucgggaaaaccaacgagaaguuccaccagauugaaaaggaguuuagcgaaguggagggaagaauccaggaucuugagaaauaugucgaagacacgaagauugaucugugguccuacaaugccgagcuccugguggcucuggaaaaccaacauacaaucgaccucaccgauagcgagaugaauaaacuguucgaaaagaccaaaaagcagcuucgcgagaacgcggaggacaugggcaaugggugcuuuaagaucuaucacaaaugugauaacgccugcauuggaucuauccggaauggcacauacgaccaugauguuuacagagacgaagcucugaacaaucgcuuccagauuaaggggguggagcucaaauccggcuauaaggacuggauccuguggauuagcuuugccaucucuugcuuccuucugugugucgcccuccugggauuuaucaugugggcuugccagaaaggcaacauucgguguaauaucugcauuuga

SEQ ID NO: 203339 - RNA, 1701 nt, Artificial Sequence; identical to SEQ ID NO: 194000
  derived and/or modified CDS sequence (opt5) from hemagglutinin__InfluenzaA__AHL90074

SEQ ID NO: 203340 - RNA, 1701 nt, Artificial Sequence
  derived and/or modified CDS sequence (opt5) from hemagglutinin__InfluenzaA__AHL90086
augaagaccaucauugcccugagcuacauccucugccugguguucgcucagaaacuucccggcaacgacaauuccacagccacgcugugucucgggcaccaugcggucccuaacggaaccauuguuaagacaaucaccaaugaucaaauugaggugacaaacgcuaccgaacuggugcagucuagcuccacaggcgagaucugcgacucuccgcaccagauccuugauggggaaaauuguacccugauugacgcccuccugggagauccccagugcgacggcuuucaaaacaaaaagugggaucuguucgucgagagaagcaaagccuauuccaauuguuacccuuaugacgugcccgauuacgcuucucuccggagccugguugccuccagcgggacgcuugaauuuaacaaugagucuuucaacuggaccggagugacacagaauggcaccuccagcgcuugcauccgcagauauaacaauagcuuuuucucccggcugaacuggcucacacaucugaaguuuaaguacccugcccuuaaugucaccaugcccaacaacgagaaauucgacaagcuguauauuuggggcgugcaccauccugggacggauaaugaccagaucuuucucuacgcgcaggccagcggacgcauuacaguuucuaccaaaagaucccaacagacagugaucccgaacauuggcagccggccccgcgucagaaauaucccuucccggaucucuauuuacuggaccaucgugaagcccggggauauucugcugaucaacagcaccggaaaucucauugcuccucgcggcuauuucaaaaucagauccgggaagucuucuaucaugcgguccgacgcccccauuggaaaguguaacagcgaaugcaucacaccgaauggcucuauuccuaacgacaaacccuuucagaaugugaaccgcaucacguacggcgcuuguccuagauaugucaagcagaauacccugaaacuugccacagggaugcggaacguucccgagaagcaaacccgcggaauuuucggcgcgaucgccggguuuaucgaaaauggaugggagggcaugguggaugggugguacggauucagacaccagaacagcgagggcauuggccaggcugccgaccugaaauccacacaagcugccaucgaucagauuaaugggaagcucaaccggcugaucggaaaaaccaacgaaaaguuccaccagauugagaaggaauuuucugagguggaaggcagaauccaggaccuugagaaauaugucgaggauacgaagauugaccuguggagcuacaaugccgaacuccugguggcucuggagaaccaacauacaaucgaucucaccgacuccgaaaugaauaaacuguucgagaagaccaaaaagcagcuucgcgaaaacgcggaggauauggggaauggaugcuuuaagaucuaucacaaaugugacaacgccugcauuggcagcauccggaaugggacauacgaucaugacguuuacagagacgaggcucugaacaaucgcuuccagauuaagggcguggaacucaaaucuggauauaaggauuggauccuguggauuuccuuugccaucagcugcuuccuucugugugucgcccuccugggcuuuaucaugugggcuugccagaaagggaacauucgguguaauaucugcauuuga

SEQ ID NO: 203341 - RNA, 1701 nt, Artificial Sequence
  derived and/or modified CDS sequence (opt5) from hemagglutinin__InfluenzaA__AHL90098
augaagaccaucauugcccugagcuacauccucugccugguguucgcucagaaacuucccggcaacgacaauuccacagccacgcugugucucgggcaccaugcggucccuaacggaaccauuguuaagacaaucaccaaugaucaaauugaggugacaaacgcuaccgaacuggugcagucuagcuccacaggcgggaucugcgacucuccgcaccagauccuugauggagagaauuguacccugauugacgcccuccugggcgauccccagugcgacggguuucaaaacaaaaagugggaucuguucgucgaaagaagcaaagccuauuccaauuguuacccuuaugacgugcccgauuacgcuucucuccggagccugguugccuccagcggaacgcuugaguuuaacaaugaaucuuucaacuggaccggcgugacacagaauggcaccuccagcgcuugcaagcgcgggucugacaacuccuuuuucagcagacugaauuggcucacacaucugaaguuuaaauauccugcccuuaacgucaccaugcccaauaacgagaaguucgauaaacuguacaucuggggagugcaccauccuggcacggacaacgaucagauuuuucucuaugcgcaggccucugggcggaucacaguuuccaccaagcgcagccaacagacagugauuccgaauaucggauccagaccccggguccgcaacauuccuucuagaaucagcaucuacuggaccauugugaaacccggcgacauccugcugauuaauuccaccgggaaccucaucgcuccucggggauacuucaagauucgcagcggcaagucuuccaucaugagaagcgacgcccccaucgauaaauguaauucugagugcauuacaccgaacggcagcaucccuaaugacaagcccuuucagaacgugaaucggauuacguauggggcuuguccucgcuacgucaaacagaacacccugaaacuugccacaggaaugagaaauguucccgaaaagcaaacccggggcaucuucggggcgauugccggauuuaucgagaacggcugggaagggaugguggauggaugguauggcuuccgccaccaaaauuccgagggcaucgggcaggcugccgaccugaagucuacacaggcugccauuaaccagaucaauggaaaacucaacagacugauuggcaagaccaacgagaaguuccaccagaucgaaaaagaguuuagcgaaguggaggggcggauucaggaucuugaaaaguacgucgaggacacgaaaaucgaucugugguccuauaaugccgagcuccugguggcucuggaaaaccaacauacaauugaccucaccgauagcgagaugaauaagcuguucgaaagaaccaaaaagcagcuucgcgagaacgcggaagacaugggaaauggcugcuuuaagaucuaccacaaaugugauaacgccugcaucgggucuauucggaauggcacauaugaccaugacguuuacagagaugaggcucugaacaaucgcuuccagaucaagggaguggagcucaaauccggcuacaaggacuggauucuguggaucagcuuugccauuucuugcuuccuucugugugucgcccuccugggguuuaucaugugggcuugccagaaaggaaacauccgguguaauauuugcaucuga

SEQ ID NO: 203342 - RNA, 1701 nt, Artificial Sequence
  derived and/or modified CDS sequence (opt5) from hemagglutinin__InfluenzaA__AHL90110
augaagaccaucauugcccugagcuacauccucugccugguguucgcucagaaacuucccggcaacgacaauuccacagccacgcugugucucgggcaccaugcggucccuaacggaaccauuguuaagacaaucaccaaugaucaaauugaggugacaaacgcuaccgaacuggugcagucuagcuccacaggcgagaucugcgacucuccgcaccagauccuugauggggaaaauuguacccugauugacgcccuccugggagauccccagugcgacggcuuucaaaacaaaaagugggaucuguucgucgagagaagcaaagccuauuccaauuguuacccuuaugacgugcccgauuacgcuucucuccggagccugguugccuccagcgggacgcuugaauuuaacaaugagucuuucaacuggaccggagugacacagaauggcaccuccagcgcuugcauccgcagaucuaacaauuccuuuuucagccggcugaacuggcucacacaucugaaguuuaaguauccugcccuuaaugucaccaugcccaacaacgagaaauucgacaagcuguacauuuggggcgugcaccauccugggacggauaaugaccagaucuuucucuaugcgcaggccucuggacgcauuacaguuuccaccaaaagaagccaacagacagugaucccgaacauuggcucccggccccgcgucagaaauaucccuucucggaucagcauuuacuggaccaucgugaagcccggggauauucugcugaucaacuccaccggaaaucucauugcuccucgcggcuacuucaaaauccagagcgggaagucuuccgugaugagaagcgacgcccccaucggaaaguguaacucugaaugcauuacaccgaauggcagcaucccuaacgacaaacccuuucagaaugucaaccggauuacguauggcgcuuguccucgcuacguuaagcaaaauacccugaaacuugccacagggaugagaaacgugcccgagaagcagacccggggaaucuucggcgcgauugccggguuuaucgaaaauggaugggagggcaugguggaugggugguauggauuccgccaccagaacuccgagggcaucggccaagcugccgaccugaaaucuacacaggcugccauugaucagaucaaugggaagcucaacagacugauuggaaaaaccaacgaaaaguuccaccagaucgagaaggaauuuagcgaggucgaaggccggauucaagaccuugagaaauacguggaggauacgaagaucgaccugugguccuauaaugccgaacuccugguugcucuggagaaccagcauacaauugaucucaccgacagcgaaaugaauaaacuguucgagaagaccaaaaagcagcuuagagaaaacgcggaggauauggggaauggaugcuuuaagaucuaccacaaaugugacaacgccugcaucggcucuauucgcaaugggacauaugaucaugacguguaccgggacgaggcucugaacaauagauuccagaucaagggcgucgaacucaaauccggauacaaggauuggauucuguggaucagcuuugccauuucuugcuuccuucuguguguggcccuccugggcuuuaucaugugggcuugccaaaaagggaacauccgcuguaauauuugcaucuga

SEQ ID NO: 203343 - RNA, 1698 nt, Artificial Sequence; identical to SEQ ID NO: 196167
  derived and/or modified CDS sequence (opt5) from hemagglutinin__InfluenzaA__AHL90122

SEQ ID NO: 203344 - RNA, 1698 nt, Artificial Sequence; identical to SEQ ID NO: 194560
  derived and/or modified CDS sequence (opt5) from hemagglutinin__InfluenzaA__AHL90133

SEQ ID NO: 203345 - RNA, 1698 nt, Artificial Sequence; identical to SEQ ID NO: 196167
  derived and/or modified CDS sequence (opt5) from hemagglutinin__InfluenzaA__AHL90145

SEQ ID NO: 203346 - RNA, 1698 nt, Artificial Sequence
  derived and/or modified CDS sequence (opt5) from hemagglutinin__InfluenzaA__AHL90157
augaaggugaaacugcucguccugcuuugcaccuucacagccacguacgcugacaccaucuguauuggcuaucacgccaacaauagcacagauaccguugacacagugcuggagaagaacgugaccgucacacauuccgugaaucuccuggaaaacucucacaaugggaaacuuugccugcucaagggaaucgcgccccugcagcugggcaacuguagcguugcuggguggauucucggaaauccugagugcgaacugcuuaucuccaaagagucuuggagcuacauuguggaaaagccgaaccccgagaauggcaccuguuauccugggcauuuugccgauuacgaggaacugagagagcaacucuccucugucagcuccuucgaacgguuugagaucuuccccaaggagagcucuuggccuaaccacacggugaccggaguuuccgccagcugcucucauaauggcgaauccagcuuuuaucgcaaccugcuuuggcugacaggcaaaaaugggcucuaccccaaccugucuaaguccuaugcuaauaacaaagagaaggaagugcugguccucuggggagugcaccacccuccgaacaucggcgaccagaaagcccuguaccauaccgagaaugcuuacgugagcgucguuuccucucacuauagcagaaaguucacacccgaaauugccaagcggccuaaagugcgcgaucaggaggggagaaucaacuacuauuggacccuucuggagcccggagacacgauuaucuuugaagcgaauggcaaccucauugccccucgguacgcuuucgcccugucccgcggguuuggaagcggcaucauuaauucuaacgcucccauggauaagugugacgccaaaugccagacaccgcaaggcgcgaucaauuccagccuuccuuuccagaacgugcaucccgucaccaucggggaguguccuaaguaugugagaucugccaaacugcggaugguuacaggacuccgcaauauucccagcauccaguccagaggccuguuuggggcuauugccggauucaucgaaggcggguggaccggaaugguggauggcugguacggcuaucaccaccagaacgagcaagggucuggauacgcugccgaccaaaagagcacccagaaugccauuaacggcaucacaaauaaagucaacuccgugaucgaaaagaugaauacgcaguuuaccgcuguugggaaggaguucaacaaacuggagcggcgcauggaaaaccucaauaagaaaguggaugacggauucauugauaucuggacauacaacgcggagcugcuuguccugcucgaaaaugagagaacccuggacuuucaugacagcaacgugaagaaucuuuaugaaaaagucaagauucagcugaagaacaaugccaaagagaucggcaacgggugcuucgaguuuuaccacaaguguaaugaugaaugcauggagucugugaaaaacggcacauaugacuaccccaaguauuccgaagagagcaaacucaaucgggagaagauugauggaguuaagcuggaaucuaugggcguguaccagauccuggcuaucuauuccaccauugccagcucccucguccugcuugugucucugggggccaucagcuucuggaugugcuccaacggaucucuccagugucgcauuugcaucuga

SEQ ID NO: 203347 - RNA, 1698 nt, Artificial Sequence; identical to SEQ ID NO: 196167
  derived and/or modified CDS sequence (opt5) from hemagglutinin__InfluenzaA__AHL90169

SEQ ID NO: 203348 - RNA, 1698 nt, Artificial Sequence
  derived and/or modified CDS sequence (opt5) from hemagglutinin__InfluenzaA__AHL90181
augaaggugaaacugcucguccugcuuugcaccuucgccgcuacauacgccgacacgaucuguauuggcuaucacgcgaacaauagcaccgauacaguugacaccgugcuggagaagaacgugacagucacccauuccgugaaucuccuggaaaacucucacaaugggaaacuuugccugcucaagggaaucgcuccccugcagcugggcaacuguagcguugccggguggauucucggaaauccugagugcgaacugcuuaucuccaaagagucuuggagcuacauuguggaaaagccgaaccccaagaauggcacauguuauccugggcauuuugccgauuacgaggagcugagagaacaacucuccucugucagcuccuucgagcgguuugaaaucuuccccaaagagagcucuuggccuaaccacaccgugacgggaguuuccgcuagcugcucucauaauggcgaguccagcuuuuaucgcaaccugcuuuggcugaccggcaagaaugggcucuaccccaaccugucuaaauccuaugccaauaacaaggaaaaagaggugcugguccucuggggagugcaccacccuccgaacaucggcgaccagaaggcucuguaccauacagaaaaugccuacgugagcgucguuuccucucacuauagcagaaaguucacccccgagauugcgaaacggccuaaggugcgcgaucaggaagggagaaucaacuacuauuggacacuucuggagcccggagacaccauuaucuuugaggccaauggcaaccucauugcuccucgguacgccuucgcucugucccgcggguuuggaagcggcaucauuaauucuaacgcccccauggauaaaugugacgcgaagugccagacgccgcaaggcgccaucaauuccagccuuccuuuccagaacgugcaucccgucacaaucggggaauguccuaaauaugugagaucugcuaagcugcggaugguuaccggacuccgcaauauucccagcauccaguccagaggccuguuuggggccauugcuggauucaucgagggcggguggacaggaaugguggauggcugguacggcuaucaccaccagaacgaacaagggucuggauacgccgccgaccagaaaagcacccagaaugcuauuaacggcaucaccaauaaggucaacuccgugaucgagaagaugaauacacaguuuacggcgguugggaaagaguucaacaagcuggaacggcgcauggagaaccucaauaaaaagguggaugacggauucauugauaucuggaccuacaacgccgaacugcuuguccugcucgagaaugaaagaacacuggacuuucaugacagcaacgugaaaaaucuuuaugagaaggucaagucucaacugaaaaacaaugcuaaggaaauuggcaacgggugcuucgaguuuuaccacaaauguaaugaugagugcauggaauccgugaagaacggcaccuaugacuaccccaaauauagcgaggaaucuaagcucaaucgggagaagaucgauggaguuaaacuggaguccaugggcguguaccagauucuggccaucuauagcacagucgccuccucucucgugcugcuuguuagccugggggcuaucuccuucuggaugugcucuaacggaagccuccagugucgcauuugcaucuga

SEQ ID NO: 203349 - RNA, 1698 nt, Artificial Sequence; identical to SEQ ID NO: 195242
  derived and/or modified CDS sequence (opt5) from hemagglutinin__InfluenzaA__AHL90217

SEQ ID NO: 203350 - RNA, 1698 nt, Artificial Sequence; identical to SEQ ID NO: 195242
  derived and/or modified CDS sequence (opt5) from hemagglutinin__InfluenzaA__AHL90229

SEQ ID NO: 203351 - RNA, 1698 nt, Artificial Sequence
  derived and/or modified CDS sequence (opt5) from hemagglutinin__InfluenzaA__AHL90241
augaaggugaaacugcucguccugcuuugcaccuucacagccacguacgcugacaccaucuguauuggcuaucacgccaacaauagcacagauaccguugacacagugcuggagaagaacgugaccgucacacauuccgugaaucuccuggaaaacucucacaaugggaaacuuugccugcucaagggaaucgcgccccugcagcugggcaacuguagcguugcuggguggauucucggaaauccugagugcgaacugcuuaucccgaaagaguccuggucuuacauuguggaaaagcccaacccugagaauggcaccuguuaucccgggcauuuugccgauuacgaggaacugagagagcaacucagcuccgucucuagcuucgaacgguuugagaucuucccuaaggaguccagcuggcccaaccacacggugaccggaguuucugccuccugcagccauaauggcgaaucuuccuuuuaucgcaaccugcuuuggcugacaggcaaaaaugggcucuacccuaaccugagcaagucuuaugcuaauaacaaagagaaggaagugcugguccucuggggagugcaccacccgcccaacaucggcgaccagaaagcccuguaccauaccgagaaugcuuacguguccgucguuagcucccacuauucuagaaaguucacaccugaaauugccaagcggcccaaagugcgcgaucaggaggggagaaucaacuacuauuggacccuucuggagccuggagacacgauuaucuuugaagcgaauggcaaccucauugcuccccgguacgccuucgcccugagccgcggguuuggauccggcaucauuaauagcaacgcuccgauggauaagugugacgccaaaugccagacaccucaaggcgcgaucaauucuucccuucccuuccagaacgugcauccugucaccaucggggagugucccaaguaugugagaagcgccaaacugcggaugguuacaggacuccgcaauauucccucuauccagagcagaggccuguuuggggcuauugccggauucaucgaaggcggguggaccggaaugguggauggcugguacggcuaucaccaccagaacgagcaaggguccggauacgcugccgaccagaagucuacccagaaugccauuaacggcaucacaaauaaagucaacagcgugaucgaaaagaugaauacgcaguuuaccgcuguugggaaggaguucaacaaacuggagcggcgcauggaaaaccucaauaagaaaguggaugacggauucauugauaucuggacauacaacgcggagcugcuuguccugcucgaaaaugagagaacccuggacuuucaugacuccaacgugaagaaucuuuaugaaaaagucaagagccaacugaagaacaaugccaaagagauuggcaacgggugcuucgaguuuuaccacaaguguaaugaugaaugcauggagucugugaaaaacggcacauaugacuacccuaaguauuccgaagagagcaaacucaaucgggagaagaucgauggaguuaagcuggaaucuaugggcguguaccagauucuggcuaucuauuccaccgucgccagcucccucgugcugcuuguuucucugggggccaucagcuucuggaugugcuccaacggaucucuccagugucgcauuugcaucuga

SEQ ID NO: 203352 - RNA, 1698 nt, Artificial Sequence
  derived and/or modified CDS sequence (opt5) from hemagglutinin__InfluenzaA__AHL90253
augaaggugaaacugcucguccugcuuugcaccuucacagccacguacgcugacaccaucuguauuggcuaucacgccaacaauagcacagauaccguugacacagugcuggagaagaacgugaccgucacacauuccgugaaucuccuggaaaacucucacaaugggaaacuuugccugcucaagggaaucgcgccccugcagcugggcaacuguagcguugcuggguggauucucggaaauccugagugcgaacugcuuaucuccaaagagucuuggagcuacauuguggaaaagccgaaccccgagaauggcaccuguuauccugggcauuuugccgauuacgaggaacugagagagcaacucuccucugucagcuccuucgaacgguuugagaucuuccccaagggaagcucuuggccuaaccacacggugaccggcguuuccgccagcugcucucauaauggcgaguccagcuuuuaucgcaaccugcuuuggcugacagggaaaaauggacucuaccccaaccugucuaaguccuaugcuaauaacaaagaaaaggaggugcugguccucuggggcgugcaccacccuccgaacaucggggaccagaaaacccuguaccauacagaaaaugccuacgugagcgucguuuccucucacuauagcagaaaguucacccccgagauugcuaagcggccuaaagugcgcgaucaggaaggaagaaucaacuacuauuggacgcuucuggagcccggcgacacaauuaucuuugaggccaaugggaaccucauugcgccucgguacgccuucgcucugucccgcggauuuggcagcggcaucauuaauucuaacgcccccauggauaagugugacgcuaaaugccagaccccgcaaggggccaucaauuccagccuuccuuuccagaacgugcaucccgucacaaucggagaauguccuaaguaugugagaucugcgaaacugcggaugguuaccggccuccgcaauauucccagcauccaguccagagggcuguuuggagccauugcuggcuucaucgaagggggauggaccggcaugguggauggcugguacggguaucaccaccagaacgaacaaggaucuggcuacgccgcugaccaaaagagcacacagaaugccauuaacgggaucacgaauaaagucaacuccgugaucgagaagaugaauacccaguuuacagccguuggaaaggaguucaacaaacuggagcggcgcauggagaaccucaauaagaaaguggaugacggcuucauugauaucuggaccuacaacgcugaacugcuuguccugcucgagaaugaaagaacacuggacuuucaugacagcaacgugaagaaucuuuaugagaaagucaagucucagcugaagaacaaugcgaaagaaauugggaacggcugcuucgaguuuuaccacaaguguaaugaugagugcauggaauccgugaaaaacggaaccuaugacuaccccaaguauagcgagguuucuaaacucaaucgggaaaagaucgauggcgugaagcuggaguccaugggggucuaccagauucuggccaucuauagcacgguggcuuccucucucguucugcuugugagccugggagccaucuccuucuggaugugcucuaacggcagccuccagugucgcauuugcaucuga

SEQ ID NO: 203353 - RNA, 1698 nt, Artificial Sequence; identical to SEQ ID NO: 194560
  derived and/or modified CDS sequence (opt5) from hemagglutinin__InfluenzaA__AHL90265

SEQ ID NO: 203354 - RNA, 1698 nt, Artificial Sequence
  derived and/or modified CDS sequence (opt5) from hemagglutinin__InfluenzaA__AHL90277
augaaggugaaacugcucguccugcuuugcaccuucacagccacguacgcugacaccaucuguauuggcuaucacgccaacaauagcacagauaccguugacacagugcuggagaagaacgugaccgucacacauuccgugaaucuccuggaaaacucucacaaugggaaacuuugccugcucaagggaaucgcgccccugcagcugggcaacuguagcguugcuggguggauucucggaaauccugagugcgaacugcuuaucuccaaagagucuuggagcuacauuguggaaaagccgaaccccgagaauggcaccuguuauccugggcauuuugccgauuacgaggaacugagagagcaacucuccucugucagcuccuucgaacgguuugagaucuuccccaaggagagcucuuggccuaaccacacggugaccggaguuuccgccagcugcucucauaauggcgaauccagcuuuuaucgcaaccugcuuuggcugacaggcaaaaaugggcucuaccccaaccugucuaaguccuaugcuaauaacaaagagaaggaagugcugguccucuggggagugcaccacccuccgaacaucguggaccagaaaacccuguaccauacagagaaugccuacgucagcguuguguccucucacuauagcagaaaguucacccccgaaauugcuaagcggccuaaagugcgcgaucaggagggcagaaucaacuacuauuggacgcuucuggagcccggggacacaauuaucuuugaagccaauggaaaccucauugcgccucgguacgccuucgcucugucccgcggcuuugggagcggaaucauuaauucuaacgcccccauggauaagugugacgcuaaaugccagaccccgcaaggcgccaucaauuccagccuuccuuuccagaacguccaucccgugacaaucggcgaguguccuaaguauguuagaucugcgaaacugcggauggugaccgggcuccgcaauauucccagcauccaguccagaggacuguuuggcgccauugcuggguucaucgaaggaggcuggaccgggauggucgauggaugguacggcuaucaccaccagaacgagcaaggcucuggguacgccgcugaccaaaagagcacacagaaugccauuaacggaaucacgaauaaagugaacuccguuaucgaaaagaugaauacccaguuuacagccgugggcaaggaguucaacaaacuggagcggcgcauggaaaaccucaauaagaaagucgaugacggguucauugauaucuggaccuacaacgcugagcugcuugugcugcucgaaaaugagagaacacuggacuuucaugacagcaacgucaagaaucuuuaugaaaaagugaagucucagcugaagaacaaugcgaaagagauuggaaacggcugcuucgaguuuuaccacaaguguaaugaugaaugcauggaguccguuaaaaacgggaccuaugacuaccccaaguauagcgaagagucuaaacucaaucgggagaagaucgauggcgugaagcuggaauccaugggagucuaccagauucuggccaucuauagcacgguggcuuccucucucguucugcuugugagccugggcgccaucuccuucuggaugugcucuaacgggagccuccagugucgcauuugcaucuga

SEQ ID NO: 203355 - RNA, 1698 nt, Artificial Sequence
  derived and/or modified CDS sequence (opt5) from hemagglutinin__InfluenzaA__AHL90289
augaaggugaaacugcucguccugcuuugcaccuucacagccacguacgcugacaccaucuguauuggcuaucacgccaacaauagcacagauaccguugacacagugcuggagaagaacgugaccgucacacauuccgugaaucuccuggaaaacucucacaaugggaaacuuugccugcucaagggaaucgcgccccugcagcugggcaacuguagcguugcuggguggauucucggaaauccugagugcgaacugcuuaucuccaaagagucuuggagcuacauuguggaaaagccgaaccccgagaauggcaccuguuauccugggcauuuugccgauuacgaggaacugagagagcaacucuccucugucagcuccuucgaacgguuugagaucuuccccaaggagagcucuuggccuaaccacacggugaccggaguuuccgccagcugcucucauaauggcgaauccagcuuuuaucgcaaccugcuuuggcugacaggcaaaaaugggcucuaccccaaccugucuaaguccuaugcuaauaacaaagagaaggaagugcugguccucuggggagugcaccacccuccgaacaucggcgaccagaaagcccuguaccauaccgagaaugcuuacgugagcgucguuuccucucacuauagcagaaaguucacacccgaaauugccaagcggccuaaagugcgcgaucaggaggggagaaucaacuacuauuggacccuucuggagccccgggacacgauuaucuuugaagcgaauggaaaccucauugccccucgcuacgcuuucgcccuguccagaggcuuugggagcggaaucauuaauucuaacgcucccauggauaagugugacgccaaaugccagacaccgcaaggcgcgaucaauuccagccuuccuuuccagaacgugcaucccgucaccaucggcgaguguccuaaguaugugcggucugccaaacugcgcaugguuacagggcucagaaauauucccagcauccagucccggggacuguuuggcgcuauugccggguucaucgaaggaggcuggaccgggaugguggauggaugguacggcuaucaccaccagaacgagcaaggcucuggguacgcugccgaccaaaagagcacccagaaugccauuaacggaaucacaaauaaagucaacuccgugaucgaaaagaugaauacgcaguuuaccgcuguuggcaaggaguucaacaaacuggagcgcagaauggaaaaccucaauaagaaaguggaugacggguucauugauaucuggacauacaacgcggagcugcuuguccugcucgaaaaugagcggacccuggacuuucaugacagcaacgugaagaaucuuuaugaaaaagucaagucucagcugaagaacaaugccaaagagauuggaaacggcugcuucgaguuuuaccacaaguguaaugaugaaugcauggaguccgugaaaaacgggacauaugacuaccccaaguauagcgaagagucuaaacucaaucgcgagaagaucgauggcguuaagcuggaauccaugggaguguaccagauucuggcuaucuauagcaccgucgccuccucucucgugcugcuuguuagccugggcgccaucuccuucuggaugugcucuaacgggagccuccaguguagaauuugcaucuga

SEQ ID NO: 203356 - RNA, 1698 nt, Artificial Sequence; identical to SEQ ID NO: 203355
  derived and/or modified CDS sequence (opt5) from hemagglutinin__InfluenzaA__AHL90301

SEQ ID NO: 203357 - RNA, 1698 nt, Artificial Sequence
  derived and/or modified CDS sequence (opt5) from hemagglutinin__InfluenzaA__AHL90325
augaaggugaaacugcucguccugcuuugcaccuucacagccacguacgcugacaccaucuguauuggcuaucacgccaacaauagcacagauaccguugacacagugcuggagaagaacgugaccgucacacauuccgugaaucuccuggaaaacucucacaaugggaaacuuugccugcucaagggaaucgcgccccugcagcugggcaacuguagcguugcuggguggauucucggaaauccugagugcgaacugcuuaucuccaaagagucuuggagcuacauuguggaaaagccgaaccccgagaauggcaccuguuauccugggcauuuugccgauuacgaggaacugagagagcaacucuccucugucagcuccuucgaacgguuugagaucuuccccaaggagagcucuuggccuaaccacacggugaccggaguuuccgccagcugcucucauaauggcgaauccagcuuuuaucgcaaccugcuuuggcugacaggcaaaaaugggcucuaccccaaccugucuaaguccuaugcuaauaacaaagagaaggaagugcugguccucuggggagugcaccacccuccgaacaucggcgaccagaaagcccuguaccauaccgagaaugcuuacgugagcgucguuuccucucacuauagcagaaaguucacacccgaaauugccaagcggccuaaagugcgcgaucaggaggggagaaucaacuacuauuggacccuucuggagcccggagacacgauuaucuuugaagcgaauggcaaccucauugccccucgguacgcuuucgcccugucccgcggguuuggaagcggcaucauuaauucuaacgcucccauggauaagugugacgccaaaugccagacaccgcaaggcgcgaucaauuccagccuuccuuuccagaacgugcaucccgucaccaucggggaguguccuaaguaugugagaucugccaaacugcggaugguuacaggacuccgcaauauucccagcauccaguccagaggccuguuuggggcuauugccggauucaucgaaggcggguggaccggaaugguggauggcugguacggcuaucaccaccagaacgagcaagggucuggauacgcugccgaccaaaagagcacccagaaugccauuaacggcaucacaaauaaagucaacuccgugaucgaaaagaugaauacgcaguuuaccgcuguugggaaggaguucaacaaacuggagcggcgcauggaaaaccucaauaagaaaguggaugacggauucauugauaucuggacauacaacgcggagcugcuuguccugcucgaaaaugagagaacccuggacuuucaugacagcaacgugaagaaucuuuaugaaaaagucaagucucagcugaagaacaaugccaaagagaugggcaacgggugcuucgaguuuuaccacaaguguaaugaugaaugcauggaguccgugaaaaacggcacauaugacuaccccaaguauagcgaagagucuaaacucaaucgggagaagauugauggaguuaagcuggaauccaugggcguguaccagauccuggcuauuuauagcaccgucgccuccucucucgugcugcuuguuagccugggggccaucuccuucuggaugugcucuaacggaagccuccagugucgcaucugcauuuga

SEQ ID NO: 203358 - RNA, 1698 nt, Artificial Sequence; identical to SEQ ID NO: 203357
  derived and/or modified CDS sequence (opt5) from hemagglutinin__InfluenzaA__AHL90337

SEQ ID NO: 203359 - RNA, 1698 nt, Artificial Sequence; identical to SEQ ID NO: 194560
  derived and/or modified CDS sequence (opt5) from hemagglutinin__InfluenzaA__AHL90349

SEQ ID NO: 203360 - RNA, 1698 nt, Artificial Sequence; identical to SEQ ID NO: 194560
  derived and/or modified CDS sequence (opt5) from hemagglutinin__InfluenzaA__AHL90361

SEQ ID NO: 203361 - RNA, 1698 nt, Artificial Sequence; identical to SEQ ID NO: 203354
  derived and/or modified CDS sequence (opt5) from hemagglutinin__InfluenzaA__AHL90373

SEQ ID NO: 203362 - RNA, 1701 nt, Artificial Sequence
  derived and/or modified CDS sequence (opt5) from hemagglutinin__InfluenzaA__AHL90385
augaagaccaucauugcccugagcuacauccagugccucguguucgcucaaaaauuucccggcaacgacaauuccacagccacgcugugucuugggcaccaugcggucccuaacggaaccauuguuaagacaaucaccaaugaucagauugaggugacaaacgcuaccgaacuggugcagucuagcuccacaggcgagaucugcgacucuccgcaccagauccucgauggggaaaauuguacccugauugacgcccuucugggagauccccaaugcgacggcuuccagaacaaaaauugggaucucuuugucgagagaagcaaggccuauuccaacuguuacccuuaugacgugcccgauuacgcuucucugcggagccugguugccuccagcgggacgcucgaguucaauaacgaaucuuuuaauuggaccggagugacacagaacggcaccuccagcgcuugcauccgcagaucuaauaacuccuucuuuagccggcugaauuggcuuacacauucuaaauucaaguauccugcccugaacgucaccaugcccaacaaugagaacuuugacaagcucuacauuuggggcgugcaccauccugggacggauaaugaccagaucuuccuguaugcgcaagccuccggacgcauuacaguuagcaccaaaagaucccagcagacagugaucccgaacauuggcucucggccccgcgucagaaauaucccuagccggaucuccauuuacuggaccaucgugaagcccggggauauucuucugaucaacagcaccggaaaucucauugcuccucgcggcuacuuuaaaaucagaucugggaaguccagcaucaugcggucugacgcccccauuggaaaauguaacagcgaaugcaucacaccgaauggcuccauuccuaacgacaagcccuuccagaaugugaaccgcaucacguauggcgcuuguccuagauacgucaagcaaaauacccugaaacuggccacagggaugcggaacguucccgagaagcagacccgcggaauuuuuggcgcgaucgccggguucaucgaaaauggaugggagggcaugguggaugggugguauggauucagacaccagaacucugagggcauuggccaagcugccgaccucaaaagcacacaggcugccaucgaucagauuaacgggaagcugaaucggcuuaucggaagaaccaacgaaaaauuucaccagauugagaaggaguucuccgaaguggaaggccgcauccaagaccuggagaaauacgucgaggauacgaagauugaccucuggagcuauaaugccgaacugcuuguggcucuggagaaccagcauacaaucgaucucaccgacucugaaaugaauaagcuguuugagaaaaccaagaaacagcugcgggaaaacgcggaggauauggggaauggaugcuucaagaucuaccacaaaugugacaacgccugcauuggcuccaucagaaaugggacauaugaucaugacguuuaccgcgacgaggcucucaacaaucgguuucagauuaagggcguggaacuuaagagcggauacaaagauuggauccuguggauuucuuucgccaucuccugcuuucugcucuguaucgcccugcuuggcuucauuaugugggcuugccaaaaggggaacaucagauguaauauuugcaucuga

SEQ ID NO: 203363 - RNA, 1701 nt, Artificial Sequence
  derived and/or modified CDS sequence (opt5) from hemagglutinin__InfluenzaA__AHL90397
augaagaccaucauugcccugagcuacauccucugccugguguucgcucagaaacuucccggcaacgacaauuccacagccacgcugugucucgggcaccaugcggucccuaacggaaccauuguuaagacaaucaccaaugaucaaauugaggugacaaacgcuaccgaacuggugcagucuagcuccacaggcgagaucugcgacucuccgcaccagauccuugauggggaaaauuguacccugauugacgcccuccugggagauccccagugcgacggcuuucaaaacaaaaagugggaucuguucgucgagagaagcaaagccuauuccaauuguuacccuuaugacgugcccgauuacgcuucucuccggagccugguugccuccagcgggacgcuugaauuuaacaaugagucuuucaacuggaccggagugacacagaauggcaccuccagcgcuugcauccgcagaucuaacaauuccuuuuucagccggcugaacuggcucacacaucugaaguuuaaguauccugcccuuaaugucaccaugcccaacaacgagcaguucgacaaacuguacauuuggggcgugcaccauccugggacggauaaugaccagaucuuucucuaugcgcaagccucuggacgcauuacaguuuccaccaagagaagccagcagacagugaucccgaacauuggcucccggccccgcgucagaaauaucccuucucggaucagcauuuacuggaccaucgugaaacccggggauauucugcugaucaacuccaccggaaaucucauugcuccucgcggcuacuucaagaucagaagcgggaaaucuuccaucaugcggagcgacgcccccauuggaaaguguucuagcgaaugcaucacaccgaacggcuccauuccuaaugacaagcccuuucagaacgugaaucgcaucacguauggcgcuuguccuagauacgucaaacaaaacacccugaagcuggccacagggaugcggaauguucccgagaaacagacccgcggaauuuucggcgcgaucgccggguuuaucgaaaacggaugggagggcaugguggaugggugguauggauucagacaccaaaauucugagggccggggccaggcugccgaccuuaagagcacacaggcugccauugaucagaucaacgggaaacucaauagacugauuggaaagaccaacgaaaaauuccaccagaucgagaaggaauuuuccgagguggaaggccgcauucaagaccuugagaaguacgucgaggauacgaaaaucgaccuguggagcuauaacgccgaacuccugguggcucuggagaaucagcauacaauugaucucaccgacucugaaaugaacaagcuguucgagaaaaccaagaaacagcuucgggaaaaugcggaggauauggggaacggaugcuuuaagaucuaccacaagugugacaaugccugcaucggcuccauuagaaacgggacauaugaucaugacguuuaccgcgacgaggcucugaauaaccgguuccagaucaaaggcguggaacucaagagcggauacaaagauuggauucuguggaucucuuuugccauuuccugcuuccuucugugugucgcccuccugggcuuuaucaugugggcuugccaaaaggggaauaucagauguaacauuugcaucuga

SEQ ID NO: 203364 - RNA, 1701 nt, Artificial Sequence; identical to SEQ ID NO: 194506
  derived and/or modified CDS sequence (opt5) from hemagglutinin__InfluenzaA__AHL90410

SEQ ID NO: 203365 - RNA, 1701 nt, Artificial Sequence
  derived and/or modified CDS sequence (opt5) from hemagglutinin__InfluenzaA__AHL90422
augaagaccaucauugcccugagcuacauccucugccugguguucgcucagaaacuucccggcaacgacaauuccacagccacgcugugucucgggcaccaugcggucccuaacggaaccauuguuaagacaaucaccaaugaucaaauugaggugacaaacgcuaccgaacuggugcagucuagcuccacaggcgagaucugcgacucuccgcaccagauccuugauggggaaaauuguacccugauugacgcccuccugggagauccccagugcgacggcuuucaaaacaaaaagugggaucuguucgucgagagaagcaaagccuauuccaauuguuacccuuaugacgugcccgauuacgcuucucuccggagccugguugccuccagcgggacgcuugaauuuaacaaugagucuuucaacuggaccggagugacacagaauggcaccuccagcgcuugcauccgcagaucuaacaauuccuuuuucagccggcugaacuggcucacacauucuaaguuuaaguauccugcccugaaugucaccaugcccaacaacgaggaguucgacaaacuuuacauuuggggcgugcaccauccugggacggauaaugaccagaucuuucuguaugcgcaggccuccggacgcauuacaguuagcaccaagagaucccaacagacagugaucccgaacauuggcucucggccccgcgucagaaauaucccuagccggaucuccauuuacuggaccaucgugaaacccggggauauucuccugaucaacagcaccggaaaucugauugcuccucgcggcuacuucaagaucagaucugggaaauccagcaucaugcggucugacgcccccauuggaaaguguaacagcgaaugcaucacaccgaauggcuccauuccuaacgacaagcccuuucagaaugugaaccgcaucacguauggcgcuuguccuagauacgucaaacagaauacccucaagcuggccacagggaugcggaacguucccgaaaaacaaacccgcggaauuuucggcgcgaucgccggguuuaucgagaauggaugggagggcaugguggaugggugguauggauucagacaccagaacucugaaggcauuggccaggcugccgaccuuaagagcacacaagcugccaucgaucagauuaaugggaaacugaaccggcucaucggaaagaccaacgagaaauuccaccagauugaaaaggaguuuuccgaaguggagggcagaauccaggaccuggagaaguacgucgaagauacgaaaauugaccuuuggagcuauaaugccgagcugcucguggcucuggaaaaccaacauacaaucgaucugaccgacucugagauguccaaacucuucgaaaagaccaagaaacagcugcgcgagaaugcggaggauauggggaacggaugcuuuaagaucuaccacaagugugacaauacaugcauuggcagcauccggaacgggaccuaugaucauaauguuuacagagacgaagcccuuaacaaucgcuuccagauuaaaggcguggagcugaagucuggauacaaagacuggauccucuggauuuccuuugcuaucagcugcuuccugcuuugugucgcccugcucggcuuuaucaugugggccugccagaaggggaacauucgguguaauaucugcauuuga

SEQ ID NO: 203366 - RNA, 1701 nt, Artificial Sequence; identical to SEQ ID NO: 194506
  derived and/or modified CDS sequence (opt5) from hemagglutinin__InfluenzaA__AHL90434

SEQ ID NO: 203367 - RNA, 1701 nt, Artificial Sequence; identical to SEQ ID NO: 194506
  derived and/or modified CDS sequence (opt5) from hemagglutinin__InfluenzaA__AHL90446

SEQ ID NO: 203368 - RNA, 1701 nt, Artificial Sequence
  derived and/or modified CDS sequence (opt5) from hemagglutinin__InfluenzaA__AHL90458
augaagaccaucauugcccugagcuacauccucugccugguguucgcucagaaacuucccggcaacgacaauuccacagccacgcugugucucgggcaccaugcggucccuaacggaaccauuguuaagacaaucaccaaugaucaaauugaggugacaaacgcuaccgaacuggugcagucuagcuccacaggcgagaucugcgacucuccgcaccagauccuugauggggaaaauugugcccugauugacgcccuccugggagauccccagugcgacggcuuucaaaacaaaaagugggaucuguucgucgagagaagcaaggcuuauuccaauuguuacccuuaugacgugcccgauuacgccucucuccggagccugguugcuuccagcgggacccuugaauuuaacaaugagucuuucaacuggacgggagugacccagaauggcacauccagcgccugcauccgcagaucuaacaauuccuuuuucagccggcugaacuggcucacccaucugaaguuuaaguauccugcgcuuaaugucacaaugcccaacaacgagcaguucgacaaacuguacauuuggggcgugcaccauccugggaccgauaaugaccagaucuuucucuaugcccaggcuucuggacgcauuacgguuuccacaaagagaagccaacagaccgugaucccgaacauuggcucccggccccgcgucagaaauaucccuucucggaucagcauuuacuggacaaucgugaaacccggggauauucugcugaucaacuccaccggaaaucucauugccccucgcggcuacuucaagaucagaagcgggaaaucuuccaucaugcggagcgacgcucccauuggaaaguguaacucugaaugcaucaccccgaauggcagcauuccuaacgacaagcccuuucagaaugugaaccgcaucacauauggcgccuguccuagauacgucaaacaaaauacgcugaaacuugcgaccgggaugcggaacguucccgagaaacagacacgcggaauuuucggcgccaucgcuggguuuaucgaaaauggaugggagggcaugguggaugggugguauggauucagacaccagaacuccgagggccggggccaagccgcugaccugaagucuacccaggccgccauugaucagaucaaugggaaacucaacagacugauuggaaagacaaacgaaaaauuccaccagaucgagaaggaauuuagcgagguggaaggccgcauucaagaccuugagaaguacgucgaggauaccaaaaucgaccugugguccuauaaugcugaacuccugguggcgcuggagaaccagcauacgauugaucucacagacagcgaaaugaauaagcuguucgagaaaaccaagaaacagcuucgggaaaacgccgaggauauggggaauggaugcuuuaagaucuaccacaagugugacaacgcuugcaucggcucuauuagaaaugggaccuaugaucaugacguuuaccgcgacgaggcccugaacaaucgguuccagaucaaaggcguggaacucaaguccggauacaaagauuggauucuguggaucagcuuugccauuucuugcuuccuucugugugucgcucuccugggcuuuaucaugugggccugccaaaaggggaacaucagauguaauauuugcaucuga

SEQ ID NO: 203369 - RNA, 1701 nt, Artificial Sequence; identical to SEQ ID NO: 194506
  derived and/or modified CDS sequence (opt5) from hemagglutinin__InfluenzaA__AHL90470

SEQ ID NO: 203370 - RNA, 1701 nt, Artificial Sequence; identical to SEQ ID NO: 194506
  derived and/or modified CDS sequence (opt5) from hemagglutinin__InfluenzaA__AHL90482

SEQ ID NO: 203371 - RNA, 1701 nt, Artificial Sequence; identical to SEQ ID NO: 194609
  derived and/or modified CDS sequence (opt5) from hemagglutinin__InfluenzaA__AHL90494

SEQ ID NO: 203372 - RNA, 1701 nt, Artificial Sequence; identical to SEQ ID NO: 194609
  derived and/or modified CDS sequence (opt5) from hemagglutinin__InfluenzaA__AHL90506

SEQ ID NO: 203373 - RNA, 1701 nt, Artificial Sequence
  derived and/or modified CDS sequence (opt5) from hemagglutinin__InfluenzaA__AHL90518
augaagaccaucauugcccugagcuacauccucugccugguguucgcucagaaacuucccggcaacgacaauuccacagccacgcugugucucgggcaccaugcggucccuaacggaaccauuguuaagacaaucaccaaugaucaaauugaggugacaaacgcuaccgaacuggugcagucuagcuccacaggcgagaucugcgacucuccgcaccagauccuugauggggaaaauuguacccugauugacgcccuccugggagauccccagugcgacggcuuucaaaacaaaaagugggaucuguucgucgagagaagcaaagccuauuccaauuguuacccuuaugacgugcccgauuacgcuucucuccggagccugguugccuccagcgggacgcuugaauuuaagaacgagucuuucaauuggaccggagugacacagaacggcaccuccagcgcuugcauccgcagaucuaauaacuccuuuuucagccggcugaauuggcucacacaucugaaguuuaaauauccugcccuuaacgucaccaugcccaauaaggagaaauucgacaagcuguacauuuggggcgugcaccauccugggacggauaacgaccagaucuuucucuaugcgcaggccucuggacgcauuacaguuuccaccaaaagaagccaacagacagugaucccgaacauuggcucccggccccgcgucagaaauaucccuucucggaucagcauuuacuggaccaucgugaagcccggggauauucugcugaucaacuccaccggaaaucucauugcuccucgcggcuacuucaagaucagaagcgggaaaucuuccaucaugcggagcgacgcccccauuggaaaguguaacucugaaugcaucacaccgaauggcagcauuccuaacgacaaacccuuucagaaugugaaccgcaucacguauggcgcuuguccuagauacgucaagcagaauacccugaaacuugccacagggaugcggaacguucccgagaagcaaacccgcggaauuuucggcgcgaucgccggguuuaucgaaaauggaugggagggcaugguggaugggugguauggauucagacaccagaacuccgagggcacaggccaggcugccgaccugaaaucuacccaagcugccauugaucagaucaaugggaagcucaaccggcugauuggaaagacgaaugaaaaauuccaccagaucgagaaggaauuuagcgagguggaaggccgcauucaggaccuugagaaauacgucgaggauacaaagaucgaccugugguccuauaacgccgaacuccugguggcucuggagaaccaacauaccauugaucucaccgacagcgaaaugaauaaacuguucgagaagacaaagaaacagcuuagagaaaacgcggaggauauggggaauggaugcuuuaagaucuaccacaaaugugacaacgccugcaucggcucuauucggaaugggaccuaugaucaugacguuuacagagacgaggcucugaacaaucgcuuccagaucaagggcguggaacucaaauccggauacaaggauuggauucuguggaucagcuuugccauuucuugcuuccuucugugugucgcccuccugggcuuuaucaugugggcuugccagaaggggaacauccgguguaauauuugcaucuga

SEQ ID NO: 203374 - RNA, 1701 nt, Artificial Sequence; identical to SEQ ID NO: 195285
  derived and/or modified CDS sequence (opt5) from hemagglutinin__InfluenzaA__AHL90530

SEQ ID NO: 203375 - RNA, 1701 nt, Artificial Sequence; identical to SEQ ID NO: 194506
  derived and/or modified CDS sequence (opt5) from hemagglutinin__InfluenzaA__AHL90542

SEQ ID NO: 203376 - RNA, 1701 nt, Artificial Sequence; identical to SEQ ID NO: 194506
  derived and/or modified CDS sequence (opt5) from hemagglutinin__InfluenzaA__AHL90554

SEQ ID NO: 203377 - RNA, 1701 nt, Artificial Sequence; identical to SEQ ID NO: 194506
  derived and/or modified CDS sequence (opt5) from hemagglutinin__InfluenzaA__AHL90566

SEQ ID NO: 203378 - RNA, 1701 nt, Artificial Sequence; identical to SEQ ID NO: 194506
  derived and/or modified CDS sequence (opt5) from hemagglutinin__InfluenzaA__AHL90578

SEQ ID NO: 203379 - RNA, 1701 nt, Artificial Sequence; identical to SEQ ID NO: 194609
  derived and/or modified CDS sequence (opt5) from hemagglutinin__InfluenzaA__AHL90590

SEQ ID NO: 203380 - RNA, 1701 nt, Artificial Sequence; identical to SEQ ID NO: 194506
  derived and/or modified CDS sequence (opt5) from hemagglutinin__InfluenzaA__AHL90602

SEQ ID NO: 203381 - RNA, 1701 nt, Artificial Sequence; identical to SEQ ID NO: 194506
  derived and/or modified CDS sequence (opt5) from hemagglutinin__InfluenzaA__AHL90614

SEQ ID NO: 203382 - RNA, 1701 nt, Artificial Sequence
  derived and/or modified CDS sequence (opt5) from hemagglutinin__InfluenzaA__AHL90638
augaagaccaucauugcccugagcuacauccucugccugguguucgcucagaaacuucccggcaacgacaauuccacagccacgcugugucucgggcaccaugcggucccuaacggaaccauuguuaagacaaucaccaaugaucaaauugaggugacaaacgcuaccgaacuggugcagucuagcuccacaggcgagaucugcgacucuccgcaccagauccuugauggggaaaauuguacccugauugacgcccuccugggagauccccagugcgacggcuuucaaaacaaaaagugggaucuguucgucgagagaagcaaagccuauuccaauuguuacccuuaugacgugcccgauuacgcuucucuccggagccugguugccuccagcgggacgcuugaauuuaacaaugagucuuucaacuggaccggagugacacagaauggcaccuccagcgcuugcauccgcagaucuaacaauuccuuuuucagccggcugaacuggcucacacaucugaaguuuaaguauccugcccuuaaugucaccaugcccaacaacgagcaguucgacaaacuguacauuuggggcgugcaccauccugggacggauaaugaccagaucuuucucuaugcgcaagccucuggacgcauuacaguuuccaccaagagaagccagcagacagugaucccgaacauuggcucccggccccgcgucagaaauaucccuucucggaucagcauuuacuggaccaucgugaaacccggggauauucugcugaucaacuccaccggaaaucucauugcuccucgcggcuacuucaagaucagaagccggaaaucuuccaucaugcgcagcgacgcccccauugggaaguguaacucugaaugcaucacaccgaauggaagcauuccuaacgacaagcccuuucagaaugugaacagaaucacguauggcgcuuguccucgguacgucaaacaaaauacccugaaacuugccacaggcaugcgcaacguucccgagaagcagaccagagggauuuucggagcgaucgccggcuuuaucgaaaaugggugggagggaaugguggauggcugguauggguuccggcaccagaacuccgagggaagaggccaagcugccgaccugaagucuacacaggcugccauugaucagaucaauggcaaacucaaccgccugauugggaagaccaacgaaaaauuccaccagaucgagaaggaauuuagcgagguggaaggacggauucaagaccuugagaaguacgucgaggauacgaaaaucgaccugugguccuauaaugccgaacuccugguggcucuggagaaccagcauacaauugaucucaccgacagcgaaaugaauaagcuguucgagaaaaccaagaaacagcuuagagaaaacgcggaggauaugggcaaugggugcuuuaagaucuaccacaagugugacaacgccugcaucggaucuauucgcaauggcacauaugaucaugacguuuaccgggacgaggcucugaacaauagauuccagaucaaagggguggaacucaaguccggcuacaaagauuggauucuguggaucagcuuugccauuucuugcuuccuucugugugucgcccuccugggauuuaucaugugggcuugccaaaagggcaacauccgcuguaauauuugcaucuga

SEQ ID NO: 203383 - RNA, 1701 nt, Artificial Sequence
  derived and/or modified CDS sequence (opt5) from hemagglutinin__InfluenzaA__AHL90650
augaagaccaucauugcccugagcuacauccucugccugguguucgcucagaaacuucccggcaacgacaauuccacagccacgcugugucucgggcaccaugcggucccuaacggaaccauuguuaagacaaucaccaaugaucaaauugaggugacaaacgcuaccgaacuggugcagucuagcuccacaggcgagaucugcgacucuccgcaccagauccuugauggggaaaauuguacccugauugacgcccuccugggagauccccagugcgacggcuuucaaaacaaaaagugggaucuguucgucgagagaagcaaagccuauuccaauuguuacccuuaugacgugcccgauuacgcuucucuccggagccugguugccuccagcgggacgcuugaauuuaacaaugagucuuucaacuggaccggagugacacagaauggcaccuccagcgcuugcauccgcagaucuaacaauuccuuuuucagccggcugaacuggcucacacaucugaaguuuaaguauccugcccuuaaugucaccaugcccaacaacgagcaguucgacaaacuguacauuuggggcgugcaccauccugggacggauaaugaccagacauuucucuaugcgcaagccucuggacgcaucaccguuuccacaaagagaagccagcagaccgugauuccgaacaucggcucccggccccgcgucagaaauauuccuucucggaucagcaucuacuggaccauugugaaacccggggauauccugcugauuaacuccacaggaaaucucaucgcuccucgcggcuacuucaagauuagaagcgggaaaucuuccaucaugcggagcgacgcccccaucggaaaguguaacucugaaugcauuacgccgaauggcagcaucccuaacgacaagcccuuucagaaugugaaccgcauuaccuauggcgcuuguccuagauacgucaaacaaaauacacugaaacuugccaccgggaugcggaacguucccgagaagcagacacgcggaaucuucggcgcgauugccggguuuaucgaaaauggaugggagggcaugguggaugggugguauggauucagacaccagaacuccgagggccggggccaagcugccgaccugaagucuacccaggcugccaucgaucagauuaaugggaaacucaacagacugaucggaaagacgaacgaaaaauuccaccagauugagaaggaauuuagcgagguggaaggccgcauccaagaccuugagaaguacgucgaggauacaaaaauugaccugugguccuauaaugccgaacuccugguggcucuggagaaccagcauaccaucgaucucaccgacagcgaaaugaauaagcuguucgagaaaacaaagaaacagcuucgggaaaacgcggaggauauggggaauggaugcuuuaagauuuaccacaagugugacaacgccugcaucggcucuaucagaaaugggaccuaugaucaugacguuuaccgcgacgaggcucugaacaaucgguuccagauuaaaggcguggaacucaaguccggauacaaagauuggauccuguggauuagcuuugccaucucuugcuuccuucugugugucgcccuccugggcuuuauuaugugggcuugccaaaaggggaacaucagauguaauaucugcauuuga

SEQ ID NO: 203384 - RNA, 1701 nt, Artificial Sequence; identical to SEQ ID NO: 194506
  derived and/or modified CDS sequence (opt5) from hemagglutinin__InfluenzaA__AHL90662

SEQ ID NO: 203385 - RNA, 1701 nt, Artificial Sequence
  derived and/or modified CDS sequence (opt5) from hemagglutinin__InfluenzaA__AHL90674
augaagaccaucauugcccugagcuacauccucugccugguguucgcucagaaacuucccggcaacgacaauuccacagccacgcugugucucgggcaccaugcggucccuaacggaaccauuguuaagacaaucaccaaugaucaaauugaggugacaaacgcuaccgaacuggugcagucuagcuccacaggcgagaucugcgacucuccgcaccagauccuugauggggaaaauuguacccugauugacgcccuccugggagauccccagugcgacggcuuucaaaacaaaaagugggaucuguucgucgagagaagcaaagccuauuccaauuguuacccuuaugacgugcccgauuacgcuucucuccggagccugguugccuccagcgggacgcuugaauuuaacaaugagucuuucaacuggaccggagugacacagaauggcaccuccagcgcuugcauccgcagaucuaacaauuccuuuuucagccggcugaacuggcucacacaucugaaguuuaaguauccugcccuuaaugucaccaugcccaacaacgagaaauucgacaagcuguacauuuggggcgugcaccauccugggacggauaaugaccagaucuuucucuaugcgcaggccucuggacgcauuacaguuuccaccaaaagaagccaacagacagugaucccgaacauuggcucccggccccgcgucagaaauaucccuucucggaucagcauuuacuggaccaucgugaagcccggggauauucugcugaucaacuccaccggaaaucucauugcuccucgcggcuacuucaaaaucagaagcgggaagucuuccaucaugcggagcgacgcccccauuggaaaguguaacucugaaugcaucacaccgaauggcagcauuccuaacgacaaacccuuucagaaugugaaccgcaucacguauggcgcuuguccuagauacgucaagcagaauacccugaaacuugccacagggaugcggaacguucccgagaagcaaacccgcggaauuuucggcgcgaucgccggguuuaucgaaaauggaugggagggcaugguggaugggugguauggauucagacaccagaacuccgagggcauuggccaggcugccgaccugaaaucuacacaagcugccaucgaucagauuaaugggaagcucaaccggcugaucggaaaaaccaacgaaaaguuccaccagauugagaaggaauuuagcgagguggaaggcagaauccaggaccuugagaaauacgucgaggauacgaagauugaccugugguccuauaaugccgaacuccugguggcucuggagaaccaacauacaaucgaucucaccgacagcgaaaugaauaaacuguucgagaagaccaaaaagcagcuucgcgaaaacgcggaggauauggggaauggaugcuuuaagaucuaccacaaaugugacaacguuugcauuggcucuauccggaaugggacauaugaucaugacguguacagagacgaggcccugaacaaucgcuuccagauuaagggcgucgaacucaaauccggauacaaggauuggauccuguggauuagcuuugcuaucucuugcuuccuucuguguguggcccuccugggcuuuaucaugugggccugccagaaagggaacauucgguguaauaucugcauuuga

SEQ ID NO: 203386 - RNA, 1701 nt, Artificial Sequence
  derived and/or modified CDS sequence (opt5) from hemagglutinin__InfluenzaA__AHL90686
augaagaccaucauugcccugagcuacauccucugccugguguucgcucagaaacuucccggcaacgacaauuccacagccacgcugugucucgggcaccaugcggucccuaacggaaccauuguuaagacaaucaccaaugaucaaauugaggugacaaacgcuaccgaacuggugcagucuagcuccacaggcgagaucugcgacucuccgcaccagauccuugauggggaaaauuguacccugauugacgcccuccugggagauccccagugcgacggcuuucaaaacaaaaagugggaucuguucgucgagagaagcaaagccuauuccaauuguuacccuuaugacgugcccgauuacgcuucucuccggagccugguugccuccagcgggacgcuugaauuuaacaaugagucuuucaacuggaccggagugacacagaauggcaccuccagcgcuugcauccgcagaucuaacaauuccuuuuucagccggcugaacuggcucacacaucugaaguuuaaguauccugcccuuaaugucaccaugcccaacaacgagcaguucgacaaacuguacauuuggggcgugcaccauccugggacggauaaugaccagaucuuucucuaugcgcaagccucuggacgcauuacaguuuccaccaagagaagccagcagacagugaucccgaacauuggcucccggccccgcgucagaaauaucccuucucggaucagcauuuacuggaccaucgugaaacccggggauauucugcugaucaacuccaccggaaaucucauugcuccucgcggcuacuucaagaucagaagcgggaaaucuuccaucaugcggagcgacgcccccauuggaaaguguaacucugaaugcaucacaccgaauggcagcauuccuaacgacaagcccuuucagaaugugaaccgcaucacguauggcgcuuguccuagauacgucaaacaaaauacccugaaacuugccacagggaugcggaacguucccgagaagcagacccgcggaauuuucggcgcgaucgccggguuuaucgaaaauggaugggagggcaugguggaugggugguauggauucagacaccagaacuccgagggccggggccaagcugccgaccugaagucuacacaggcugccauugaucagaucaaugggaaacucaacagacugauuggaaagaccaacgaaaaauuccaccagaucgagaaggaauuuagcgagguggaaggccgcauucaagaccuugagaaguacgucgaggauacgaaaaucgaccugugguccuauaaugccgaacuccugguggcuauggagaaccagcauacaauugaucugaccgacagcgaaaugaauaaacucuucgagaagaccaagaaacagcugcgggaaaacgcggaggauauggggaauggaugcuuuaagaucuaccacaagugugacaacgccugcaucggcucuauuagaaaugggacauaugaucaugacguuuaccgcgacgaggcucuuaacaaucgguuccagaucaaaggcguggaacugaaguccggauacaaagauuggauucucuggaucagcuuugccauuucuugcuuccugcuuugugucgcccugcucggcuuuaucaugugggcuugccaaaaggggaacaucagauguaauauuugcaucuga

SEQ ID NO: 203387 - RNA, 1701 nt, Artificial Sequence; identical to SEQ ID NO: 194506
  derived and/or modified CDS sequence (opt5) from hemagglutinin__InfluenzaA__AHL90698

SEQ ID NO: 203388 - RNA, 1701 nt, Artificial Sequence; identical to SEQ ID NO: 194506
  derived and/or modified CDS sequence (opt5) from hemagglutinin__InfluenzaA__AHL90710

SEQ ID NO: 203389 - RNA, 1698 nt, Artificial Sequence; identical to SEQ ID NO: 198044
  derived and/or modified CDS sequence (opt5) from hemagglutinin__InfluenzaA__AHL90722

SEQ ID NO: 203390 - RNA, 1698 nt, Artificial Sequence
  derived and/or modified CDS sequence (opt5) from hemagglutinin__InfluenzaA__AHL90746
augaaggugaaacugcucguccugcuuugcaccuucacagccacguacgcugacaccaucuguauuggcuaucacgccaacaauagcacagauaccguugacacagugcuggagaagaacgugaccgucacacauuccgugaaucuccuggaaaacucucacaaugggaaacuuugccugcucaagggaaucgcgccccugcagcugggcaacuguagcguugcuggguggauucucggaaauccugagugcgaacugcuuaucuccaaagagucuuggagcuacauuguggaaaagccgaaccccgagaauggcaccuguuauccugggcauuuugccgauuacgaggaacugagagagcaacucuccucugucagcuccuucaagcgguuugaaaucuuccccaaagagagcucuuggccuaaccacacggugaccggaguuuccgccagcugcucucauaauggcgaguccagcuuuuaucgcaaccugcuuuggcugacaggcaagaaugggcucuaccccaaccugucuaaauccuaugcuaauaacaaggaaaaagaggugcugguccucuggggagugcaccacccuccgaacaucguggaccagaagacccuguacagaacagaaaaugccuacgucagcguuguguccucucauuauagccggaaguucacccccgagauugcuaaacgcccuaaggugagagaucaggaaggccggaucaacuacuauuggacgcuucuggagcccggggacacaauuaucuuugaggccaauggaaaccucauugcgccucgcuacgccuucgcucuguccagaggcuuugggagcggaaucauuaauucuaacgcccccaugggcaaaugugaugcuaagugccagaccccgcaaggcgccaucaauuccagccuuccuuuccagaacguccaccccgugacaaucggggaauguccuaaauauguucggucugcgaagcugcgcauggugaccggacucagaaauauucccagcauccagucccggggccuguuuggggccauugcuggauucaucgagggcggguggaccggaauggucgacggcugguacggcuaucaucaccagaacgaacaagggucuggauacgccgcugaucagaaaagcacacagaaugccauuaacggcaucacgaauaaggugaacuccguuaucgagaagaugaauacccaguuuacagccguggggaaagaguucaacaagcuggaacgcagaauggagaaccucaauaaaaaggucgacgauggauucauugacaucuggaccuacaacgcugaacugcuugugcugcucgagaaugaacggacacuggauuuucacgacagcaacgucaaaaaucuuuaugagaaggugaagucucaacugaaaaacaaugcgaaggaaauuggcaacgggugcuucgaguuuuaccauaaauguaaugacgagugcauggaauccguuaagaacggcaccuaugauuaccccaaauauagcgaggaaucuaagcucaaucgcgagaagaucgacggagugaaacuggaguccaugggcgucuaccagauucuggccaucuauagcacgguggcuuccucucucguucugcuugugagccugggggccaucuccuucuggaugugcucuaacggaagccuccaguguagaauuugcaucuga

SEQ ID NO: 203391 - RNA, 1698 nt, Artificial Sequence; identical to SEQ ID NO: 195203
  derived and/or modified CDS sequence (opt5) from hemagglutinin__InfluenzaA__AHL90758

SEQ ID NO: 203392 - RNA, 1698 nt, Artificial Sequence
  derived and/or modified CDS sequence (opt5) from hemagglutinin__InfluenzaA__AHL90770
augaaggugaaacugcucguccugcuuugcaccuucacagccacguacgcugacaccaucuguauuggcuaucacgccaacaauagcacagauaccguugacacagugcuggagaagaacgugaccgucacacauuccgugaaucuccuggaaaacucucacaaugggaaacuuugccugcucaagggaaucgcgccccugcagcugggcaacuguagcguugcuggguggauucucggaaauccugagugcgaacugcuuaucuccaaagagucuuggagcuacauuguggaaaagccgaaccccgagaauggcaccuguuauccugggcauuuugccgauuacgaggaacugagagagcaacucuccucugucagcuccuucgaacgguuugagaucuuccccaaggacagcucuuggccuaaccacacggugaccggaguuuccgccagcugcucucauaauggcgaguccagcuuuuaucgcaaccugcuuuggcugacaggcaaaaaugggcucuaccccaaccugucuaaguccuaugcuaauaacaaagaaaaggaggugcugguccucuggggagugcaccacccuccgagcaucaacgaucagaaaacccuguaccauacagaaaaugccuacguguccgucguuucuagccaccauuccagaaaguucacccccgagauugcuaagcggccuaaagugcgcgaccaggaaggcagaaucaacuauuacuggacgcuucuggagcccggggauacaauuaucuuugaggccaauggaaaccucauugcgccucgguaugccuucgcucugagccgcggcuuugggucuggaaucauuaauuccaacgcccccauggacaagugugaugcuaaaugccagaccccgcaaggcgccaucaauagcucucuuccuuuccagaacgugcaccccgucacaaucggcgaauguccuaaguacgugagaagcgcgaaacugcggaugguuaccgggcuccgcaauauucccuccauccagucuagaggacuguuuggcgccauugcuggguucaucgagggaggcuggaccgggaugguggacggaugguauggcuaccaccaucagaacgaacaaggcagcggguaugccgcugaucagaaguccacacagaaugccauuaacggaaucacgaauaaagucaacagcgugaucgagaagaugaauacccaguuuacagccguuggcaaggaguucaacaaacuggaacggcgcauggagaaccucaauaagaaaguggacgauggguucauugacaucuggaccuacaacgcugaacugcuuguccugcucgagaaugaaagaacacuggacuuucacgauucuaacgugaagaaucuuuacgagaaagucaagucccaacugaagaacaaugcgaaagaaauuggaaacggcugcuucgaguuuuaucauaaguguaaugacgagugcauggaaagcgugaaaaacgggaccuacgauuaucccaaguacucugaggaauccaaacucaaucgggagaagaucgacggcguuaagcuggagagcaugggaguguaucagauucugacgaucuacuccacagucgccucuagccucgugcugcuuguuucccugggcgcuaucucuuucuggaugugcagcaacgggucccuccagugucgcauuugcaucuga

SEQ ID NO: 203393 - RNA, 1698 nt, Artificial Sequence; identical to SEQ ID NO: 195688
  derived and/or modified CDS sequence (opt5) from hemagglutinin__InfluenzaA__AHL90782

SEQ ID NO: 203394 - RNA, 1698 nt, Artificial Sequence
  derived and/or modified CDS sequence (opt5) from hemagglutinin__InfluenzaA__AHL90794
augaaggugaaacugcucguccugcuuugcaccuucacagccacguacgcugacaccaucuguauuggcuaucacgccaacaauagcacagauaccguugacacagugcuggagaagaacgugaccgucacacauuccgugaaucuccuggaaaacucucacaaugggaaacuuugccugcucaagggaaucgcgccccugcagcugggcaacuguagcguugcuggguggauucucggaaauccugagugcgaacugcuuaucuccaaagagucuuggagcuacauuguggaaaagccgaaccccgagaauggcaccuguuauccugggcauuuugccgauuacgaggaacugagagagcaacucuccucugucagcuccuucgaacgguuugagaucuuccccaaggagagcucuuggccuaaccacacggugaccggaguuuccgccagcugcucucauaauggcgaauccagcuuuuaucgcaaccugcuuuggcugacaggcaaaaaugggcucuaccccaaccugucuaaguccuaugcuaauaacaaagagaaggaagugcugguccucuggggagugcaccacccuccgaacaucggcgaccagaauacccuguaccauacagagaacgccuacgugagcgucguuuccucucacuauagcagaaaauucacccccgaaauugcuaagcggccuaaggugcgcgaucaggaggggagaaucaauuacuauuggacgcuucuggagcccggagacacaauuaucuuugaagccaacggcaaucucauugcgccucgguacgccuucgcucugucccgcggguuuggaagcggcaucauuaacucuaaugcccccauggauaaaugugacgcuaagugccagaccccgcaaggcgccaucaacuccagccuuccuuuccagaaugugcaucccgucacaaucggggaguguccuaaauaugugagaucugcgaagcugcggaugguuaccggacuccgcaacauucccagcauccaguccagaggccuguuuggggccauugcuggauucaucgaaggcggguggaccggaaugguggauggcugguacggcuaucaccaccagaaugagcaagggucuggauacgccgcugaccagaaaagcacacagaacgccauuaauggcaucacgaacaaggucaauuccgugaucgaaaagaugaacacccaguuuacagccguugggaaagaguucaacaagcuggagcggcgcauggaaaaucucaacaaaaagguggaugacggauucauugauaucuggaccuacaaugcugagcugcuuguccugcucgaaaacgagagaacacuggacuuucaugacagcaaugugaaaaaccuuuaugaaaaggucaaaucucaacugaagaauaacgcgaaggagauuggcaaugggugcuucgaguuuuaccacaaauguaacgaugaaugcauggaguccgugaagaauggcaccuaugacuaccccaaauauagcgaagagucuaagcucaaccgggagaaaaucgauggaguuaagcuggaauccaugggcguguaccagauucuggccaucuauagcacggucgcuuccucucucgugcugcuuguuagccugggggccaucuccuucuggaugugcucuaauggaagccuccagugucgcauuugcaucuga

SEQ ID NO: 203395 - RNA, 1698 nt, Artificial Sequence
  derived and/or modified CDS sequence (opt5) from hemagglutinin__InfluenzaA__AHL90806
augaaggugaaacugcucguccugcuuugcaccuucacagccacguacgcugacaccaucuguauuggcuaucacgccaacaauagcacagauaccguugacacagugcuggagaagaacgugaccgucacacauuccgugaaucuccuggaaaacucucacaaugggaaacuuugccugcucaagggaaucgcgccccugcagcugggcaacuguagcguugcuggguggauucucggaaauccugagugcgaacugcuuaucuccaaagagucuuggagcuacauuguggaaaagccgaaccccgagaauggcaccuguuauccugggcauuuugccgauuacgaggaacugagagagcaacucuccucugucagcuccuucgaacgguuugagaucuuccccaaggagagcucuuggccuaaccacacggugaccggaguuuccgccagcugcucucauaauggcgaauccagcuuuuaucgcaaccugcuuuggcugacaggcaaaaaugggcucuaccccaaccugucuaaguccuaugcuaauaacaaagagaaggaagugcugguccucuggggagugcaccacccuccgaacaucguggaccagaaaacccuguacagaacagagaaugccuacgucagcguuguguccucucauuauagccggaaguucacccccgaaauugcuaagcgcccuaaagugagagaucaggagggccggaucaacuacuauuggacgcuucuggagcccggggacacaauuaucuuugaagccaauggaaaccucauugcgccucgcuacgccuucgcucuguccagaggcuuugggagcggaaucauuaauucuaacgcccccauggauaagugugacgcuaaaugccagaccccgcaaggcgccaucaauuccagccuuccuuuccagaacguccaccccgugacaaucggcgaguguccuaaguauguucggucugcgaaacugcgcauggugaccgggcucagaaauauucccagcauccagucccggggacuguuuggcgccauugcuggguucaucgaaggaggcuggaccgggauggucgauggaugguacggcuaucaucaccagaacgagcaaggcucuggguacgccgcugaccaaaagagcacacagaaugccauuaacggaaucacgaauaaagugaacuccguuaucgaaaagaugaauacccaguuuacagccgugggcaaggaguucaacaaacuggagcgcagaauggaaaaccucaauaagaaagucgaugacggguucauugauaucuggaccuacaacgcugagcugcuugugcugcucgaaaaugagcggacacuggacuuucacgacagcaacgucaagaaucuuuaugaaaaagugaagucucagcugaagaacaaugcgaaagagauuggaaacggcugcuucgaguuuuaccauaaguguaaugaugaaugcauggaguccguuaaaaacgggaccuaugacuaccccaaguauagcgaagagucuaaacucaaucgcgagaagaucgauggcgugaagcuggaauccaugggagucuaccagauucuggccaucuauagcacgguggcuuccucucucguucugcuuaucagccugggcgccauuuccuucuggaugugcucuaacgggagccuccaguguagaaucugcauuuga

SEQ ID NO: 203396 - RNA, 1698 nt, Artificial Sequence; identical to SEQ ID NO: 198044
  derived and/or modified CDS sequence (opt5) from hemagglutinin__InfluenzaA__AHL90818

SEQ ID NO: 203397 - RNA, 1698 nt, Artificial Sequence; identical to SEQ ID NO: 198044
  derived and/or modified CDS sequence (opt5) from hemagglutinin__InfluenzaA__AHL90830

SEQ ID NO: 203398 - RNA, 1698 nt, Artificial Sequence; identical to SEQ ID NO: 195203
  derived and/or modified CDS sequence (opt5) from hemagglutinin__InfluenzaA__AHL90842

SEQ ID NO: 203399 - RNA, 1698 nt, Artificial Sequence; identical to SEQ ID NO: 197585
  derived and/or modified CDS sequence (opt5) from hemagglutinin__InfluenzaA__AHL90854

SEQ ID NO: 203400 - RNA, 1698 nt, Artificial Sequence; identical to SEQ ID NO: 195203
  derived and/or modified CDS sequence (opt5) from hemagglutinin__InfluenzaA__AHL90866

SEQ ID NO: 203401 - RNA, 1698 nt, Artificial Sequence; identical to SEQ ID NO: 197585
  derived and/or modified CDS sequence (opt5) from hemagglutinin__InfluenzaA__AHL90878

SEQ ID NO: 203402 - RNA, 1698 nt, Artificial Sequence; identical to SEQ ID NO: 198044
  derived and/or modified CDS sequence (opt5) from hemagglutinin__InfluenzaA__AHL90890

SEQ ID NO: 203403 - RNA, 1698 nt, Artificial Sequence; identical to SEQ ID NO: 197585
  derived and/or modified CDS sequence (opt5) from hemagglutinin__InfluenzaA__AHL90902

SEQ ID NO: 203404 - RNA, 1698 nt, Artificial Sequence; identical to SEQ ID NO: 195203
  derived and/or modified CDS sequence (opt5) from hemagglutinin__InfluenzaA__AHL90914

SEQ ID NO: 203405 - RNA, 1698 nt, Artificial Sequence; identical to SEQ ID NO: 197585
  derived and/or modified CDS sequence (opt5) from hemagglutinin__InfluenzaA__AHL90938

SEQ ID NO: 203406 - RNA, 1698 nt, Artificial Sequence; identical to SEQ ID NO: 197585
  derived and/or modified CDS sequence (opt5) from hemagglutinin__InfluenzaA__AHL90950

SEQ ID NO: 203407 - RNA, 1698 nt, Artificial Sequence; identical to SEQ ID NO: 197585
  derived and/or modified CDS sequence (opt5) from hemagglutinin__InfluenzaA__AHL90962

SEQ ID NO: 203408 - RNA, 1698 nt, Artificial Sequence
  derived and/or modified CDS sequence (opt5) from hemagglutinin__InfluenzaA__AHL90974
augaaggugaaacugcucguccugcuuugcaccuucacagccacguacgcugacaccaucuguauuggcuaucacgccaacaauagcacagauaccguugacacagugcuggagaagaacgugaccgucacacauuccgugaaucuccuggaaaacucucacaaugggaaacuuugccugcucaagggaaucgcgccccugcagcugggcaacuguagcguugcuggguggauucucggaaauccugagugcgaacugcuuaucuccaaagagucuuggagcuacauuguggaaaagccgaaccccgagaauggcaccuguuauccugggcauuuugccgauuacgaggaacugagagagcaacucuccucugucagcuccuucgaacgguuugagaucuuccccaaggagagcucuuggccuaaccacacggugaccggaguuuccgccagcugcucucauaauggcgaauccagcuuuuaucgcaaccugcuuuggcugacaggcaaaaaugggcucuaccccaaccugucuaaguccuaugcuaauaacaaagagaaggaagugcugguccucuggggagugcaccacccuccgagcaucuccgaccagaaaacccuguaccauacagagaacgccuacgugucugucguuagcucccacuauagcagaaaguucacccccgaaguggcuaagcggccuaaagugcgcgaucaggagggcagaauuaauuacuauuggacgcuucuggagcccggggacacaaucauuuuugaagccaacggaaaucucaucgcgccucgguacgccuucgcucugucucgcggcuuuggguccggaauuaucaacagcaaugcccccauggauaagugugacgcuaaaugccagaccccgcaaggcgccauuaacucuagccuuccuuuccagaauguccaucccgugacaaucggcgaguguccuaaguauguuagauccgcgaaacugcggauggugaccgggcuccgcaacauccccucuauucagagcagaggacuguuuggcgccaucgcuggguucauugaaggaggcuggaccgggauggucgauggaugguacggcuaucaccaccagaaugagcaaggcuccggguacgccgcugaccagaagucuacacagaacgccaucaauggaauuacgaacaaagugaauagcguuaucgaaaagaugaacacccaguuuacagccgugggcaaggaguucaauaaacuggagcggcgcauggaaaaccucaacaagaaagucgaugacggguucaucgauauuuggaccuacaaugcugagcugcuugugcugcucgaaaacgagagaacacuggacuuucaugacuccaaugucaagaaccuuuaugaaaaagugaagggacaacugaagaauaacgcgaaagagaucggcaaugggugcuucgaguuuuaccacaaguguaacgaugaaugcauggagagcguuaaaaauggcaccuaugacuaccccaaguauucugaagaguccaaacucaaccgggagaagauugauggagugaagcuggaaagcaugggcgucuaccagauccuggccauuuauuccacgguggcuucuagccucguucugcuugugucccugggggccaucucuuucuggaugugcagcaauggaucccuccagugucgcaucugcauuuga

SEQ ID NO: 203409 - RNA, 1698 nt, Artificial Sequence
  derived and/or modified CDS sequence (opt5) from hemagglutinin__InfluenzaA__AHL90986
augaaggugaaacugcucguccugcuuugcaccuucacagccacguacgcugacaccaucuguauuggcuaucacgccaacaauagcacagauaccguugacacagugcuggagaagaacgugaccgucacacauuccgugaaucuccuggaaaacucucacaaugggaaacuuugccugcucaagggaaucgcgccccugcagcugggcaacuguagcguugcuggguggauucucggaaauccugagugcgaacugcuuaucuccaaagagucuuggagcuacauuguggaaaagccgaaccccgagaauggcaccuguuauccugggcauuuugccgauuacgaggaacugagagagcaacucuccucugucagcuccuucgaacgguuugagaucuuccccaaggagagcucuuggccuaaccacacggugaccggaguuuccgccagcugcucucauaauggcgaauccagcuuuuaucgcaaccugcuuuggcugacagugaaaaauggccucuaccccaaccugucuaaguccuaugcuaauaacaaagagaaggaaguccuggugcucuggggagugcaccacccuccgaacaucgucgaccagaaaacccuguacagaacagagaaugccuacguuagcgugguguccucucauuauagccggaaguucacccccgaaauugcuaagcgcccuaaagucagagaucaggaggggcggaucaacuacuauuggacgcuucuggagcccggcgacacaauuaucuuugaagccaaugggaaccucauugcgccucgcuacgccuucgcucuguccaagggauuuggcagcgggaucauuaauucuaacgcccccauggauaaaugugacgcuaagugccagaccccgagaggagccaucaauuccagccuuccuuuccaaaacgugcaccccguuacaaucggcgaguguccuaaauaugugcggucugcgaagcugcgcauggucaccggccucagaaauauucccagcauccagucccgggggcuguuuggagccauugcuggcuucaucgaagggggauggaccggcaugguggaugggugguacggauaucaucaccagaacgagcagggcucuggcuacgccgcugaccagaaaagcacacaaaaugccauuaacgggaucacgaauaagguuaacuccgugaucgaaaagaugaauacccaguuuacagccgucggaaaagaguucaacaagcuggagcgcagaauggaaaaccucaauaaaaagguggaugacggcuucauugauaucuggaccuacaacgcugagcugcuuguccugcucgaaaaugagcggacacuggacuuucacgacagcaacgugaaaaaucuuuaugaaaagguuaagucucagcugaaaaacaaugcgaaggagauugggaacggaugcuucgaguuuuaccauaaauguaaugaugaaugcauggaguccgugaagaacggcaccuaugacuaccccaaauauagcgaagagucuaagcucaaucgcgagaagaucgauggggucaaacuggaauccaugggcguguaccaaauucuggccaucuauagcacgguugcuuccucucucgugcugcuugucagccugggagccaucuccuucuggaugugcucuaacggcagccuccaguguagaauuugcaucuga

SEQ ID NO: 203410 - RNA, 1698 nt, Artificial Sequence
  derived and/or modified CDS sequence (opt5) from hemagglutinin__InfluenzaA__AHL91010
augaaggugaaacugcucguccugcuuugcaccuucacagccacguacgcugacaccaucuguauuggcuaucacgccaacaauagcacagauaccguugacacagugcuggagaagaacgugaccgucacacauuccgugaaucuccuggaaaacucucacaaugggaaacuuugccugcucaagggaaucgcgccccugcagcugggcaacuguagcguugcuggguggauucucggaaauccugagugcgaacugcuuaucuccaaagagucuuggagcuacauuguggaaaagccgaaccccgagaauggcaccuguuauccugggcauuuugccgauuacgaggaacugagagagcaacucuccucugucagcuccuucgaacgguuugagaucuuccccaaggacagcucuuggccuaaccacacggugaccggaguuuccgccagcugcucucauaauggcgaguccagcuuuuaucgcaaccugcuuuggcugacaggcaaaaaugggcucuaccccaaccugucuaaguccuaugcuaauaacaaagaaaaggaggugcugguccucuggggagugcaccacccuccgagcaucaacgaucagaaaacccuguaccauacagaaaaugccuacguguccgucguuucuagccacuauuccagaaaguucacccccgagauugcuaagcggccuaaagugcgcgaccaggaaggcagaaucaacuacuauuggacgcuucuggagcccggggauacaauuaucuuugaggccaauggaaaccucauugcgccucgguacgccuucgcucugagccgcggcuuugggucuggaaucauuaauuccaacgcccccauggacaagugugaugcuaaaugccagaccccgcaaggcgccaucaauagcucucuuccuuuccagaacgugcaucccgucacaaucggcgaauguccuaaguaugugagaagcgcgaaacugcggaugguuaccgggcuccgcaauauucccuccauccagucuagaggacuguuuggcgccauugcuggguucaucgagggaggcuggaccgggaugguggacggaugguacggcuaucaccaccagaacgaacaaggcagcggguacgccgcugaucagaaguccacacagaaugccauuaacggaaucacgaauaaagucaacagcgugaucgagaagaugaauacccaguuuacagccguuggcaaggaguucaacaaacuggaacggcgcauggagaaccucaauaagaaaguggacgauggguucauugacaucuggaccuacaacgcugaacugcuuguccugcucgagaaugaaagaacacuggacuuucaugauucuaacgugaagaaucuuuaugagaaagucaagucccaacugaagaacaaugcgaaagaaauuggaaacggcugcuucgaguuuuaccacaaguguaaugacgagugcauggaaagcgugaaaaacgggaccuaugauuaccccaaguauucugaggaauccaaacucaaucgggagaagaucgacggcguuaagcuggagagcaugggaguguaccagauucugacgaucuauuccacagucgccucuagccucgugcugcuuguuucccugggcgcuaucucuuucuggaugugcagcaacgggucccuccagugucgcauuugcaucuga

SEQ ID NO: 203411 - RNA, 1698 nt, Artificial Sequence
  derived and/or modified CDS sequence (opt5) from hemagglutinin__InfluenzaA__AHL91022
augaaggugaaacugcucguccugcuuugcaccuucacagccacguacgcugacaccaucuguauuggcuaucacgccaacaauagcacagauaccguugacacagugcuggagaagaacgugaccgucacacauuccgugaaucuccuggaaaacucucacaaugggaaacuuugccugcucaagggaaucgcgccccugcagcugggcaacuguagcguugcuggguggauucucggaaauccugagugcgaacugcuuaucuccaaagagucuuggagcuacauuguggaaaagccgaaccccgagaauggcaccuguuauccugggcauuuugccgauuacgaggaacugagagagcaacucuccucugucagcuccuucgaacgguuugagaucuuccccaaggacagcucuuggccuaaccacacggugaccggaguuuccgccagcugcucucauaauggcgagaacuccuuuuaucgcaaucugcuuuggcugacaggcaaaaacgggcucuaccccaaucugagcaagucuuaugcuaacaacaaagaaaaggaggugcugguccucuggggagugcaccacccuccguccaucaaugaucagaaaacccuguaccauacagaaaacgccuacgugagcgucguuuccucucacuauagcagaaaguucacccccgagauugcuaagcggccuaaagugcgcgaccaggaaggcagaaucaauuacuauuggacgcuucuggagcccggggauacaauuaucuuugaggccaacggaaaucucauugcgccucgguacgccuucgcucugucccgcggcuuugggagcggaaucauuaacucuaaugcccccauggacaagugugaugcuaaaugccagaccccgcaaggcgccaucaacuccagccuuccuuuccagaaugugcaucccgucacaaucggcgaauguccuaaguaugugagaucugcgaaacugcggaugguuaccgggcuccgcaacauucccagcauccaguccagaggacuguuuggcgccauugcuggguucaucgagggaggcuggaccgggaugguggacggaugguacggcuaucaccaccagaaugaacaaggcucuggguacgccgcugaucaaaagagcacacagaacgccauuaauggaaucacgaacaaagucaauuccgugaucgagaagaugaacacccaguuuacagccguuggcaaggaguucaacaaacuggaacggcgcauggagaaucucaacaagaaaguggacgauggguucauugacaucuggaccuacaaugcugaacugcuuguccugcucgagaacgaaagaacacuggacuuucaugauagcaaugugaagaaccuuuaugagaaagucaagucucagcugaagaauaacgcgaaagaaauuggaaauggcugcuucgaguuuuaccacaaguguaacgacgagugcauggaauccgugaaaaaugggaccuaugauuaccccaaguauagcgaggaaucuaaacucaaccgggagaagaucgacggcguuaagcuggaguccaugggaguguaccagauucugacgaucuauagcacagucgccuccucucucgugcugcuuguuagccugggcgcuaucuccuucuggaugugcucuaaugggagccuccagugucgcauuugcaucuga

SEQ ID NO: 203412 - RNA, 1701 nt, Artificial Sequence; identical to SEQ ID NO: 194506
  derived and/or modified CDS sequence (opt5) from hemagglutinin__InfluenzaA__AHL91034

SEQ ID NO: 203413 - RNA, 1701 nt, Artificial Sequence; identical to SEQ ID NO: 197572
  derived and/or modified CDS sequence (opt5) from hemagglutinin__InfluenzaA__AHL91046

SEQ ID NO: 203414 - RNA, 1701 nt, Artificial Sequence; identical to SEQ ID NO: 203386
  derived and/or modified CDS sequence (opt5) from hemagglutinin__InfluenzaA__AHL91058

SEQ ID NO: 203415 - RNA, 1701 nt, Artificial Sequence
  derived and/or modified CDS sequence (opt5) from hemagglutinin__InfluenzaA__AHL91070
augaagaccaucauugcccugagcuacauccucugccugguguucgcucagaaacuucccggcaacgacaauuccauggccacacugugucucgggcaccaugcggucccuaacggaacgauuguuaagaccaucacaaaugaucaaauugaggugaccaacgcuacagaacuggugcagucuagcuccaccggcgagaucugcgacucuccgcaccagauccuugauggggaaaauuguacacugauugacgcccuccugggagauccccagugcgacggcuuucaaaacaaaaagugggaucuguucgucgagagaagcaaagccuauuccaauuguuacccuuaugacgugcccgauuacgcuucucuccggagccugguugccuccagcgggacccuugaauuuaacaaugagucuuucaacuggacgggagugacccagaauggcacauccagcgcuugcaugcgcagaucuaacaauuccuuuuucagccggcugaacuggcucacccaucugaaguuuaaguauccugcccuuaaugucacaaugcccaacaacgagcaguucgacaaacuguacaucuggggcgugcaccauccugggaccgauaaugaccagauuuuucucuaugcgcaagccucuggacgcaucacgguuuccacaaagagaagccagcagaccgugauuccgaacaucggcucccggccccgcgucagaaauauuccuucucggaucagcaucuacuggacaauugugaaacccggggauauccugcugauuaacuccaccggaaaucucaucgcuccucgcggcuacuucaagauuagaagcgggaaaucuuccaucaugcggagcgacgcccccaucggaaaguguaacucugaaugcauuaccccgaauggcagcaucccuaacgacaagcccuuucagaaugugaaccgcauuacauauggcgcuuguccuagauacgucaaacaaaauacgcugaaacuugccaccgggaugcggaacguucccgagaagcagacacgcggaaucuucggcgcgauugccggguuuaucgaaaauggaugggagggcaugguggaugggugguauggauucagacaccagaacuccgagggccggggccaagcugccgaccugaagucuacccaggcugccaucgaucagauuaaugggaaacucaacagacugaucggaaagacaaacgaaaaauuccaccagauugagaaggaauuuagcgagguggaaggccgcauccaagaccuugagaaguacgucgaggauaccaaaauugaccugugguccuauaaugccgaacuccugguggcucuggagaaccagcauacgaucgaucucacagacagcgaaaugaauaagcuguucgagaaaaccaagaaacagcuucgggaaaacgcggaggauauggggaauggaugcuuuaagauuuaccacaagugugacaacgccugcaucggcucuaucagaaaugggaccuaugaucaugacguuuaccgcgacgaggcucugaacaaucgguuccagauuaaaggcguggaacucaaguccggauacaaagauuggauccuguggauuagcuuugccaucucuugcuuccuucugugugucgcccuccugggcuuuauuaugugggcuugccaaaaggggaacaucagauguaauaucugcauuuga

SEQ ID NO: 203416 - RNA, 1701 nt, Artificial Sequence
  derived and/or modified CDS sequence (opt5) from hemagglutinin__InfluenzaA__AHL91082
augaagaccaucauugcccugagcuacauccucugccugguguucgcucagaaacuucccggcaacgacaauuccacagccacgcugugucucgggcaccaugcggucccuaacggaaccauuguuaagacaaucaccaaugaucaaauugaggugacaaacgcuaccgaacuggugcagucuagcuccacaggcgagaucugcgacucuccgcaccagauccuugauggggaaaauuguacccugauugacgcccuccugggagauccccagugcgacggcuuucaaaacaaaaagugggaucuguucgucgagagaagcaaagccuauuccaauuguuacccuuaugacgugcccgauuacgcuucucuccggagccugguugccuccagcgggacgcuugaauuuaacaaugagucuuucaacuggaccggagugacacagaauggcaccuccagcgcuugcauccgcagaucuaacaauuccuuuuucagccggcugaacuggcucacacaucugaaguuuaaguauccugcccuuaaugucaccaugcccaacaacgagcaguucgacaaacuguacauuuggggcgugcaccauccugggacggauaaugaccagaucuuucucuaugcgcaagccucuggacgcauuacaguuuccaccaagagaagccagcagacagugaucccgaacauuggcucccggccccgcgucagaaauaucccuucucggaucagcauuuacuggaccaucgugaaacccggggauauucugcugaucaacuccaccggaaaucucauugcuccucgcggcuacuucaagaucagaagcgggaaaucuuccaucaugcggagcgacgcccccauuggaaaguguaacucugaaugcaucacaccgaauggcagcauuccuaacgacaagcccuuucagaaugugaaccgcaucacguauggcgcuuguccuauuuacgucaaacaaaauacccugaaacuugccacagggaugagaaacguucccgagaagcagacccggggaaucuucggcgcgaucgccggguuuauugaaaauggaugggagggcaugguggaugggugguauggauuccgccaccagaacuccgagggcagaggccaagcugccgaccugaagucuacacaggcugccaucgaucagauuaaugggaaacucaaccggcugaucggaaagaccaacgaaaaauuccaccagauugagaaggaauuuagcgagguggaaggcagaauccaagaccuugagaaguacgucgaggauacgaaaauugaccugugguccuauaaugccgaacuccugguggcucuggagaaccagcauacaaucgaucucaccgacagcgaaaugaauaagcuguucgagaaaaccaagaaacagcuucgcgaaaacgcggaggauauggggaauggaugcuuuaagaucuaccacaagugugacaacgccugcauuggcucuauccggaaugggacauaugaucaugacguuuacagagacgaggcucugaacaaucgcuuccagauuaaaggcguggaacucaaguccggauacaaagauuggauccuguggauuagcuuugccaucucuugcuuccuucugugugucgcccuccugggcuuuaucaugugggcuugccaaaaggggaacauucgguguaauaucugcauuuga

SEQ ID NO: 203417 - RNA, 1701 nt, Artificial Sequence; identical to SEQ ID NO: 197491
  derived and/or modified CDS sequence (opt5) from hemagglutinin__InfluenzaA__AHL91094

SEQ ID NO: 203418 - RNA, 1701 nt, Artificial Sequence
  derived and/or modified CDS sequence (opt5) from hemagglutinin__InfluenzaA__AHL91106
augaagaccaucauugcccugagcuacauccucugccugguguucgcucagaaacuucccggcaacgacaauuccacagccacgcugugucucgggcaccaugcggucccuaacggaaccauuguuaagacaaucaccaaugaucaaauugaggugacaaacgcuaccgaacuggugcagucuagcuccaaaggcgagaucugcgacucuccgcaccagauccuugauggggaaaauuguacacugauugacgcccuccugggagauccccagugcgacggcuuucaaaacaagaaaugggaucuguucgucgagagaagcaaggccuauuccaauuguuacccuuaugacgugcccgauuacgcuucucuccggagccugguugccuccagcgggacccuugaauuuaacaaugagucuuucaacuggacgggagugacccagaauggcacauccagcgcuugcauccgcagaucuaacaauuccuuuuucagccggcugaacuggcucacccaucugaaguuuaaauauccugcccuuaaugucacaaugcccaacaacgagcaguucgacaagcuguacauuuggggcgugcaccauccugggaccgauaaugaccagaucuuucucuaugcgcaagccucuggacgcauuacgguuuccacaaaaagaagccagcagaccgugaucccgaacauuggcucccggccccgcgucagaaauaucccuucucggaucagcauuuacuggacaaucgugaagcccggggauauucugcugaucaacuccaccggaaaucucauugcuccucgcggcuacuucaaaaucagaagcgggaagucuuccaucaugcggagcgacgcccccauuggaaaguguaacucugaaugcaucaccccgaauggcagcauuccuaacgacaaacccuuucagaaugugaaccgcaucacauauggcgcuuguccuagauacgucaagcaaaauacgcugaaacuugccaccgggaugcggaacguucccgagaagcagacacgcggaauuuucggcgcgaucgccggguuuaucgaaaauggaugggagggcaugguggaugggugguauggauucagacaccagaacuccgagggccggggccaagcugccgaccugaaaucuacccaggcugccauugaucagaucaaugggaagcucaacagacugauuggaaaaacaaacgaaaaguuccaccagaucgagaaggaauuuagcgagguggaaggccgcauucaagaccuugagaaauacgucgaggauaccaagaucgaccugugguccuauaaugccgaacuccugguggcucuggagaaccagcauacgauugaucucacagacagcgaaaugaauaaacuguucgagaagaccaaaaagcagcuucgggaaaacgcggaggauauggggaauggaugcuuuaagaucuaccacaaaugugacaacgccugcaucggcucuauuagaaaugggaccuaugaucaugacguuuaccgcgacgaggcucugaacaaucgguuccagaucaagggcguggaacucaaauccggauacaaggauuggauucuguggaucagcuuugccauuucuugcuuccuucugugugucgcccuccugggcuuuaucaugugggcuugccaaaaagggaacaucagauguaauauuugcaucuga

SEQ ID NO: 203419 - RNA, 1701 nt, Artificial Sequence
  derived and/or modified CDS sequence (opt5) from hemagglutinin__InfluenzaA__AHL91118
augaagaccaucauugcccugagcuacauccucugccugguguucgcucagaaacuucccggcaacgacaauuccacagccacgcugugucucgggcaccaugcggucccuaacggaaccauuguuaagacaaucaccaaugaucaaauugaggugacaaacgcuaccgaacuggugcagucuagcuccacaggcgagaucugcgacucuccgcaccagauccuugauggggaaaauuguacccugauugacgcccuccugggagauccccagugcgacggcuuucaaaacaaaaagugggaucuguucgucgagagaagcaaagccuauuccaauuguuacccuuaugacgugcccgauuacgcuucucuccggagccugguugccuccagcgggacgcuugaauuuaacaaugagucuuucaacuggaccggagugacacagaauggcaccuccagcgcuugcauccgcagaucuaacaauuccuuuuucagcaagcugaacuggcucacacaucugaaguuuaaauauccugcccuuaaugucaccaugcccaacaacgagcaguucgacaagcuguacauuuggggcgugcaccauccugggacggauaaugaccagaucuuucucuaugcgcaagccucuggacggauuacaguuuccaccaaacgcagccagcagacagugaucccgaacauuggcuccagaccccggguccgcaauaucccuucuagaaucagcauuuacuggaccaucgugaagcccggggauauucugcugaucaacuccaccggaaaucucauugcuccucggggcuacuucaaaauccgcagcgggaagucuuccaucaugagaagcgacgcccccauuggaaaguguaacucugaaugcaucacaccgaauggcagcauuccuaacgacaaacccuuucagaaugugaaccggaucacguauggcgcuuguccucgcuacgucaagcaaaauacccugaaacuugccacagggaugagaaacguucccgagaagcagacccggggaauuuucggcgcgaucgccggguuuaucgaaaauggaugggagggcaugguggaugggugguauggauuccgccaccagaacuccgagggcagaggccaagcugccgaccugaaaucuacacaggcugccauugaucagaucaaugggaagcucaaccggcugauuggaaaaaccaacgaaaaguuccaccagaucgagaaggaauuuagcgagguggaaggccgcauucaagaccuugagaaauacgucgaggauacgaagaucgaccugugguccuauaaugccgaacuccuggugacacuggagaaccagcauaccauugaucucaccgacagcgaaaugaauaaacuguucgagaagaccaaaaagcagcuuagagaaaacgcugaggauauggggaauggaugcuuuaagaucuaccacaaaugugacaacgcgugcaucggcucuauucggaaugggacauaugaucaugacguuuacagagacgaggcccugaacaaucgcuuccagaucaagggcguggaacucaaauccggauacaaggauuggauucuguggaucagcuuugcuauuucuugcuuccuucugugugucgcccuccugggcuuuaucaugugggccugccaaaaagggaacauccgguguaauauuugcaucuga

SEQ ID NO: 203420 - RNA, 1701 nt, Artificial Sequence
  derived and/or modified CDS sequence (opt5) from hemagglutinin__InfluenzaA__AHL91130
augaagaccaucauugcccugagcuacauccucugccugguguucgcucagaaacuucccggcaacgacaauuccacagccacgcugugucucgggcaccaugcggucccuaacggaaccauuguuaagacaaucaccaaugaucaaauugaggugacaaacgcuaccgaacuggugcagucuagcuccacaggcgagaucugcgacucuccgcaccagauccuugauggggaaaauuguacccugauugacgcccuccugggagauccccagugcgacggcuuucaaaacaaaaagugggaucuguucgucgagagaagcaaagccuauuccaauuguuacccuuaugacgugcccgauuacgcuucucuccggagccugaucgccuccagcgggacgcuugaauuuaacaaugagucuuucaacuggaccggaguuacacagaauggcaccuccagcgcuugcauucgcagaucuaacaauuccuuuuucagccggcugaacuggcucacacaucugaaguuuaaguauccugcccuuaaugugaccaugcccaacaacgagcaguucgacaaacuguacaucuggggcguccaccauccugggacggauaaugaccagauuuuucucuaugcgcaagccucuggacgcaucacaguguccaccaagagaagccagcagacaguuauuccgaacaucggcucccggccccgcgugagaaauaucccuucucggauuagcaucuacuggaccauugucaaacccggggauauccugcugauuaacuccaccggaaaucucaucgcuccucgcggcuacuucaagaucagaagcgggaaaucuuccauuaugcggagcgacgcccccaucggaaaguguaacucugaaugcauuacaccgaauggcagcaucccuaacgacaagcccuuucagaaugugaaccgcauuacguauggcgcuuguccuagauacgugaaacaaaauacccugaaacuugccacagggaugcggaacguccccgagaagcagacccgcggaaucuucggcgcgaucgccggguuuauugaaaauggaugggagggcaugguugaugggugguauggauucagacaccagaacuccgagggccggggccaagcugccgaccugaagucuacacaggcugccaucgaucagauuaaugggaaacucaacagacugaucggaaagaccaacgaaaaauuccaccagauugagaaggaauuuagcgagguggaaggccgcauccaagaccuugagaaguacguggaggauacgaaaauugaccugugguccuauaaugccgaacuccuggucgcucuggagaaccagcauacaaucgaucucaccgacagcgaaaugaauaagcuguucgagaaaaccaagaaacagcuucgggaaaacgcggaggauauggggaauggaugcuuuaagaucuaccacaagugugacaacgccugcauuggcucuaucagaaaugggacauaugaucauaacguguaccgcgacgaggcucugaauaaccgguuccagauuaaaggcguugaacucaaguccggauacaaagacuggauccuguggauuagcuuugccaucucuugcuuccuucuguguguggcccuccugggcuuuaucaugugggcuugccaaaaggggaauauuagauguaacaucugcauuuga

SEQ ID NO: 203421 - RNA, 1701 nt, Artificial Sequence; identical to SEQ ID NO: 194506
  derived and/or modified CDS sequence (opt5) from hemagglutinin__InfluenzaA__AHL91142

SEQ ID NO: 203422 - RNA, 1701 nt, Artificial Sequence; identical to SEQ ID NO: 194506
  derived and/or modified CDS sequence (opt5) from hemagglutinin__InfluenzaA__AHL91154

SEQ ID NO: 203423 - RNA, 1701 nt, Artificial Sequence; identical to SEQ ID NO: 192702
  derived and/or modified CDS sequence (opt5) from hemagglutinin__InfluenzaA__AHL91166

SEQ ID NO: 203424 - RNA, 1701 nt, Artificial Sequence; identical to SEQ ID NO: 202539
  derived and/or modified CDS sequence (opt5) from hemagglutinin__InfluenzaA__AHL94984

SEQ ID NO: 203425 - RNA, 1701 nt, Artificial Sequence; identical to SEQ ID NO: 202539
  derived and/or modified CDS sequence (opt5) from hemagglutinin__InfluenzaA__AHL94996

SEQ ID NO: 203426 - RNA, 1701 nt, Artificial Sequence; identical to SEQ ID NO: 201907
  derived and/or modified CDS sequence (opt5) from hemagglutinin__InfluenzaA__AHL95008

SEQ ID NO: 203427 - RNA, 1701 nt, Artificial Sequence; identical to SEQ ID NO: 202069
  derived and/or modified CDS sequence (opt5) from hemagglutinin__InfluenzaA__AHL95020

SEQ ID NO: 203428 - RNA, 1701 nt, Artificial Sequence; identical to SEQ ID NO: 202066
  derived and/or modified CDS sequence (opt5) from hemagglutinin__InfluenzaA__AHL95032

SEQ ID NO: 203429 - RNA, 1701 nt, Artificial Sequence; identical to SEQ ID NO: 201940
  derived and/or modified CDS sequence (opt5) from hemagglutinin__InfluenzaA__AHL95044

SEQ ID NO: 203430 - RNA, 1701 nt, Artificial Sequence; identical to SEQ ID NO: 201930
  derived and/or modified CDS sequence (opt5) from hemagglutinin__InfluenzaA__AHL95056

SEQ ID NO: 203431 - RNA, 1701 nt, Artificial Sequence; identical to SEQ ID NO: 202069
  derived and/or modified CDS sequence (opt5) from hemagglutinin__InfluenzaA__AHL95068

SEQ ID NO: 203432 - RNA, 1701 nt, Artificial Sequence; identical to SEQ ID NO: 202617
  derived and/or modified CDS sequence (opt5) from hemagglutinin__InfluenzaA__AHL95080

SEQ ID NO: 203433 - RNA, 1701 nt, Artificial Sequence; identical to SEQ ID NO: 201940
  derived and/or modified CDS sequence (opt5) from hemagglutinin__InfluenzaA__AHL95092

SEQ ID NO: 203434 - RNA, 1701 nt, Artificial Sequence
  derived and/or modified CDS sequence (opt5) from hemagglutinin__InfluenzaA__AHL95104
augaagaccaucauugcccugagcuacauccucugccugguguucgcucagaaacuucccggcaacgacaauuccacagccacgcugugucucgggcaccaugcggucccuaacggaaccauuguuaagacaaucaccaaugauagaauugaggugacaaacgcuaccgaacuggugcaaaauucuagcaucggcgagaucugcgacuccccgcaccagauucuugauggggaaaacuguacacugaucgacgcccuccugggagauccccagugcgacggcuuucagaauaaaaagugggaucuguucgucgagcggucuaaagccuauagcaacuguuacccuuaugacgugcccgauuacgcuucccuccgcucucugguugccagcuccgggacccuugaauuuaauaacgagagcuucaauugggcuggagugacgcaaaacggcaccucuuccgccugcaugagaggcagcaauucuuccuuuuucagccggcugaacuggcucacacaucugaauuuuaaguauccugcgcuuaacgucaccaugcccaacaaugagcaguucgacaagcuguacauuuggggagugcaccauccugggacagauaaagaccagaucuuucucuaugcccagucuuccggccgcauuaccguuagcacgaagagaucccaacaggcugugaucccgaacauugggucucggccccgcaucagaaauaucccuagccggauuuccaucuacuggacaauugucaaacccggagauauccugcugauuaacagcaccggcaaucucaucgccccucgcggguacuucaagaucagaucuggaaaauccagcauuaugcggucugacgcucccaucggcaaguguaagagcgaaugcauuacaccgaacggcuccaucccuaaugacaaacccuuucagaacgugaaucgcauuaccuauggggccuguccuagauacgugaagcagucuacccugaaacuugcgacaggaaugcggaacguccccgagaagcaaacgcgcggcaucuucggggccaucgcuggauuuauugaaaauggcugggaggggaugauggauggaugguauggcuucagacaccagaacagcgagggccgggggcaggccgcugaccugaaauccacccaagccgccaucgaucagauuaauggaaagcucaacagacugaucggcaaaacaaaugaaaaguuccaccagauugagaaggaauuuagcgagguugaagggcgcauccaggaccuugagaaauacguggaggauaccaagauugaccuguggucuuauaacgcugaacuccugguggcgcuggagaaccaacauacaaucgaucucaccgacuccgaaaugaauaaacuguucgagaagacgaaaaagcagcuucgggaaaacgccgaggauaugggaaauggcugcuuuaagaucuaccacaaaugugacaacgcuugcauugggagcaucagaaauggcacauaugaucaugacgucuaccgcgacgaggcccugaacaaucgguuccagauuaagggaguggaacucaaaucuggcuacaaggauuggauccuguggauuuccuuugccaucagcugcuuccuucuguguguugcucuccugggguuuaucaugugggccugccagaaaggaaacauuagauguaauaucugcauuuga
